United States Patent Application Publication US 2004/0123343 A1 - sequence listing, part 7

SEQ ID NO: 17348 - DNA, 659 bp, Oryza sativa
  Clone ID: PAT_MRT4530_23009C.1
tggatccccgggctgcaggaattcggacgaggcttccctcctcctccccgggcccaggcgccgttccactccccgcgactctccgccgcccgccacgctaaaccctagccagtagccaccgagggtaggctccctcagcgtcccccatccccagaaatgcctgcgtcgtggtggtccgccgccggccgcggcaagccgtcgcggtccaccaccgtcgtcgccaacacggagagcgggtcccactgcctcaaggtcgacggattttctcgctccaagaacctccgccccggagagtgcctccagtcaagcacgttccctgcgggaggccatcgctggcgcatgtattgccagcccaacagcgacggcaccgaggggaccgagggtttcgtatctgtttaccttgtccttgacgaggatgtcaccaagccggtgagggcggagtacaagttcaccgtcgcagtgaagaatcggcttcccttcttcctcagcaagaagccgcccgaggtgccctccttgaccccgcgggtcaacacatcggactttgatagccacggtgcctggggttttgccaaattcctcaagtgggaggacctggagaaggcgggctatctaaagtacgattctcttattatcaagtgtagcataaccataatcaacga

SEQ ID NO: 17349 - DNA, 197 bp, Oryza sativa
  Clone ID: PAT_MRT4530_2300C.1
gcggcgagcatctcttcgccgttgatggcggccggacctttgtcaaacgtcggtgcgcgccgcagcgatggcatggaatccggacttttctctatcgtccgtgagtgccacggtgttcgatcgatccgtgtggcgctcgagacggcggccgaccgtcacagctctaagccagcatggcggttcaatcaagcccctgt

SEQ ID NO: 17350 - DNA, 150 bp, Oryza sativa
  Clone ID: PAT_MRT4530_23010C.1
gcacgaggctagaagagcttaccgtctagcattcgtcttccactacccacactacaaaaggctgattgcagttgcagagggaggcagagcgcggtctcagtctcagagggattggatggctgacgacggcgcaggaggctggcgcgggcc

SEQ ID NO: 17351 - DNA, 1106 bp, Oryza sativa
  Clone ID: PAT_MRT4530_23011C.1
gaggcccaagccacggcggccggcggcctcgccggcgagatggaggtggaggcgtaccgccgcctcttccccctcgccttcctcgagcgccacctccgcgaatccgtccgccccgacgcgcgccgccccgccgaggcccgcccaaccaccgtcgccctcgccgccgtgtcctccgcccacggctccgccctcgtccgcctcggcgacaccgccatgctcgcgtcgatcaagctcgaggtgatgtcgccctccggtgaggcccccgacgaaggatctattgctgtggagttccacatgccgcctatctgttccccgcttgtcagaccaggacggccggcagaggtggcgccagtcatctccaagaacctagaggacattctcatgagctcagggatgctaaatttgaaggagctctgtttgatcagtgggaaggcatcttggttagcatacctggatgtctattgtttgaatgctgatgggtctctattcgacgctgcactaatctcagctgttgctgcatttacacatttggaaattcctttggtatctgtcggtgatgatggtagagtatttactgttgggggcaatgaaggcaaagccaaatatgaattggtaaacagagaaaagaggaagcttacgattactaatgttccattttcccttacatgtgcacttcacaaggataatgttctagcggatccaactgctgaagaagaatcaataatagagacttctgtgactattgttctcgattcttcagaccagatagtgtcaatacaaaaacctggaggtgcagtgacatctatgacaactattaaggtctgttagctaatccgtgcttaatggaaatttgagttaagagaaattctcatggacaatgttgaagcaatggaagtcgaccaaactgattaagtttgtcacagttctgattcagtgaatctaaccaaattatttttgtagtagctctttcctatctcttggttgtactcgtagcgtgataaattttagcacctttggctactatccgtttaattaaataagtaacagtccgtacctgcctatgattttattgaattaaagtggtatcataattttaaaaaaaaaaa

SEQ ID NO: 17352 - DNA, 339 bp, Oryza sativa
  Clone ID: PAT_MRT4530_23012C.1
atggcgctggatctgcatcttgtttgctcctcgccctgtgttttgcacataacacttgctgctggtagaacaacaagaactcatggcggaaagaatcagaggaccgaggaagaagaggggaaggaggagactggaaaagctgacctggaacccttggcgatggcggcggcggtgcatccatcccgccatgatgtcctcaccgccggcgtcctccaccgtctcgggtcgggcggcgctctctcctcccaccccgacgtcgccccggcccgatcctccctcctccgccgctgctgcatctgcttgacaaccatagagacatttggtcgaacacatagatag

SEQ ID NO: 17353 - DNA, 591 bp, Oryza sativa
  Clone ID: PAT_MRT4530_23013C.1
ccccgcaaaaaaaaaattaatggacccctcaaaaaaccaatctagggccaaaaaaaacaaaaactggacaaaaacgggccgacaactttcaaaacaaacaaaaaacaaaaaaaatccccccctattaaaacggaaaatcaaggggggaaaaacaaaaaataaggcccaaaactttgaaacccccccccaactaatcttggggcaacaataaagggggggccaaaacgggggttagttaaaagtaaacaaaatctaggggggcctcaaaacccgggagcccggaacccctgggaaccccataaacaaaaaaaaggcccttgttttttggaaaaacacaagagggcgggggttttaaggcccgggaaaacagccctgacaaaaaaaaaacccctcccctttttggggggttcggaatctggacaaaagggaaaaccccgaaagggggggaaatttggggccccccccccccctggggggcccggaaaaaattaaaaaggggttggcaaagtttgagttaaaccccaggaaaatatgccccccggcggcccctggggggtggaccccccaaggggaaagctttttacaaaacat

SEQ ID NO: 17354 - DNA, 653 bp, Oryza sativa
  Clone ID: PAT_MRT4530_23014C.1
gagatcgtcgggtcggtgcggccgggcctcgaggacgatgacggccatgagcggcagcagcaagagcgtgaggaggtgggtgatcaggtagtggtaccccagcttcacgtacttgaggttcacgctctggaggaagtccggcagccgccggtggctcggcgtcgccgccgccgccgccgcgtcgccgccgttcatggctctcgcctagatctgatggcggaatcaatcacccgagtcaaagatgtgggtgctcgtccgagattgcgcgtggactggactgcctgcctggtggatgaacggattgttcgggggcggcgatgattggggggcagctggagaagagtgggagcggaggaggaaacggatgcgaggcgattccgccgccggcggatgcggatgcggcggcggcggaggaggaggaggaggcggaggcggacgcggacgcgggaacccctcgaagtgttggagtattaaagaccgcaggctgtggccccacatgccagtacagccacgagacgcagcgtgtagccgacacgtgggcccccacgcgcgtcttctcgtcgcacctgcggttttgtcggccatcggatccagcggacggctccggctggttcgtcgccggtccagtggacggcggagattctcccaagtga

SEQ ID NO: 17355 - DNA, 498 bp, Oryza sativa
  unsure (1)..(498): unsure at all n locations
  Clone ID: PAT_MRT4530_23015C.1
aaggctgaancctnactgtataaatcgcgagcaatcgctaggtacatctttcgcaagtacaaaccagagttcctgggactcggagaacgtggaagcctggaagagtcggcaatggtggacgtgtggctggacgtggaagcccaccagcacgaagccggcgtgaggcccatcctgtggcactagatcatcaacaagttcgaaggccgcgaccgcgacccaggcgtcgaggacgagagcgtcccgaaactggataataggctcgggagagtccaagcgaagctgtctggcttccaggtccctccccgggaaccgatctgcctcgcgggcctcaaacacttctgcaacatgcgcttctncaatgcatccgaatatccccagcngggtcgtccttacctccaccctatatattgtgtgaagcgctttctgccctcccctctgtcgctttaggattagccctccttcccccgatctgccctctcgtggtgcgacaacgctacg

SEQ ID NO: 17356 - DNA, 1481 bp, Oryza sativa
  Clone ID: PAT_MRT4530_23016C.1
cccacgcgtccgcccacgcgtccgctcacgcttctactcactcttcttgctgctgtttcctaggatgctgaaagctcctcccaccagtttcctctcctcgctggacccgggtggatggcgccggcgacctttccgacggtctccgccgccgatttcggcggctctgatgaccaatcccgcttacttcgaggtgggaagatacttgggtggctacggtttcatgaacatcacaagttatccatcttctcaatttggagggcttccagatgttgctggtattcaaaacctcggtcttggatattcaccggaagagattgagcgattgagagctcaagatgttggagaaggagaagttaatattagactttatgagggaagagtggttcaaggtccactgaagggcacagaagctctatttaaggtatatcctgggtcccgttctggtgcttctgaagctgacttgatggcagttaatgagctaagaactcatgcttttcttcagaatgatgctagtgacatctgcgagaacattcagtttctgttaggagcctttgagacggctactggagagcagtggcttgccttccgtgatgacgggagatatagtgctgcagactatgcaaaattaaccagtgaaagaaaactgaaggagcaatctggatccatatcgttctggaatccttacgatcgagcatacaaattggaactaaagcgatactttgttcttaagctgctttatggagctatgtgtggccttgttcacatgcataatcatgatagactgcaccaaagccttggtccctcttctgttgttctcaagtattcgtctgttggttctggagcattgtcggatggactgtggcgtcgagcatctgctgctggagcatcaactcctctggagaagcgagcttttggaatagctgacgacatgcaaagacttttggagaatacgttccgtctcgacatttatgctgcaagagagtactttctggcagatgaccggttgtccgaagctgtagattttctagacttgggtgatggtgccggctgggagttgttgcaggcaatgctaaatccggactatcgtaagcgtccaattgctgaagctgtactgaaccataggtttttgactggggctgtcttatggaactaatcagcaacaagattccacaaggtcccggcgaaaaaaaaaaacaagattccacaagcaaattcatgatgtaccgtacattcaaatgtttgcattgtatggaaaaaatttgtacgaaatgtccaagcatttcatgaaatcagatgcttctgtgtgcttaaactaccgggagcgatgtatatagtcaatgaatcgtgtgtgagaatagcaacatgatcgatttcttttgcggggttattcttgattatgttctctgactccctttttattttcagatttgtttatatgaacagtttatactctgtaacggcagctttgagagtttgagact

SEQ ID NO: 17357 - DNA, 623 bp, Oryza sativa
  Clone ID: PAT_MRT4530_23017C.1
cagcttttgtacagttgcttgccttccgtgatgacgggagatatagtgctgcagactatgcaaaattaaccagtgaaagaaaactgaaggagcaatctggatccatatcgttctggaatccttacgatcgagcatacaaattggaactaaagcgatactttgttcttaagctgctttatggagctatgtgtggccttgttcacatgcataatcatgatagactgcaccaaagccttggtccctcttctgttgttctcaagtatgctgcattttcctcctttagttttcttttttattggaatgctttaattttcattttgtagtttatgatatttcaattcaactaaccattagtagatgtgactttctttagtactgtagcagagaaaaatgggcgctatttggttccgcatctccgtgatttagctttttctgtagatattgggtattcgtctgttggttctggagcattgtcggatggactgtggcgtcgagcatctgctgctggagcatcaactcctctggagaagcgagcttttggaatagctgacgacatatatggagctgggctacttcttgcatacatgtcatttattcccttttgcgaagcaggaactatggat

SEQ ID NO: 17358 - DNA, 291 bp, Oryza sativa
  Clone ID: PAT_MRT4530_23018C.1
tcatttggacagagagctgttcgcggtagcgtagcgaccaccataaccataggcgatgggaagacaacaggcttctagagcactcgcattgattgcgccggcaatcatatcacgacgagagagcatctttgctgatacgtcgagctttggaccttgatatgcaatgctctccacctcccgcatacacctcataacccggtgaagatgctcaagcctcttctgaccttcatcgctcgggaaatttggtgcgagtgcaatgtcagtatctttcaacatgtcgccaccccacat

SEQ ID NO: 17359 - DNA, 168 bp, Oryza sativa
  Clone ID: PAT_MRT4530_23019C.1
atgctccacacagaacgggagattgataaaaaaggacacatattgcggtaccatgagggcaacctagcagagaaagcgaaccagggaggaagtgccttgcgtgtcactgatgcattgtctttgatggcaaccggacaagccacactcacgttagaccctttggaactt

SEQ ID NO: 17360 - DNA, 252 bp, Oryza sativa
  Clone ID: PAT_MRT4530_2301C.1
accttaatgaactttctcattgttcacaaggatttctctccaagttcttagaaaccagcctatttgcagcatgagtacagttacaagctcagactacatacgagaactacatcaaagtttttctacgtacagtattacatccactttgttgattcccatcacatgttctatgttaccaacttaccatctgctttcctcatttgcttcccatccatttttactccaaatatttgaaaaatgagtgatgtacat

SEQ ID NO: 17361 - DNA, 1909 bp, Oryza sativa
  Clone ID: PAT_MRT4530_23020C.1
cccacgcgtccgcgatcgcgcgtcgcggaatccggatgctcccggcggcgctgctcgccgtcggcgcatgagcttcctccgcgcgctcgcggactccctgtcgtcgctgctgtactcggcggctgcgaaggggggagacatggacggggccgcggcggcgccgtcgccggcggcggtggtgggggagcgcgtggcggtgaagctcaggggatacttcgagctggccaaggaggagatcgacaaggccgtgcgcgccgaggagtgggggctccccgacgacgccgccgcgcactaccgcaacgcgctccgcgtcatgctcgaggccaaggccgcccgcgtcccggacgccgtatcctccagcgagagggggcaggttagggtctaccaggagaagatcgcaaagtggcagactcaggtggaggaacgactccgggtgctcggccagaggagtggagcggctgcaccagtgccaaagaaggttgttacaaacaatcctgttaataggaatgacagagccgcatcaactagcttccataggcctacttcgcagcctagccctacctttaatagaggtggtcaagcatcttctcatcagaagagtagcagtggaggtgccaaacctgtgcaaagagctggtgcaaactatgatgataagcttgttgaaatgataaatacgaccattgtggatagaagtcctgctgttaaatgggaagatgttgctggccttgacaaggcaaagcaagcactcatggaaatggtcattttacctaccaagcgaagggatttgtttactggtcttcggaggcctgctagagggcttcttctctttggtcccccggggaatggaaagacgatgcttgccaaagctgttgcatcagaatctgaagcaacattttttaatgtttcagcttcttcactgacatcaaagtgggtaggagaggctgaaaagcttgtacggacactcttcatggtcgctgtcgatagacaaccatctgtaatttttatggatgagattgatagtgtcatgtcagcaaggttagctaatgagaatgatgctagcaggcggttgaaatctgaatttcttatccagtttgatggggtcacttcaaaccctgatgatcttgttattgttataggtgctaccaataagccacaagagctggatgatgctgttctccgtagactggtaaagagaatatatgtgccattacctgatccaaatgtccgaagattactgctgaaaactcagctcaaaggacaatcattcaaattatccagtcatgatcttgaaaggcttgctgcagatactgaaggatattccgggagtgatctgagagcattgtgtgaggaagctgccatgatgccaatcagagagcttggtccacaaaatattctcactataaaagcaaatcagttgcggcccctgaaatacgaagatttcaagaaagccatgactgtgattaggccaagcctgcagaagagcaagtgggacgagctagagaaatggaacgaagaatttggttcaagttgacactagacaatggtgcgccctatgcatcagcagttttaatttggccagtattaccatctcctcaacataactattggtttgcaagtggtcgcgcgcccattcaggcattgatatcccttgccatctgtaacatgtacatgtacaagaaaaccctatatttcatgagccatttgagaggggaagctaaagatgaactcacggtgtaaataaacgcccatagcttcaacccgtaccaaaacagtcatgtaaacaaacactgctaaaaatttacatataccactgttccgttactttcaaaaaaaaaaaaaaagataccctccagctccatgccatatactctatttcagttatcgtcacttaaaaaaaaaaaaaaaaaaa

SEQ ID NO: 17362 - DNA, 319 bp, Oryza sativa
  Clone ID: PAT_MRT4530_23021C.1
tactcttcctgatatgatgacctattgtagtgggagggacgtaactagtccctgggatgtggtagaccttgctgtgcttcactgcataggtgtatattgcccagctaccgatggaacagtacctgccattggcacagctgctggccacttcagccgtagaggcccatgggttgctactgcattcgcttaaacactctgggaggctaccgggaacactctgtctgctgctgaaggattgcattaaccatggacgtcgggaacggttagctcaggttatttggctaacatccgtccgctgtatccgccttagctcactgca

SEQ ID NO: 17363 - DNA, 141 bp, Oryza sativa
  Clone ID: PAT_MRT4530_23022C.1
atggccccgtgcacacttggtccgcaaactcttggtcacttccgcacggtggcgatgtgcagcagttggatggaccaggctctcccgatgcctcccaaccccaacatagctcatagctcaagagcaagaggtggtacatag

SEQ ID NO: 17364 - DNA, 221 bp, Oryza sativa
  Clone ID: PAT_MRT4530_23023C.1
ctcttaaagtaatttatatcagaacacactctttacctttttggaacatcaacgctcatagtgtgtgtatattactcaaggtcgtgcccgagttcaagtcgtcaacaacaatggaaagacagtgttcgatggagagctcgtcgtggcagcttctaattataccacacacacatgtagtcataaagcacaaggagagtctcatatatgtcatgaacaccgta

SEQ ID NO: 17365 - DNA, 450 bp, Oryza sativa
  Clone ID: PAT_MRT4530_23024C.1
catgccaatattgattgatgattcctaatgttgctaaataactcatctcaagagtttactgactaaatatggcaagccaatacactggtgtttcctttatacaataaataaaagcattaatagttgcatagcatactttaaagtcaaacggaaaaaggtatgttcctcttcaggcatttttcaatgccgaggtgagaagggtgaagatcttaggcaaaacatcaccgtgctagagttgataatgtaaatgaattcagggtacacaaccaagaaagaagacggtattcagtgaatcaggcaggtaattgtgtctacacaattattctaatatgtttgtattcctctttaccttcaatgaagctccactgacaagaaaaccattaagatcaggttgtactgcagttccttgcgttcgaagcagacaggacctgcatagatgattcatgtgga

SEQ ID NO: 17366 - DNA, 815 bp, Oryza sativa
  unsure (1)..(815): unsure at all n locations
  Clone ID: PAT_MRT4530_23025C.1
aactgtgctacatgtttctgtaatccctggccagtcaaaatggtgccctgtatgggcccccaggaccaactttacctttggggccatgaagcgttatcaacgttgcgtgagatgtgggatgggcccaatttgggactatgactgatgatgatgctntaatgctgatgtttggagacgccaatnttganagcanacctgctgctaacctcaaatgtttgatggggagaggtggacacaagcaagaatggctgaaaaggcaatgcccnatgactgtgccccgtgctaggcanacnnatgggaacctaggtgcgtgcgtgtgccaaactgatgcgtgaggacctggaaaggatgtgaggaggatgctgctgatggacgctagattgatgtgctggaggaggggccggtggcacctgactgganancggcaagaaagtgtgtgaatggaggctgccacatgtgcaatgatgtgtgcggtggaatgctgctgtgcntatgcacctatgaccatgatgcaatggaccaatggggcatgcctgcgcatgtgtgctgtggtgaactgagtgttgtgggaanatgatgtgacaaggctgagaaagaaaagtgaggatgggtgcatgtggcaatgaacctgtggtggaaacccatggcaatgggaactgtgctgataaaatgccctgctgccatgggagggatggctgcctgaccgtctcttcttgacacagtttcaagngtacatcgttctatatttcaatgtagaaagaaatacggttgctttctactntacnaaataggtccttcctttaaaaaaaaaaaaa

SEQ ID NO: 17367 - DNA, 1242 bp, Oryza sativa
  Clone ID: PAT_MRT4530_23026C.1
atggcgagcccactgccgacgatggagaccgcgcacgccaccgtgctcgccatcgggacggcgaacccggcgaagtgcgtggcccaggaggagtacgtcgactggtacttccgggtcaccaagagcgaccacctggtcgaccttaaagccaagatgaagaggatgtgtgacaaatcaggcatcaggaagcgccatttgtgcctcacggaggacatgatcgctgcccatccagagctcctcgaccgcgccgccccgtccctcgacgcgcgcctcggcatcgccagggacgccgtgccggagctggccatggccgcggcggcgagggcgatcgccgagtggggccgccccgccgcggacatcacccacctcgtcgtctccaccaacgccggcgcccacgcccccggcgccgacgcgcggctcgcggagctcctcggcctccgcgccaccgtccagcgcaccgtcctctacatgcacggctgctccgccggctgcagcgcgctccgcctcgccaaggacatcgccgagagcaaccgccgcgcgcgcgtgctcgtggcgtgcgcggaggtcttcctcatagcgctcgccgcccccgacgaggcccgcctcgacgccctcgtcgccgcgtcgctgttcggcgatggcgccggtgctgtcatcgtgggcaccgacggcgacgacgacccgggagcccccgtcgaacacccccccatcttccacatgttgtccgcgtcgcagaccaccatagccgggacccaccagagagtctccctgcagctgagcgagcgcggcctcgactacaagatctccggcgaggtgccggcgctggtgcgcgccggcatcgagcggtgcatggaggacgcgctggcgccgctcggcctcgccggctgcggcggcggatggaaccacctcttatgggcgatgcacccgggcggccgcgctatcttggacagctacgaggcgggtctccggctggagcccgggaagctggcggcgagccggcgggtgctgagcgagtacggcaacatgagcggcgccgcgatcatcttcgtcctcgacgagctgcgacgccggcgccggcggcgggatggtggggaagaagaggaggaggagtcggacgagtactgcgagtggggtgccatggttggggtcgggccggggctcaccattgagacgatggtgctgcgtgccagtgccaccggcggccatgtcggcgacgaagtcaagaagtcgactactgcttga

SEQ ID NO: 17368 - DNA, 1077 bp, Oryza sativa
  Clone ID: PAT_MRT4530_23027C.1
atggcgcaggctagcccattctgtggcaagcttaacgaggatgccagtgatcatctgcaaaggttcctggatatctgcagcacgtacactatgaaaggagtcagcccagatgtcgtcaggctcaggctattcccattttcccttcttaggaaagcgaagcagtgcatgggagagactgcaggagtaagtggtcgcctgtcctcatcatgggatggacgatggctgatcctgcagagcttctacaatgggctcaaacctgcatcctgcgaccatttggacgctgctgatggaggggccttcttctccaagacggtcaggggaaccgtcaagctaattaagaagatggtctccaacatgggctggggtgcagaacgactccagacccgccagcgaggcatgcacaccgtcaaggagacggaaatgctcgctgcaaaattggatctccttatgaaacggtccgtcgctcaacgggtcactccggggatgactacattgagacccgtgaggaggaaatgttcatggggaacaacaacaggtttcgtccacaaggaggccatgggtggagccagccccgcccatacttccaaggaggcaacaataataacgctaagcttcaacaagatgatagagatacagctggcacagttagctgctctagtcgctacaaatgagtctaggaggattctaggacaacccgaaccttccttagagtatgttaaggcgatcaccatgagccggggaaagtctactcgggatccgccatatcctaaccctgcaggaacacagagcagtaacaaggaggcatcacctgctagtccggctgataccgacaaagcagctcaaccaagtaaaatagtgccgcaagagtactgcgacacatcggctgcttccgtttccccaaagatacaagaaaccgccctctgcgaccttggagcaagcgtcagtgtaatgcccaaagaggtctttgacaagttcaacttcacggtgttggcaccaacaccaatgtgtctccaactggccgactcgtcggaccgctacctagcagggattgcggaggacgtgccggtcaagatttga

SEQ ID NO: 17369 - DNA, 363 bp, Oryza sativa
  Clone ID: PAT_MRT4530_23028C.1
gaaaaccgaaaaaaatattattgatgcagaccacctaggtcctagtgacagaattacagcgtgcctgataagaagcacattcaaggctttatttaatcattcagtttataactactgctggacactgaagcagcgaacactatacctaccacaagaggcagcatctgacacaggggaaaccgaaaagatgttgcggtggtttatggtacgagcgtaagtggcgagaaatccacttgacagctaaaataaaccgagatgcacttataaagtaaaataagagggtaagcggcttaccgaccaacacccataggctaccgacttacaccgtttatggcacgccatggtgcattggtggaaacaccg

SEQ ID NO: 17370 - DNA, 1060 bp, Oryza sativa
  Clone ID: PAT_MRT4530_23029C.1
atgaccgcccttcgccttgccacgcgcccgtctccccgcaggaaaacgccgtggggagctgcgccttcccccgccccgcgcggagagctcggcacgacgggggacacgtcgccgcgcgcccccacacacgtggctctcctcccccgccctctttataccaacccccggcaaccaccaccgtctcgcctgcatcgctcgccgccgcatccaccaccaccaccgcttcgacgcacgcacgtagccgcgaggcttgtggagagagtaaggagaaggatgagcagcagcaggctggacacctggacgctcaaggaggaggtggcgagcatggacaagcggtggctcgtcgacctcggccacccgctcgtcaaccgcgtcgccgacagcttcatccgcgccgccggcgtcggggccgcgcgggccgtctcgcgggaggcctactttgtcaccgtcgaagggcttggaggggacacggccgggctggacaacgccgtcaagaggagcaatttctcgagaggggatgatggccagaagtcgcttgatgccgtggtaaaatccgctgggaaggaggctttccagtggggattggcggccggggtgtactctggactgacgtacggcctgagagaggccagagggtgccatgactggaagaacagtgcggtcgccggcgcgatcgctggcgtggcggtggcgctgacgggggacaccgggaacgccgaccacatggtccatttcgccatcaccggcgccgcgctttccagtgcggcgagcctgctctccggcatatactgatcgagcctgaagtgcgggaggggtttaggattatggatttgtaggaaatgttctcatcagatgcacccatgatgtgtagtccccgtcgccgcgttccttttatttgtcttccttcgaaacaatcccaatgttagtgtaagctagctagctagagctagaacaagcaaaaactccagatgtaaggctagctacttagtttatgtttatgtttcatggcacaacactgttcgtgtgcggttccaatcctcctcaaaaaaaaaaaaaaaaa

SEQ ID NO: 17371 - DNA, 1164 bp, Oryza sativa
  Clone ID: PAT_MRT4530_2302C.1
atggagcaattgcgactcggtggaacaccggtggaaccttgtggtagactctcccaacaacccccgcatcacactgcataccctggtgatcttggtctcctgggaaagaaatctggtgtgagcgaaatgcaggaattttttgaaacgctgccggcatccatcctcgccaagatcagggagaaggtcgggcatggggtagccttccacctcgaatccgtgaccggcgagatcagagatagcgctttcgtatctcctgacagtatccggagacaatgtaggggaatagccatgcctatccctgaagtcgatatccggcggcatgttttggcgtatgtaagcttctatgttgtggcttctatgttgattgtgttgggagttgattgtctcgtggtgggatccgacaaggccttatcggctctgggcgtccccagccgaagatcccttaggttcctcggaggccttgtcaagacggcgtaaagggacaatagcataggtttcaacgctaggtgtcgtcgtggtaagggatctctgggtaaaacacttggcattattgtgtactgatatcaactttgttgaggtagaggtagtgggagaatcgctacacctctggtcgaggaccaggtagtagtcgtaactcgaccacttgaagtaaatgcacgagagatcgctacgattaactggttgagaaccagtaagtagatgtctctcgatcatttgcagtcgtggaacgaggaccgttacgatgccggtcgaagaccagtcatagttgttcctcaaccatcttatagcatatccggatgttcgttcacaatcatgtcgggtgatcaagccgacaacattcgcgaggaagtatccgttaaccaccttttctcgaatagtccagccatggccggtgctatgagataggtcgtcggtcttcgttggtaggttgggcgcgacgactctgcatttgtcgaggttgttctcgataatacggtgtactcgaccacaaactattcgagtgctcaattgttcggagtatgtgtcaacacgtgatgtagtcagccgtcttctcgcttggctgtccggctgctgcacttgagatcgatccaatccgaccacggatacaggcgacatgtagtagtattctgttttgtcagtagcactttgtgttgttatcgacat

SEQ ID NO: 17372 - DNA, 406 bp, Oryza sativa
  Clone ID: PAT_MRT4530_23030C.1
tggtgcatcctggcccgagctccgccccaagtggcttcgcccagatccagataaagcgagagagggggcgccgaatccaccgagagctggccggagcctcgtccgctccgagctccgccgaatcttgagctggcgtccgctcgtccacctcgtatcgccggcttcgtctgctcatcctcgtgtcgccagcgtcctgccgtcttccattcgtcctcgcgccactggcggggccatggccgtggcgacgtggtggtggacgaccactgccgccgtctactgcaacgccaccatcgcctcctcctacctgcccgttgtctgccgcgccttggcgacgccgacgagactagcccccgatgctggtgagaggcaccacgccaagctccaccggcagcatatatctaattaa

SEQ ID NO: 17373 - DNA, 2000 bp, Oryza sativa
  Clone ID: PAT_MRT4530_23031C.1
cggttgtcctccgccgcagtctccattgaagcggcgggtatatattccgcgcctcagagtgaaaatacatcaggaatcagaagtaagtgaactcaaatgccaaggcagtgaagaaccaatggatgcttcaagggcaactacggaacaattaatggagagtggagaggatgcaaaaactaccgaaggtgcaaaatggatggcaaagaagaggaaaagggctgttgaaagcatagcagcattttgctatgaagctgggattccttttaatattctttgcatagagagtttccagttaatgttagaagaaattgggaaatttggacctggctttcaggggccctctatggatgagcttcgagagaatttattgcaggagcatgtttcagctataactgataaagttcgatggctgaaggattcattggagtttgggggatgttctattattcttgacacttggcttgatgaaaatggaaggcgccttatgatgctgggagcccactctattattggtttgacttttattcgatccatccatctttcatcagaggcttataatgatgcatataagtttcgactgcttgactcgtgtattgatgaaattggtgagaaaaatgtggtgcaagttgtctcaaacattgaaccaaacagcttaatggcaacaatgcttactgcaaagagacctagcatattttggacgcagtgtgctgcacgttgtattgactcgatgcttgaagacattgaaaatattacttttatcaagaatataatagaggatgcaaggttaatcactgcttttatatatggatgtgcacatttgttggacatgatgcacaagttcaccaaccaaagggatatagtccaaactgggattacgcattccatcacatcctacttgaacttgaagagcctttatgataagaggtttgagttgaagactatgtttgtttctagggattgggaggacagcaagtggtccaaggaagctgtgggtgagaaattctataatctagtagtaaacaagatgttctggcatagagtgctatatgctatcagcagcctggagccaatagtggatgttctgaggtcagacagtggggtactatctatggcatccatttatggtgatcttgcaaatgctaaaaaggaaattgcattacggtttttaaacatggagaagcattatctgcctatatggaatatcatagacaggagatgcatgcaatgccagtctgaagacaccattgcacttagctggttattatttgaatcccttcttctacttccacaacaaaaatgaaattgagaatcttggaatattcacagatgcacttgttgagtgtatgcttaatatgtacaaagatcagtctactcaagaaaagattctggatcagttggaactttacaagacttctcacgatgttttttttttccaaattaacgcaatatccaagttaattttgctctcatatgttatagatttttggtggatgcttcacagagcattaggagagttgaaaaaaatggcagagaggattttgcgtttaacttgtggttcctttggctgtgagagaagttggattgaaatggtaattatccataagaagaagtcatctcagtttacatggaagcaattctatgattcagcatttgtaatggtcaatgggaggttgaaacggaaaggtgaaagggaacacagtgatcctatacttccatatctccctgatgaagatgaaccatatgtctggctggctgaggctgacatgcatgagaatgataatgctctaatagatgtgcataaagatgaaattagagttatgctgacagcgccaagcatcaatggtgaagaagggccaagtcattacagcggaaaaggatcgccatgcgatgcttcatgcccaaagcaagcaaaggaaccatggcacgatggtttgtcattagaagaagagcatgagggaagatgcgaagatgaacaaacacattgtagcaaaaggaagaaa

SEQ ID NO: 17374 - DNA, 174 bp, Oryza sativa
  Clone ID: PAT_MRT4530_23032C.1
gaaaagcaacattaacaaaaccggtcaagatgctgtgatgattgtgaaaagttaatacaattttgttctacatccagccatggtgttaaacagagcaacaactcacatttgatgaacagtagccaaaagcaattttgcagagaatgattgttgcgggttatttctagttacagt

SEQ ID NO: 17375 - DNA, 633 bp, Oryza sativa
  Clone ID: PAT_MRT4530_23033C.1
atgttgaatccaatagtaacatacaaagatcattcatcagctttattccgaagatatgagaagaaatttgaccacttcaatgttgagaagaaccagaagttattaagtgttggatcctcaaaccttgaatcacatgagattgaatcaagtgatctgacgctgtccaggtactgcgcttacctggtggtgttccaaccggatctcctccccgactacagtgagaatgcggaggacctgttccaggacatgaagacggagctcaaggatatgctcggctgttaccactactatttctctcgaggccgtaagcgggccaacgccatcgtcaatccatcgccggctaacaacaacgacgacgacaacaacaacagcaagaaacagggaagcgtgcgcaagggcgcagagttggccacattattgctacaattacaaaaggacatgtggaagcttctggcggaggtgtggacggagatcgtcgtgtacgtggctgcgtccaacgaggtggagcgtatcatggcgcacaggaatgtgctatgccaaggaggcgagttcatcaccgtgctttgggctctcacgacacacaccggcattacccgagatcgccacgaaatcgtggttgaacaccacccgtag

SEQ ID NO: 17376 - DNA, 755 bp, Oryza sativa
  Clone ID: PAT_MRT4530_23034C.1
aaaaacttcgtctctttcctcccttctcccgaaatccctcgaccctcgtgcagacagctcctcctcccccatcggccatggcgaccgccgcgagacgtctgctcctcccggcgctccgcaagtccctacccgcggccaacggcgccgcgcgaggcgtctccacggagagggcggtcggcgccgccgccgtcgtcggcagccacaccgccaagtggatgcaggacacaagcaagaagtccccaatggaattgatcaacgcagtacctccgatcaaggttgaaggacgaattgctgcttgtgatgggcgtcaggataaaggtcgtgaaactggttccctcggccatccgatcgaatatatctgccttgacctggaccagcctgctgtatgcaagtactgtggtctccgttttgttcaagatcaccatcactgagaagacaagatgcagtccttcaccacactgaaatttggaattgaatgtgtgtatttggtttaaaatgttccagtcagcgtgtcatgtattctgcctgatggcaagatgatgatatctttgacgatcatcgtactttgaatgacataataatgcccgctttaataacagtggatttctttttctttagttggcatctgttgcattttctgagtctatgcaatttctgtatctaattacccgctctgcgaatctgacaacctgagatcgaaattgaatcaattgcgaaactagtttagttataaaaaaaaaaaaaaaaaaaaaaaa

SEQ ID NO: 17377 - DNA, 555 bp, Oryza sativa
  Clone ID: PAT_MRT4530_23035C.1
cattggctataaaaactaaaatagaccaaacccttgtttttttttacccttcaaaaacacatacagatccagacctttcccaaccggtgggaatcttctttgaaaaggattggcctggaaggctgttgaaacagaaacagctgtatatagttgggaattctgaataaaatcgtccgttaggggcaattctgaattcggatactataaaaatatagggtttgaaaaaataaagttctccagggaaggggacacatatttcctgtggaacaaacaaagggggattggacgctcaaactgaaaacaacggaactagggctaagcctgtttaaggcctttaaaggcagttggttaataaagggggctattttgccctttggaacccctttttgaggaacaatctggaaggggcaataaagaccaaaaatttccatagaaatatttttaacaaggttaatggtaacacgggagcttttaaaacaccagaattatgcccttgttttaaaaaaccctggcaagtggaaaaggcaggctaaggcttaaatatagggggggggg

SEQ ID NO: 17378 - DNA, 2715 bp, Oryza sativa
  Clone ID: PAT_MRT4530_23036C.1
atggctaagatgggagcaattatgtacatggttcagttggatgatcagcttgaaactaaggaattgcctattccccctgaagtgcaggagctgattcatgagtatcaggaggtgtttgcagaaccgacgggtttacctcccaagagacaatgtgaccatagaattccactggtagaaggagcacaaccggttaatttgagaccctataggcaactaaacaatgtcactgttaagagttatcctgtaccaattattgaggagttgttggatgagttagtaggagcaaagtggttttccaaactggatttgagggcaggttatcaccaaattaggatggtgcctggggacgaacacaaaactgccttccaaacccattccggccactatgaatacagagtaatgtcttttggactgattggagcaccagcaaccttccagggtgccatgaatgctacttgggcatcagttcttaggaagtgtgccttagtattcttcgatgatatattgatctacagtcctgacttacctactcacctcaagcatctcaggactgtgctgcaactcttgaagcaggaccattggcaagtcaagttaagcaagtgctcatttgctcaacaacaagtgtcttatttggggcatgttattggaagagaaggtgtggcaacagatccaaaaaagatacaagatgtacttaattgggccactcctaccactgtgaaaaagttgagggggtttttgggcttagctgggtattatagaaagtttgttagagggtttggcttaccgagcaaaccactcactcaaatgttaaggaagggagtgactttcaaatggaccccagaagcagaggaagctttcaataccctgaaacatgccttagtgactgcaccagtcttggctcgtcctgactttgctaagcaatttactgttgagacagatgctagtgacacaggaattggagcagtgttgtctcaagagagccacccaattgcttttcttagtaaggcattgggacaaaggtctagggggctattgacttatgagaaggaatgtatggcagtattgctggctatagagcattggaggtcttacttacaacatcaggaatttgtgattttaacagaccattacagcttggttcatttggctgatcaaagaatccatacaccttggcaacaaagagcatttaccaagctattgggcatgcaatatactatagtcggtgggtatgaaaaggatcccctggcttctcagttgttagcagaattagcagttgacccttccgctaaaccacatttttccttacatcaagggttactcagatacaaaggaaggatatggataggggataatccagagctgcagcaacaattaatttctgaaatgcaccacagaccaatattggggcactcaggttttccagtcacttacaggaaaatgaaaggtctgttttcttggaagggtatgaagaagacaatcaagaatcaattgcagcactgccaaacctgtcttcaagctaagccagaaagagttaagtaccctgggctcctgcaaccattgctagtgccagaaggagcatgtcaagtaatcttaatggacttcattgagggattacccacctctgaaaggcataactgtattctagtagtagtggataaattctccaagtacgcttattttcttcctttaactcatccttttactgctgaatcagtagccaatgcattcatgaggaacatttacaagctccatagtatgcccaaggtcattatttctgacagggataagatatttacaagcctcttttgggagcatctattcaccaagtcgggtacagctttgcatatgagctcatcatatcatcctcaatcggatggacagactgagagggtatgggggcggaagaagcatcatgggaagacatggaggagcttcgcagtcgatttcctcgggcaccggcttgggggcaagctggattccaaggaagggagaatgttagcaagcctgaagacatgcctggtacacatggggggtcacgtgatgacgacaaggaggatgacgaggtgtagggacaaggcgatagccaagaaggcgtcttcatcaagcaaaggcgcctgcgtaaaccaaacaccaaatattctggtcaggagtgggtcatgtaatgattcgggcccacgagcccatcatggccggggccgatgcggcgtgtcggctggacctgagggcggtgaagctgctggagaacacgaggagcaagctcgccatgccgagcaactgctagcaggaggcgtaccggaggttgttcgccagctgcggcgacatcatggccgacaaggagattcagtcgcggctggcttggcacctcagttgctgcttccaggaggacactggccgccccccgttccctcactgcggcgaggggtccgacatggtgcactgccgcaagaggctcggcgtctccgaggaccaggtgttcctcgagaccaacaccctgtgccaccaattgcactgaagcatcgcttggcgttccgctgcgacgacgtcggtggcggcgacccgcccggtgcgagcacgatgctgctggatgttcccctcgtgctctgcctcgtgcgcagattcctctgcgagggtggcaaggccagcgcaagcggctgcctgcagggcggcgagctcttagtggtggaattgtgtttagctaatgggatatggaaatga

SEQ ID NO: 17379 - DNA, 427 bp, Oryza sativa
  Clone ID: PAT_MRT4530_23037C.1
tcgcggcaagcccattcttgcaaacagctgagttatatctgacaaacatccacatgtggcatcagatcgcgctggagctcatcattatcactatcacgacattaacgttgatcatgacatagcgcaacagctacagctgcagcaggttgtggatgtatactttgatcgaagtctgactcaagctctagctgtgtcggctattaacgtgccatctagatctggtatctaccctaggtactatggtgcaccacagtaccattaccacccttggctgtggctctgtatgcggtacaacagtatagtgctgctggagagaaagatgcgctcacatatcatgatatgggacatgttgaactttgggagatataaacgcagctgattgcaagattgggcttgccgcggacgcgtgggcggacgctctaaatga

SEQ ID NO: 17380 - DNA, 165 bp, Oryza sativa
  Clone ID: PAT_MRT4530_23038C.1
atggccatggatggagatggacatgagggtcatggtcatgggctcatctctgatggcttgctttggcttgctattgctaggtgctgcaagagcacttgcatggaaccaatccaaggctgctttttgtcgcgtcaaatccagtttaaagttcgtcgaaaaatctga

SEQ ID NO: 17381 - DNA, 162 bp, Oryza sativa
  Clone ID: PAT_MRT4530_23039C.1
atggcatacagtgagccccacatgtcagcgcggttagctgttgctgctgtggacgtggcgacggagaacgcctccacgggccccgcagcgagggaggtgccacgagtcgccacgttgctggatacagaactctgcggactcgagcagctccatgaaccatga

SEQ ID NO: 17382 - DNA, 330 bp, Oryza sativa
  Clone ID: PAT_MRT4530_2303C.1
atgacgtcatcaccggcggctcaggctcctttggtcgccggcgaactagggcacggcggcgcgaacagagggcaccaacgcgacgagcacgacgcggggaactcacaaggggcggcgcgaccacggacgacgatgggaaacggccggcgacgaggtcgggtcagcggcgggcttcggcttgacggcgtcggcggtgctccggtgggcttcggcggaaacggaggggtggacggggtgcggctcctccttgcgaacccggtgatagcgacggcgaccggcggcgaccaccacggcgacggcgcgaggcggctgaagcggctacggagctag

SEQ ID NO: 17383 - DNA, 500 bp, Oryza sativa
  Clone ID: PAT_MRT4530_23040C.1
ggacagtctcaatcttgttcgcaattgttatgtgctcgaggtgagatggcctcagcacggatgctactgcataagcacaggtgaatcctattacagagatagatccagaatcaatcccaacgatcttactagtagccacctggaatgggagaaccaggaaggcttgttcagtataccctggtcgcaatcagcatcattcaactagcccaagaagttgctggaaagattcttgccgtcaaattctgatcggccaggaattacaccggacaacactgctgctattagggccgccgtgcacaagttaccctggtaaacgcaaagcggaatattcacacagctcaggtatacagttatcgaaatgttattctattattatgggggtgcagggctatctcatgcatgctgttctcttttatctttgtaggattttggatgaatcaagcatattagcctgtcacaggactgtaagaggatttcgttcctctgccgagataaaatac

SEQ ID NO: 17384 - DNA, 1921 bp, Oryza sativa
  Clone ID: PAT_MRT4530_23041C.1
atggggtgctcgtcgtcgaagaaggtggaggaggaggcggccgtgaagacgtgccatgaccggaggagcttcgtgaagaaggcgatcgcgcagaggaacctgctcgcctcctcccatgtcgcctacgcccactccctccgccgcgtctcgctcgccctcttctactgcctcgccgaggacgagcacctctacttcctccaggacacggcggcgtcgtcggcggcgccgtgccggcaccggccgtgctcgccggagaggaaggttcttgtcatgaactggctgagaccagacgccggcggcgtcggcggcggcgcgccggtgcacccggtggtggaggtggagcagcggtgggaggagaatgatgttgccgccgagaccgtcacggtggacgggttcttcggcgcggatcccggccagctcttccacccttcgtcgtacgctccggtgaatgccatgccggcctcgccgccgccgccgcagccgacaacgacatgggacttcgtctcttgggaccctttctcctcgctccatcacgatcaccaacaatacgtgagctatggcgttgaagatgacgaagagaggaggaggagaagcgatgacgaagatgacgagcagatgccggagctggaagaagaaagcgacgacgccgccgacgacgacgacggcgacggcgatgtcaagctgcaggcggaagcttcgccggcggctgtggagcggccgatggcggaggaggaggaggaagagaagacggtggatcgcgtgaagaacgaactgagggttgtggcgagcgaggagatcgagcagcagagcacgccggggttcaccgtgtacgtggaccggccaccggcgagcatggcggaggccatgagggacatccagggccacttcgtgaagatcgtcgacaccgccaaccacgtctccgtcctcctcgaggtcgtcccctaccagaggaaagtccgaccagctgctccgagcgacggtgatgacgaggaaggcggcggcgaggtctcgccggagccattcgagctcttcaagagccacaaggagagcctcgataggctctacgagtgggagaagaggctctacgaggaagtcaaggcaggggagcgggtgaggctgtcgtacgagaggaagtgcgcgctgctgcggagccaggacgccaatggcgccgagccgtccgccatcgagaggaccagggccgccatgagagacctccgcaccaagctcgacatctccatcacctccgtcgacgccgtctccaagcggatcgccgccgtccgcgacgacgagctcctcccccagctcgcccagctcatccgagggcaagaacaatgccaatccatccatcgatctgatcttctgagatgttttttcctcttttttttgttaatttgtttgagatgttttaggttggcgaggatgtggatggtgatcgccgatgcgcaccgggtgatgaagcgcacggcggacgaggcgtgcgcgctcctctcgtcgtcgtcggcggcggcggcgcgcgcggctgcgggcggcgagggaggcgtcaggggcccgccgccgcccccggggcaggcgccggcggccaccgtggttggcgcgatcggggcgggggctccgccggtggggcgcggccatcgacgcgggggccgacgtcgcccgcgcgctaaccgtcgcccttctggcggcggccccgtaccccgttccgggacggctaccctcgcctggcccactcactccgcgatccctccgcccgccgccccactccctcatgtcccaacactcccggggcttcccctccgcgctagcggccccgtcctctccgcggcctccgttccttggcttgcgccctgcgccgtcgcagcggccaccacagacccgcgggcccctccgggcccgctggccggacgcccaggccgcggtttag

SEQ ID NO: 17385 - DNA, 996 bp, Oryza sativa
  Clone ID: PAT_MRT4530_23042C.1
atgggagagccaagagcttgcaagctatggcttcttgtggtggcaatggcggcttcttggtcgtgcagttccatggcgatgacgttcactatagcgaactattgttcgcacccgatatggccggggacgctcgccggcgccggcacgccacagctgtcgacgacggggttccggcttgacccggggcagacggcgcagctggcggcgccggcggggtggtcggggaggatatgggcgcggacggggtgcgtgttcgacgccgacggcgccggcgtgtgccagacgggcgactgcggcgggcgcgtggagtgccgcggcgccggcgccgcgccgccggcgacgctgttcgaggtcaccctcgggaggggcggcggcgaggacttctacgacgtgagcctcgtcgacggctacaacctccccgtcgtcgccatccctcgcgccgccgccgcctgcaacgccaccggctgcatggccgacctcaaccgctcgtgtccgagggagttgcaggtggagtgcgccggcggcggggcgatcgcgtgcaggagcgcgtgtgaggcgttcgggcaggacaggtactgctgcgccggggagtacgggacgccggcggcgtgccggccgacggcgtactcggccatcttcaagacggcgtgcccgcgcgcctacagctacgcgtacgacgactccacctccaccttcacctgcaaggccgcctacgactacaccatcgccttctgcctccctacctccgggatcaataagtcggacgccgtgttcctcggagcacagatcatcgacggcgatggcggaaatgcgccgccggcttaccgcggcggcggcggcggcggcggcggcagtagaccgccgatatactacaacggcggtggaggagcacatgagcctgagacgatgacggcgtcgtcggcgagcacacgatgcacccagccatggcttctgctactgctactgctactactactgctcgtcttccttttctga

SEQ ID NO: 17386 - DNA, 525 bp, Oryza sativa
  Clone ID: PAT_MRT4530_23043C.1
atggggcagctggcggcggggctgagcggtgcggcagcggtgtctagtggcagtggcaacggcattcgaggcgttggcggcggcggaggaaaccgccagatccacgtctggatttggcaggatagcggccggcagcggcgtttagtggcggggatggcgacggcggtgaggacggcgaggggatgtagccagcggcggtgtctggcggcgggggtggcgagggatggcatcgatgaggcgaacctggccgcgccggcggtggatccagtgcctcgaggagttttggacccccggcggtcgcggcagtggtggcgaggagttcacgcgacggcggcgcgggctaccacggtaggccgtctgtgtcgtcggagctcgtcgaggataagcaggtgtgggagggtggcgagatggcaatggggattgaagggcagcggcggctgcggtggtggcaaccgtcaccgtggtccggggaggcatggcggtcttggacggctagccgggggcgtggcagacgaccgcacctag

SEQ ID NO: 17387 - DNA, 2308 bp, Oryza sativa
  Clone ID: PAT_MRT4530_23044C.1
cccgggcggctcgctcggtcacgcctcgcagcccgcatcccatcccatcgcatcgcgtcgcaccgcaccgcaccgcaacccgcccaaaccctaaccctcgcgccatctcgtcctcgccggcgtgctccgccgccgccgccatgtccgccaggctgctccggcgagtgctccaggagcgggagaccgccccgcaggaccctgccgccgccgccgccgccgcagaggtcgagcgggaggaggaggaggaggcctcccctccccgtgtcgccgccaggaaccccttcgatctcctcgacgaagaggaggaggaagaggaggagaaggaagatgaagtgtattctgagcaacctgtgagttacaacgaacagaaacattctgtgaacaagaagcctggcaatgctgttcctgaaacaaacaagaaatcaaagaaaaagaagaaaaagagcaaggcagacaaacaagtgtcaacaaagtcaagggatgaaaagtcactggattcaattctggaagatttatctattgaaaagaagcccatgcagcaaagagttaatcaaaatgaaagagcatctgggaaggagattgagatagatgaaaccactcctgggacatcatctattctctcaattgatcccaaacatctaaaagctgaaaatgagatgaggcgcatttttggatcaaaagtagtggattcacttgaaaatcaacggaatgtgcctagcagttcaacatcaaggctacgaggtgttaggcgcgttgcccacaatccaagaaaaacccttcttgttactccatctagctactggccaccatgggataaatcaatgtcaatggatattgtggagacaaagagtggtttcaactatttcaggtacatatatgatccttctgtcagtcatgtgcaagacttgtttgaagttgccaaatctgcaaatgatctcaatgctattgcagctatattagcaaagtacccttatcacccagaatcattgttaacatttgctgaacttttcaaatattctggagaacatcaatcgtcagcagatgctgttgagaagtgtctatttgctctggagtgtgcttggcatccattgtttagcccactgcacagcaactgccagctgaaatatagccatgacacaaacaagccattctttactgcgctttttagtcacatgaaaaatttggatagacgtggctgccatcggtctgctttagaggtctgcaaattccttctttcattggattctgatgatccaaagggtgctctattctgcattgattactttgctctaagatcacaacagtacaaatggttggaacagtttgcagaagagtaccagtgtgataactccttgtggttattccctaatttctcattttcccttgccattgcacggttctacgttgagcgtgatgcaacaaatggggaggcttctgaccattctgacaagtcaacatctgtagatctcatgaagcaagcattgatgcttcatcctttggtgctgcgcaagattgttgacaaggctcctttgaaagactcctcgtggacccaaatactcaggaatgtgttctttggatcagcaaagccaggaagcccttcccttgagcatatgattagcatatatgttgaacgccattacatcatgtggaggttcccagaactgcagaatttactcaaagatgctgctcttttggtgattgaatcactaaaacaggataacagagaggcccaggactgggcatgtgttagaaaagaagcattctcttcagataagaatgagtactctcatcttcttgtttcagacttctccgacacaacaccatcactcccccctgaagaattgcggccattcatggttgctcctggaatggcacatgagatgccgccagctgaacaagaactggggattgaggtcagaccccgtgccccccgtgaagttgcagggcgcaatcctgcgttggttttcctggaatcactgctcccgtgggttgactatggtgacaatcatcatgacgaaaatgaccaaaacaatgatgactgattcaacccgaagcaccaaggggcatggatgcctagttagcagaacaagacttaaagttgcacccatgtgctttcctgtctctatgatgattaacacaaattgctgtcaatcattgtatcaccttcacactctcaagcaacaatcatcagaaactagtgctctagtacttttcatggtttcggcatacatgtatagctgatccaccaaaatctaaatcgctgaaatattaagtcaattttgggtctggaaaaaaaaaaaaaaaaaaa

SEQ ID NO: 17388 - DNA, 584 bp, Oryza sativa
  unsure (1)..(584): unsure at all n locations
  Clone ID: PAT_MRT4530_23045C.1
aataataggcccaaatgacatctcatgatgaaactcatcagaagtgttcgatcttaaacatgattctcatctaacttgctccacattaatcaggttaggaattactctaaaagaacctaaacatggatcgatcattacccatctgtcccatcctccccacataagcctacttcctcttctgacccaattcattccttcccaattcgtcctccgctaaattctgacaatggagtgacctccatttttatcgggtttgccgatggcgaaatgggttattaaatctcgctgctggcaagggggggcttggtctcccgcatatgttcacgttgcgagtaaacaaagccggtaagatcccagccaccaaggggccaccccattcatcnatnttttgtntgtccgcccctgggaccgggggccnaagacccccnggttccnagtnccccgnacanggnngtnaaaaattttggcccgcnnaaaaccaaagnaatgggnantgtccgaaacccccntngttngggnggggntcaggttccccagtaaattccncccccccaagtcccnggaaccttttttntttntncggn

SEQ ID NO: 17389 - DNA, 147 bp, Oryza sativa
  Clone ID: PAT_MRT4530_23046C.1
atggaccacatgaatgacggcgtggtacgtcggcgagacacgcgggaaggtgggcgccaatcacatggcggcgccggcgccggcgcggccggggaagcagacaaggcgctggcccacgttgtgttcatctatgagctcacaagttag

SEQ ID NO: 17390 - DNA, 2052 bp, Oryza sativa
  Clone ID: PAT_MRT4530_23047C.1
atggctgccgtcgtcgttgatgtgctactggcatgtctagcgctgctcctaccagcttcgtcatgtgcagctggggcaccaacggtggcagctgcacagaccagcgctggcgccggaggtggctatggcgctggctgtgccaagagctgcggtgacctgaccttcgattaccctttcggcatcggcgccggctgcgcccggggccatgacttccagctcgtttgcaacaccaccacgcagcccccaacgctcttcctcagcgatggctttacccaagtcatcaacagcatcggggccgccggctatgtctatgtgaacttttcacttgacatccctatgagatctggtgtcgatctgtacaatgtgtcatggacggtacctggcgattctttctccgtacgtgacagtgcaagggtaaccatcggacatggcaactttgatgtatacttgctcgatgcctacagttcgaagaggataatcttgtgttcgcttacccagcctaccaatattgatgacaccagtgacgagggtgagtgccaacggaatattcccatcgtccgtggttttcaactccagtttgtccatcggcatgaacacggcgaaggccagcgaaccagtgtcgacagcgtcagaatcgagaacgacggcgtgcgacttgggtgggccattgtggatcattcgacgtgcgctgaagccaagcgtgacaagagcagctatgcctgtgccagcaagcacagccggtgcgatgataacttgagctttacagcttcccgtgctggttacttatgcaagtgcaccgatgggtatcaagggaacccgtatgcacccaatggctgccggcgtgatgtaggattgccggacgcaagatatgatcggtttccgagtaagaacaattgtagcccgtcatgtggaaatatcagcgttccatatccatttggcctagaaaaaggctgctctgcaaatcagcatttcctgctcagatgcacctactacaaagacaacaagagtacaaaccctgacctcttgtggtgggcaacaagatacaccgacgagccgtcaacaccgaccaagcttgttcgcatagatatcagcgaagggctcattatcttggccggtgagcactacgaggagttccttgccatggatggtacggctagtgctagagtctccgatggttcagcaaaggactttgtggttaagaatctgcattttgccatcacaaaccaaacctgcaaagaggcgcagcagaataccaccggatatgcatgtgtcagcgttaacagtacgtgtttggccgtcaacacaggtgatgggtatattggttataggtgcaagtgcaagcatggctttgaagggaatccgtctatcaaagatggttgccaaggtatcgtcattggacttagtgctggctttggaattctactgcctggcttaagcgcaaaaatgctcttccataaatggaagaaagcttcagtatcagtttttcatcgtgatgtgaagtcctctaatatactgttagatgcaaattacactaccaaagtttcagattttggtacgtcaagattggtttctatcgatcaaacccatattgtcacaaaggtgcaaggcccatttggttatttagatccagagtattgtcaaactgagtgtctaaacgaaaaaagcgatgtgtatagttttggtgtggtactattggagctacttctcatgaaagagccgatttttacaagtgagaatggcttaaagttgaatttggccggttattttcttgaggaggtgaaggtaaggccattaagtgagattgttaccactaagatatacgaagaagcaacagaggaagagattaacaatgttaccttgcttgcggagatgtgcttgagtccccgaggcgaagaaagacctaccatgaagcaagtagagatgacattacagtccttgcgcaatgttacacagacaacggctgttcaccgtgctaatgcatcggatcagctgagccaaagatgctatagcctagagcatgagttcattgcttcagctgagctaccacgctaa

SEQ ID NO: 17391 - DNA, 566 bp, Oryza sativa
  Clone ID: PAT_MRT4530_23048C.1
cccacgcgtccggattgatccctctgtggagttcacttgccgcgatttccgcgaccatgctgtgccgattatagaaggtatattggatcgtggcggcctccctgttattgttggtggtacaaacttctacatccaggctcttgttagcccattcctctttgatgatatggcacaggatattgagggtcttactttaaatgaccacctagatgagatagggcttgataatgatgatgaagccggtctgtatgaacatttgaagaagattgatcctgttgctgcacaaaggatacacccgaacaaccatcgaaaaataaaacgctaccttgagttgtatgaatccacaggtgccctacctagtgatcttttccaagggcaagccacagagatgctgatcttcatgttctggatcgttatgtcaatgaaagggtcgactgcatgattgatgatggcctgctagatgaagtgtgtaacatatatgatcgagaggccacttatacccaaaggctgcggcaggccattggtgttcgtgaatttgatgagttttttagattttattttgcaag

SEQ ID NO: 17392 - DNA, 1963 bp, Oryza sativa
  Clone ID: PAT_MRT4530_23049C.1
agtctagtaagtcactctcatcgacccctcacttatgcacaaacatacgagaaatacatacgagctactgtacagtagtctcaacacgacagtagtaaacatgatagctactattcgcagtgtatcacgcccaggaatttatgtaacctagcatggccccactgtttccagtcacatatgaaggaaaaatcatgcaatctggaagaccaagatatgcaaatattcgatgggtcaatgtcatgcttaattgctaatcactatcaccactttgctaacaagctggaccgcctacccaatttatggtgtccttaatgggaaaactagtctagaaatgatcagcagattggagaaactccaactggtcatcagtgtagatgctgctcaatcggacgtgcttgtgctgaccaatctgtagagtttgtattctctgcattggatgtttggaactggcacaagaatctagcaaggtactattaacaaatatatctgctgcttgctaccttctgaatggtgtagtcttcagccaatttgacaaacaggatgcatggggacagttgcagagaatgaagaaaggttcatgaacaccgagagtgcaaacagtgctaattgcctataatgatatcactgtactagccttctgtttcaaacgttgtactcttttacggtggcatcggccttgcttgtgttgctcccactcatgcgttccccgaagtacccggttatcacaggcctcacaaacatattgagtccacaactctcttgaagacatcctagggcttccagttacactagaaccatctctgcttgccaaaattgtatcatcagacaagaaatctctaacaatatccacgcaaggtttcacaactttcatgttccatgagtcagcagtggcaccatagaaagcttctgttgcatcaatatgacgcaagttccactcaaaatatttattcaaccgatgcagccttcgtctttgacgtcgaacaagtctgcgagtgtttgcttttagttgtgagactgcttcatccaataagcccttcaggttatcatcatggagaccggtttccttccttgcaaaataaaatctgaaaaactcatcaaattcacgaacaccaatggcctgccgcagcccttgggtataagtggcctctcgatcatatatgttacacacttcatctagcaggccatcatcaatcatgcagtcgaccctttcattgacataacgatccagaacatgaagatcagcatctaaccacaagaaacaacagtcaaatctggagttactaggtcgaccccacttctctgtggcttgcccttggaaaagatcactaggtagggcacctgtggattcatacaactcaaggtagcgttttatttttcgatggttgttcgggtgtatcctttgtgcagcaacaggatcaatcttcttcaaatgttcatacagaccggcttcatcatcattatcaagccctatctcatctaggtggtcatttaaagtaagaccctcaatatcctgtgccatatcatcaaagaggaatgggctaacaagagcctggatgtagaagtttgtaccaccaacaataacagggaggccgccacgatccaatataccttctataatcggcacagcatggtcgcggaaatcgcggcaagtgaactccacagagggatcaatcacgctcaggagatggtgaggaacgcctttctgctcgtggagggggaccttgttggtgaggacatcgagcccaccgtagacttgcatggagtcggcgctgaccacctcgacgccggcgaagtggctcgcgaggtcgacggccagccgcgacttgccggcgccagtcgcgcccatcaccaccaccaccttcctcagccccttctccggcggcggcggagagtgggaggactcctcgccggcgtcggggtcagcgcttggaagcggggcggcagaggccgcgaggtgggccat

SEQ ID NO: 17393 - DNA, 1162 bp, Oryza sativa
  Clone ID: PAT_MRT4530_2304C.1
ctgtagtacagtattttccgaacagttgagaagtagtagcaaaacgatagaatatggcggcgaccttctccgccgccgccgccgccgccgcaagccccacctacctccaccgcccccgaaccctagccccacccgcctcaacccctgctcgcctgagccccagcagcagcagcaggaggccggcgaccccctcgctgctctccctccggcgcacccatgccgcgccgccgccgctccgtgccgccgccgctgaccccaaggttgttaatggggaagatttcccccctatgaaggacctacttcgtctatacaagaaagcttttctagatggaaatgatgaggctcttggtggaattgagagtgctatcattgccattgagaaagaaaggagtaactcagctgctcagtatgaaagtattgcaaccgaaattacttcagggaaggacaagttcctccgtataaatgctgatctggagaatttccggaagcagactgaaaaggagcgtgctaggtttacctcaaatatacaggtggatgttgttcagagtctattgactctggttgatagttttgagaaggtgaatcaagagatcaccccggagactgataaagagcagacgattagcacaagctatcaaggcatatacaagcagttagtagagacattgagaagcttaggtgtaggagttgtggaaacagttggcaagccatttgatccttcgattcatgaggctatcgcacgcgaggaatctcatcagttcaaggctgggattgtctcgcatgaagtcaaacgcgggttccttctaagggagaggctgctaaggcctgccactgtgaaggtctcaaccggctctggcacccaggagacgagctccccatctacagagaagcctgtggaggatagcaaagaagatgccgctgtctgaatctgctggaaactggaatcctggaaatccaaccgacaaaatcaggaaatcagtagcaagttatagctagagcaccattctttgggagctcattttttttactgtccataccatgcgaaggttttgtgttccaaatgggtgtctttatgtgtacattttcatagcgatttcaagctactatttttaaatgaatttcttttcccctgtgcaatcaatgtgattttatttctcccacg

SEQ ID NO: 17394 - DNA, 544 bp, Oryza sativa
  unsure (1)..(544): unsure at all n locations
  Clone ID: PAT_MRT4530_23050C.1
aaaaaaaaaaaaaaaaaaaaattggggggggggagagaaaaaaaaaaaaaaaaaaaaaaaaagggcgaccaatacaaaaaaaaccaaaactaaaatacacaatacatacaacaaaaataagcccttcttttttaaaaacctcaaattcaattcacctgctccatcatataaacaacaatcccttcttttttggggctgtagaggggcccaacttaatccccttacaacacatccccctttctccaactcccttaatacccaaaatacccccccctttcccccttcccaacatttccacaccctnaattcccaataaaaccccccctttaccccctcattaacccccccccnnccnaaanntacacacaacccgaccccaacactncccaacaccttttctcccnctcctttttctttcttccctccctttttcctttttttcttctttttcccccctcattttttaaacccncccctccctttaannctccncaccaattcttcccttcacctcncccttttttttttttttttttttttcttt

SEQ ID NO: 17395 - DNA, 312 bp, Oryza sativa
  Clone ID: PAT_MRT4530_23051C.1
tatacaaaaatataaagcacagtataaattcgccctcccccagggcggcaagggggccgcctgcaaaattccaggccgccccccgccgcccatttgcaggcggccccccgcacagtacaaaatcgccctagcagagggcggcaagggggccgcctgcaaatttcgttgacggccgtcgcccgagagcgaacggccgtctgccacgtcactttcaccgctactcttgagttagcaaatttaggcagtacgagtgtagaatctctgtcttgtactgaaacgattgtaatatccaccctttcccgcaaaaattaa

SEQ ID NO: 17396 - DNA, 423 bp, Oryza sativa
  Clone ID: PAT_MRT4530_23052C.1
atggacgccgatgtcgtcggctgccgtctcctccgctcctcctcatcctatggagccctcctcctccccttccctagcgcctccactcctgtcacctcgttaccagatccggccgcccccgtggtcgaggaggatgatggcaccaacagcagagaagattgttcaatcattcttggtaaccttgagccaaattctaatatgaagaacctaaagatttcaggttatgctgaattcctactgctcaagcatcttcgattggacaaccttcatcttccttcagaattcctactgctcaagcatcttcacgcgacggcgggctcgatgcacgacagcaacctcatattcgcgcgacggcagcaggcggcgttcttccttgccgccagtgccgccgcctggtccgacgactcgccgctgctggcgtga

SEQ ID NO: 17397 - DNA, 5970 bp, Oryza sativa
  Clone ID: PAT_MRT4530_23053C.1
atggcgaatcaagggggaggtgcatggcgtgggcgtttcaatccaaggccgatgcgaaacttcggcgaggggagaaagccacaagctccgacgttttcaacgggaggtgagtcgctgcaggggattgggggaggagctttgggggatcaagccaaaaccatggctgcacgaggagcaacaaagcagcagtatcgccctattcagcataaggaaccagccaaggaaacagagaagggtgatacctctgtgctgcagccagaacaacctctgcaatccaatccccgtgctggtaacaatcctatcccacaaagatttttttgtcagagatgcaaaaatgtgggtcatctggctagggattgcaacgtttctgttttctgcattaactgtgccaagccatctcatagaactgaggattgtttgtatgacaagcaaccaaggccagttgctaagcttgttgggtatggtgcccctggtttaggttgcattcttattcaaaacactaggccggactctcctaaagagcatgcaaatcctttggcaatggtgtctattgtctttgggagggaatttactgaatctcagcttgaacaaggcttcactcagcaatttaagtggaattggcaatggaaagcaaaagctatgcccaatgggacttttcagatgaggttcccaaacaagataaaatttgaagagctatccaactttgactacttcaatgttaaggggactgatgttcaagtcaatgtgaaagaatggacacaagagtctgatgcagtggggaagatgcatactgcttgggtgaaggtgtctggcattcctgatgctatgagaggttaccaggccctatatgaagtgggatctaacttgggaacagttatggaagttgacatggccacctttagggctagcaatgtgataagatttaaagttgggatgatggagcttgagtcgctgcccttgaagttaatccttactacacctaaaggtctgctgtatcaagcccactttgagctggaagaagttgttgagcaaggatggttcaatgagagtatctttgaggaagttcaggtagggtctgaaagtttcctgaaaagtggtcagaaatctggtcaaagggatggcaagcagattatggagatgggtgataagatcagtcctggtattttgctaagaggcaatggctcaaaggatgatcctacagatatgttgtgtcctactacaatgattgaggaaagtcaaatcaagtgtgctcagatactgagagacagagcgctggcttttcagcttcaggaagcagaggctaagtcgaccacagattgtggcatagaagtaggtatgaccagtggtgagacaatcctgacggaggaaacacaagttcttctgacacaagacaaaaaatgggagcaggctggaaatagagggatggcagtgaacacaatcgactctgaggcaactgaggtgggtgatgaagggatagacagggaagatgaaagagtgcacttgggtgacagtgaggattatatggattcacaagaatctgaaggaagttttgccaaaagactggggatcaacttagtggaggacaatacaggtagtcaagaagaggagatgagaaggagtaaaagactgaaggaaaaggaagacttgaagccacaagatatggccatgcaaagaaaggaagctcagaatgcttttgtcaacaaaggtcagaatacagtaccctctattattaatgaatcaaatgtctctcttatcaacatggcgaatattctgggtgttagtttaggatgtgctattgaagatgtggaaagtaacttgaatttgattaaaaatctggaatctgctagaattaacctctttatgaaagagggtgaagcagataaaaatgctgaattaaagaaaaaagaaatggaaggcatgtctactgatcaagagtggggaatgggtaacattgaaaaaacaggtcatttacaagacctaattagggatcacaaactggactttgtggctattctagaaacagttaaacatgatttttcaactgaattgttaaacaaactaagctcagggagaaatatgcattggtgttggatggctgctcgtggtagatctgggggaatattggtgggaatggataaggacaaagtcaatgtattaaatgagaaaactgggaagtatttcataagacttaaattgttgaatgctgacaacaaaaatgtctgggattttatggcagtatatggggcagcgcaagctgaacagaaagctgaattcctgactgaattggctaaggaattttactcccaaggttcccctttagtggcaaatcttagagaagttcagatgagtgggagacagttcacttggtgtaattttcagaactctcccactctaaagaaactagatagagttttcattaacaatgaatgggaagacatttacccccttaccactgttaggactttggttagggccatgtctgaccataatcccatgttaatggaaacaggacagaatatggctcctcagagtatattcaggtttgagcaaagttggtttctgagggaggatcttacttcagtagtggaagagatttggaactctgactataggggggacagcatggaaagatggcagaagaagctgaagtttttaagaaaaaaactgaaaggctggaacaaaaactgggaaggagaatacagaaggaggaaaaaagaaatcatggataagattgaagagattgatatcctagctgaaactgttggggtggatattaacattatgaataatagaagagcccttgatgctcaactcagatatgtggttagagaggagaaaattaaatggttccaaaggtgcaaagaaaaggaggttttggaaggtgactgtaataccaaatactatcacactaaggcaaatggaaggaaaaggaagagcttgatccactcacttgtgcaagaggatggtgtgatttctggccaacaaaacttgctttcctatattaccagcttttataaagaattgtttggtcattctaaagaaaacaatgtctctttaaacatggagggtgtgagcaaagttaagaaggaagatatagtggaattaaccaagcctttcagtctagaggaggtgaagaaagtcgtttttgaattgagaaaaaacagagccccagggccagatggcttccctggggaattttacatgaaattctgggacattatcaaaaatgatctcttggaactgattaatgactttcataaaggtttactgagtgtcgagagattgaattatggcattgttactcttgtccctaaaacaaaagatgctgcacaaatacaaaagttcaggcctatctgcttactcaatgtgactttcaagatcatcaccaaggtgttgatgaatagactggacagggtcatgatgtatattatttccaagaaccaaacagcctttctcaagaataggtttatcatggaagggattgtcattctacacgaacttctgaactctttacattcgaaaaaacagagtggcatcctttttaaggttgattttgaaaaggcatatgacaaggttgattgggtgtttgtatatagaatgttgaaatcaaaaggctttccagatttatggtgtgattgggttatgaaagtggtgagagggggcaaggtcgctattaaggtgaatgatgagattggtccctatttcaacactcacaaaggcctgagacagggggatcctctttcacctttgctgtttaatttagaagcagaagcactcaccttgttggtgcaaagggctgagagcagttctcttttggagggtttgtcagtaagtgagaacaataaggtgacaattctgcagtatgctgatgacacgatatttatgatcaaagataatatggaacatgctagaaacctgaaattcatcctgtgcctctttgaacaattatcagggttaaagatcaattttaataaaagcgaagtgtattgtattggagaggctgtggaaagagaaaatgtttatagtaaaatttttacctgtaaggtgggttcttttcccatgaaatacctggggttgcctattcacaaaaagaggttactaaacaaaaactggaagtctgccgaaaataagatggaacataagatggggggttggcaaggcaaactccagtccattgggggtaggctgatccttaccaatgctagtcttagcaatgtacctttgtacatgttgtctttttataaaatccctcagggagtcaaagagagaatggatttctttagaaggagaattttttggcaggaagaccaaggtataagaaaatatcacttggtacaatggcctataatctgttctcctagggatcaaggtgggttgggtgttctggatttagaaactatgaatactgctctgctgggaaaatggatatggaatttggaaaacaaagaagtttggtggcaagatatacttagggataagtatctgagaaaaaaacccctctctgaggttaagaataaaatgggggactctcacttttggcaaggtttattggagattaaaaacaccttttacaaattctgtactaagaaactgggagatggcaaacgaactttattttgggaggacaattggattggaggtaggcctttaaatgagcaattctcagacctgtacaatatcactaacacaaagcacatcacagtggataaagctctgcaggggggttgggataaagtcacttttagaagaactttacatggaaataggcttgaggactggaacagaataaagcatctatgtgctaatatccatctgcagaatggccacagtgataagctttggtggaattttaataaaaacggctcttacacagtcaagtcgatgtacagagctctcaaattgcagcagttttcatgccctttgaaaaaattttggtacatcaaaactcccctgaagattagggtgttcctctggttatttctcaaaaacaaaatcctgactaaagataatctttacaaacgtggttggcgaaagggagacaaaatatgtcagttttgctgtagggaagagtccatacagcatttgttttttgaatgccccttagcaaaattgatctggaatgtggtcatttgtgccctcaatctaaaaccattttcaaataaaacccaacttttggggccttggttatttggctttgataagaacacaaaaaatttgatgatggtggggattactgctgttatctgggccatatggaaaaccagaaacagagcgtgttttgattatgttcttcctaaagatcccacagaggttatcttcttgaaatcggaggcaaatcgaatggagctgggggtctgggtggcatgtatacatggggggttcagcagaggcagatactcagacatgaatacatggtggaaactgacgaacgatgggcaattttctgtggcgtcggcctacgacatgttcttcatggctacggaaaactgcgcattcggcgagctgctgtggcactccagagctccctcgcgagtccgcttcttcatgtggcttgcgctaaaggaccgttgcctcactgcggacaacctcgccaagcgaaactggccacatgatgatctgtgctcactttgtcagcgagatgatgagaactgccaccacctgttcgttgcgtgtgattacacggcggtgtggcgttctatcaagcgatggtgcaatgaaagctttccaattccggcagatggggatgctgccctcgctgattggtggctggcaactagatgccgttttcagaagagctacagagcagattttgactgtgctttcatgctaatatgttggctgatttggaaggagcgtaatgcacgtatatttcagcacgtgtacaagctaccggatcagctcgcggaggacatcaaggatgaaattgccgtttggagggtggcgggggttttctcccaatttcgcgagtaa

SEQ ID NO: 17398 - DNA, 3048 bp, Oryza sativa
  Clone ID: PAT_MRT4530_23054C.1
atggcgcatcaagggggaggcgcatggcgtgggcgcttcaatccgaggccgatgcgcaacttcggcgaggggagaagaccacaagcttcgacgtcgtcagggggtggtgagtcgctgcagggaattgggggaggagctccaggggatcaagcccaagccatggctgcgcgaggaggaacaaagcagcagtatcgccctgttcagcacaaggagccagccaaggaaacagagaagggtgatacccctgtgccgcagccagaacaacctctgcaatccaatccccgtgctggtttcacccagcaatttaagtggaattggcaatggaaagcaaaagctatgcctaatgggacttttcagctgaggttcccaaacaaaataaaatttgaagagctatccaactttgactacttcaatgttaaggggactgatgttcaagtcaatgtgaaagaatggacacaagagtctgatgcagtggggaagatgcatactgcttgggtgaaggtatctggtattcctgatgctatgagaggttaccaggccctatatgaagtgggatctaacttgggaacagttatggaagttgacatggccacctttagggctagcaatgtgataagatttaaggttgggatgatggagcttgattctctgcccttgaagttaatccttactacacctaaagtggaggacactacgggtagtcaagatgaagagatgagaatgagtaaaagactgaaggaaaaggaagacttgaagccacaagatatggccatgcaaagaaaggaagcacagaatgcttttgtcaacaaaggtcagaatacagtaccctctattgttaatgaatcaaatgtttctcttatcaacatggcgaatattctgggtgttagtttaggatgtgctaatgaagatgtggaaagtaacttggatttgattaaaaatctgggatctgccagaattaacctctttatgaaagagggtgaagcagataaaaattctgaaattaggaaaaaagaaatggaaggcatgttcactgatcaagagtggtcagatgatgattcttctgaaaatgacaattctactcttgatgagattgaacatatgctcaaacaggtccagtcctcaatgaaaaaaagcaatcagaggaggggaaaccttgagattttcaaggtcactcccaagaactcaaagaaaaaaggtcacttacaagatctaattagagaacacaaactggactttgtggctattctagaaacagttaaacaggatttttcaactgaaatgttaaacaaactgagctcggggagaaatatgcattggagttgggtggctgctcatggtagatctgggggaatattagtgggaatggataaggacaaagtcaatgtcttaaatgagaaaactgggaagtatttcataagacttaaattgtcgaatgctgacaacaaaaaagtctgggatcttatggcaatatatggggcagcgcaatctgaacagaaagctgaattcctgactgaattggctaaggaattttactcccaaggttcccctttagtgaatatagctcctcagagtatattcaggtttgagcaaagttggtttctgagggaggatcttacttcagtaatggaagagatttggaactctgattatagggggaacagtatggaaagatggcaaaagaagttgaagtttttaagaagaaaactgaaaggctggaacaaaaactgggaaggagaagaatacagaaggaggaaaaaagaaatcatggataagattgaagagattgatatcctagctgaaactgttggggtggataccaacattatgaacaatagaagagcccttgatgcccaactcagatatgtggttagagaggagaaaattaaatggtttcaaaggtgcaaagaaaaggaggtcttggaagaaaacaatgtctctttaaacatggagggggtgagcaaggttaaggaggaagacaaagtggaattaaccaagcctttcagtttagaggaggtgaagaaagtcgtttttgaattaagaaaaaacagagccctagggccagatggtttccctggtgaattttacatgagattctgggatattatcaaaaatgatctcttggaactgataaatgactttcataaaggtttactgaatgtcgagagattgaattatggcattgttactcttgtccctaaaacaaaagatgctgcacaaatacaaaaattcaggcctatctgcttactcaatagcatcctttttaaggttgattttgagaaggcatatgacaaagttgattgggtgtttgtatatagaatgttgaaatcaaaaggctttccagacttatggtgtgattgggttatgaaagtggtgagagggggcaaggtcgctattaaagtgaatgatgagattggcccctatttcaacactcacaaaggcctgagacagggggatcctctttcacccttgctgtttaatttagcagcagaaacactcaccttgttggtgcaaagggctgagagcagttcccttttggagggtttgtcagttagtgagaacaataaggtgacaattctgaagtatgctgatgacacgatatttatgatcaaagacaatgtggagcaagctagaaacctgaaattcatcctgtgcctttttgaacaattatcagggttaaagatcaattttaacaaaagtgatgtgtattgtattggagaggctgtggagagagaaaatgtttacagtgaaatttttacctgtaaggacaattggattggaggtaggcctttaaatgagcaattctcagacctgtacagtatcactaacacaaagcacatcacagtggataaggttctgcaggggggttgggataaagtcactttcagaagaactttacatgggattaggcttgaggactggaatagaataaagcagcaatgtgccgctatccatctgcagaatggccacagtgataagctctggtggaatttgacaaaaaacggctcttatacagtcaagtcaatgtacagagctctcaaactgcaatag

SEQ ID NO: 17399 - DNA, 114 bp, Oryza sativa
  Clone ID: PAT_MRT4530_23055C.1
atgggggccagatatatcgatgcaatccaaccatttgcaaattgcaacgacctcttcgcatcctccctccgtgctcacgtctttatcagaaacatgacaccagcaaggcaggat

SEQ ID NO: 17400 - DNA, 1321 bp, Oryza sativa
  Clone ID: PAT_MRT4530_23056C.1
atggcgaatcaagggggaggtgcatggcgtgggcgtttcaatccaaggccgatgcgaaacttcggcgaggggagaaagccacaagctccgacgttttcaacgggaggtgagtcgctgcaggggattgggggaggagctttgggggatcaagccaaaaccatggctgcacgaggagcaacaaagcagcagtatcgccctattcagcataaggaaccagccaaggaaacagagaagggtgatacctctgtgctgcagccagaacaacctctgcaatccaatccccgtgctggttgcattcttattcaaaacactaggccggactctcctaaagagcatgcaaatcctttggcaatggtgtctattgtctttgggagggaatttactgaatctcagcttgaacaaggcttcactcagcaatttaagtggaattggcaatggaaagcaaaagctatgcccaatgggacttttcagatgaggttcccaaacaagataaaatttgaagagctatccaactttgactacttcaatgttaaggggactgatgttcaagtcaatgtgaaagaatggacacaagagtctgatgcagtggggaagatgcatactgcttgggtgaaggtgtctggcattcctgatgctatgagaggttaccaggccctatatgaagtgggatctaacttgggaacagttatggaagttgacatggccacctttagggctagcaatgtgataagatttaaagttgggatgatggagcttgagtcgctgcccttgaagttaatccttactacacctaaaggtctgctgtatcaagcccactttgagctggaagaagttgttgagcaaggatggttcaatgagagtatctttgaggaagttcaggtagggtctgaaagtttcctgaaaagtggtcagaaatctggtcaaagggatggcaagcagattatggagatgggtgataagatcagtcctggtattttgctaagaggcaatggctcaaaggatgatcctacagatatgttgtgtcctactacaatgattgaggaaagtcaaatcaagtgtgctcagatactgagagacagagcgctggcttttcagcttcaggaagcagaggctaagtcgaccacagattgtggcatagaagtaggtatgaccagtggtgagacaatcctgacggaggaaacacaagttcttctgacacaagacaaaaaatgggagcaggctggaaatagagggatggcagtgaacacaatcgactctgaggcaactgaggtgggtgatgaagggatagacagggaagatgaaagagtgcacttgggtgaca

SEQ ID NO: 17401 - DNA, 411 bp, Oryza sativa
  Clone ID: PAT_MRT4530_23057C.1
gaagaagaagaggaggaggcgagctccgtttggtgcgaggcgccgccgcgcgctgcgggcctctactactacacgggcgctccactccaccatgcttccgagccggcagagaagcatcttccatctaagagaggagggtggcggggccaccaacgccgagcacctaagagctgaccactgcgacagccatggcgatacaccgtatcatcagtatccaccagcaacgccttccagacgaccggctgcagatcgtcctcgaccagacgaggcaccaccaccgtcagcagcacggccatgtcggactcaagcacacgcagatctgagtccccggcgccggcgggcacgtcaccgacggaagctgcatccttgcggcgactacttaggcgcgagcgtcatatgcatgctggagct

SEQ ID NO: 17402 - DNA, 765 bp, Oryza sativa
  Clone ID: PAT_MRT4530_23058C.1
atggcgcatcaagggggaggcgcatggcgtgggcgcttcaatccgaggccgatgcgcaacttcggcgaggggagaagaccacaagcttcgacgtcgtcagggggtggtgagtcgctgcagggaattgggggaggagctccaggggatcaagcccaagccatggctgcgcgaggaggaacaaagcagcagtatcgccctgttcagcacaaggagccagccaaggaaacagagaagggtgatacccctgtgccgcagccagaacaacctctgcaatccaatccccgtgctggtttcacccagcaatttaagtggaattggcaatggaaagcaaaagctatgcctaatgggacttttcagctgaggttcccaaacaaaataaaatttgaagagctatccaactttgactacttcaatgttaaggggactgatgttcaagtcaatgtgaaagaatggacacaagagtctgatgcagtggggaagatgcatactgcttgggtgaaggtatctggtattcctgatgctatgagaggttaccaggccctatatgaagtgggatctaacttgggaacagttatggaagttgacatggccacctttagggctagcaatgtgataagatttaaggttgggatgatggagcttgattctctgcccttgaagttaatccttactacacctaaaggtttgctgtaccaagcccactttgagctggatgaagttgttgagcaaggatggttcaatgagagtatctttgaggaagtttag

SEQ ID NO: 17403 - DNA, 327 bp, Oryza sativa
  Clone ID: PAT_MRT4530_23059C.1
tttttttacaacagtgctgtttgctcaattggttagctcaaaactaatttacaattcaattgaacgattttacatgccaccagtaaacagcccactccatcctctctccctccacaatgacaagcagggagcatgatttttttttgccccatcgtatactatataggaaatgtatcattactatgcaatttttttggaagtttggggaagaaaatcaagctagagagagaaaggatggagtgggctgtttactggtggcatgtaaaatcggtcaattgaattgtaaattagttttgagctaaccaattgagcaaacagcactgttgt

SEQ ID NO: 17404 - DNA, 255 bp, Oryza sativa
  Clone ID: PAT_MRT4530_2305C.1
atggctgctgtccgaatgaccctccgacgggatgggtcataccaacctccactccgccggaagcaggtttgcccttcttcatacaatgacttccttgcaatggttacgatgaagcctggaatgtatctggccgaggctgacgtgccaactccaggagttcccacgccggctccggctagggacgagtgcctggaggctctcatcattccgacgggacggggcgaggcgtgtgtcaggccgcctgttgccccctaa

SEQ ID NO: 17405 - DNA, 240 bp, Oryza sativa
  Clone ID: PAT_MRT4530_23060C.1
atggcccccgtggcagcgatggagacgagtgggtcgtccttcctatcggtcgcccacgagtggccgcacggggagtcacagaaggcccctaaacaagtggtgaacgtgccgccgacggcgccgaccatgaagcccacgccagcgtcaagaccccgtgtcgccttcgcaccgtcatcgttgccccaaaacctagggttcgagcaaagaggatcaagtgcgtggggagtgaactgggtctag

SEQ ID NO: 17406 - DNA, 336 bp, Oryza sativa
  Clone ID: PAT_MRT4530_23061C.1
atgaagaaaccgtggtgttgtggccccctagctgcctatctcgatctctcattgttctctcttactaatgggctggctgaagcactgattgggctgggaatgttcttctggccgttcctagagggtcttttgattcttgcaaatgcattggcgatactaaatgaagaccgctttcttgcacccagaggatggagcatgtctgaagtctcaggaaatggacgatcaaagtcattgaagggtcagattgtaggactcatatatgccacacagttctttaggatgccgttgatagcacttaatgttcttatcattgttgtgaagttggtgtcaggctga

SEQ ID NO: 17407 - DNA, 336 bp, Oryza sativa
  Clone ID: PAT_MRT4530_23062C.1
atgtccttggtgaatagcaggtgtgatggcctcggcatggacgaccagtgggagcggcagtgtcattggcaagcagcaggagtggcgtcgtcgtcggcgagcagcgggtgcggcgtcttcgacgtcgacgaggcattggagcagcgggagcggtggcgttttcgacgtcgatgtgcaacgagcagcggagcggcgatggccacggacttaggcccggcggcagcagcgaccccgacgagcagtggcctcgacctccgacaagcaacagcggcatcgccgcaatctcaacattctgttagtattggcgatgattttattgatctcatcgatctttga

SEQ ID NO: 17408 - DNA, 423 bp, Oryza sativa
  Clone ID: PAT_MRT4530_23063C.1
atggctccatcacctcatcccatcattgatcaagggcaccgccgcccatcggaggccgagaccactgccgctgcagctcactggaggcctaggacgccattaatgctcaccaccattgctcagatccagaagaccatagccagatctagggtggttgttgatgttggtgaaatgagcatcagcagtctgctgccattcttgcgtctgtgctatgtgttcctcaaggttgtgttggatctctcccgtctgcaaatcaagggcttgccttacccaatcattgacaaggttgaggccggcgtcgctcaagagacattgcggaacttcgcggattttccacacgtctccgaaggtgatggagcgggcgtctttagcttttccctccacaccttctttggttttggtgcgggagacggctttctctga

SEQ ID NO: 17409 - DNA, 1248 bp, Oryza sativa
  Clone ID: PAT_MRT4530_23064C.1
atgggtaatggcggcattaaggcctatgcggccattgttctgatcaggctcatgtactctggtatgcacgtcatgagcaaggtcgccttggatcaaggcatgagccctttcgtgtttgtgttctatcggcatggcagtgctgcactcgtgttgatccccgctgttcttatactggagaggccaaaagctaaacaagtgacgctaaaaattgcagcaaaaatgtttgtgcatgccttatatgggatagagtctatgaagctcaagaagctccatggcaacgtaaaagcggcaggcattctcttctgcgtgaccggagtcaccgtgctggccttctaccaggggccaatgctgggatcgttcaaccatcaccacctctttcagcaagccaacagcagcgacgaccctgaagggaacgcgcactccaagacgcagtgggtgctcgggattttcctcataacactctccaacgttttagctggcttatggacagtgcttctggggccactgatagaagaaacgtccaagctgatgaacacagcgttacagatctcatgggccgcggtccaagccttcgttgtggctgttgcagtcgagagagatttcaacaagtggaagctaggctgggatgttgaactcgccacaggtgtggtcgtcaccgcactttcgtactacatgcaaatgtggacgatcacaaaagggggccgtatttttgctgggactctactgataggaggcctctataatgttctgtgggggaaaaacattgaggagcaggatgaagtgaacgacatagttgcagataaaccagaatttgagatgcagggcaaagaggctcaaatgcctggtgatgctggaacaaagaatagtagttcgagtggtggcagtgtgtctaaagattctgacatttcgctcgcaccaaagctcctaggccaccaagattatcaccgatttaagagccttccgtggcacatttgtcccttccaaattcttctcaacagtctgcaattggctaggagatgtagggccgattctagggaggctcgacacatagggcaaaagtgttgtttgattgaagattgtgcctgccgcacccttgaattgcaatattttccaggtgatagtatctgtttgttcgctgtggagctctatgttctggatcaaagtccagaggtggacatattgtcacagatgatcagcctccgttatgaggagaaggttgatgtcactaatccaagtgttggtggctaa

SEQ ID NO: 17410 - DNA, 270 bp, Oryza sativa
  Clone ID: PAT_MRT4530_23065C.1
atggcggcgcttcaccaccaccacagccaccagatcaaggcgccgacgccgacttggctcatcgtgaaggctatcccgccgccgagggacggggccaagaagctagccgcggcggcgtactcgccgctcctgctatcgccgtccgtgtggcagcgagcgcagcaggcgagcgtctggcaggcgagcgcgcccaactccggtggcgcccgccccctgcttagcttcgcactgccacccgtctcggccccgtcggcgttgcctacctgctga

SEQ ID NO: 17411 - DNA, 1671 bp, Oryza sativa
  Clone ID: PAT_MRT4530_23066C.1
atcaagcatggcagaggcttgcgtcagggcgacccgctctgccccccccccctcttttcatcctagcaatcggtcccctacataagatcctggagaaagccagtgagtgtggtttccttgccccactaaatggacgtactgcgcgccttcgtacctctctctatgctgacgatgttgcaatatttattcacccgtctgtgcgcgacatgagacgcctggctgccattcttcgatccttcggagaagttacagtccttcacaacaacatggagaagagtcagattgcgcccatccgctgtaccgacagaattgtccatgatatccttctggtcatcccagcaagcaccaccggcttcccgatgaaatatctcggccttccacttgcgctttcaaactaaagaaaatacacgtgcaacatttgctcaataaatgccgaatgcggcttgcgccgtggcaagggaagatgatgacgatggcaggaagagctgcactaacgaaatcagtcttaacggcgcagccgatctatcacctaacagctctgaaagtaccgaatggcagtctgccagtcttcactcaatcgacaagatgaggcgaaaattcctctgggcaggaggagaagatatctcgagaggaaaatgcaagaacagttgggataaagtatgcagaccaaaggacttgggagggcttggggtacttgacctcaatcttttctccagagcgctaagattgagatggctatggtttgactgggttgacacagacaagccatggagcggcacggcaattctctgtgaccaataggacaaggatctcttcaaagcagcaatggcaatcacgctgggagatggaaagaaggcaaatttttggcactcgcattggctgaacgacatgacaccaaaagagatcgcgccggccatctttgcagcttctaggtagaaaaataggtcggtttgtgacgccttagccaccaacacttggattagtgacatcaaccttctcctcataacggaggctgatcatctgtgacaatatgtccacctctggactttgatccagaacatagagctccacagcgaacaaacagatactatcacctggaaactgacccagaacggtgtcaactcgaccaagtcagcttacatattgcaattcaagggtgcggcaggcacaatcttcaatcaaactatatggaaatattgggcactacccaagtgcaagttcttcccttggctcataatttgaaacagagtctagacaacggacatactacaaaagagaggttgggctaaccaacacttttgccctatgtgtcgagcctccctagaatcggccctacatctcctagccaattgcagactgttgagaagaatttggaagggactgcaaagatggacaaatatcgatctccaaatgaaagaatggggaacctgcactaatgtggaagaatagtggtacaagatctctcgcataccaaatgtgccacggaaggctcttaaatcggtgataatcttggtggcctaggagctttggtgcgagcgaaatgtcagaatctttagacacactgccaccactcgaactactattctagccaagatcaaagaagagacgcaagcatggattaaggttggggccacccgaatcacggagatcgtcccttcaggagaatagctt

SEQ ID NO: 17412 - DNA, 375 bp, Oryza sativa
  Clone ID: PAT_MRT4530_23067C.1
atgccgccgtcgtccccgtgccagagcctctccgtcctcatgctgcagtacaacccgacgctcggcgacatccccagtggcttccttctcggatggccggcgagctcctcccccgcgcgcggccggccgacgagatcctccccgcacgcggacggccggcgtgctcctccccgcgcgaggactgccggcgagatcctccacacgcgcggatggccggcgacttggaggggctgcctcgtcctcacgaccccctctcagatgatgccccggcgccctcccgcctcctctgcgtgctcgagccgagtcgctcccccgcacgctgcgtggccagccgacgagttcatcccccgtgcgccgtcgtcgccgccctgctga

SEQ ID NO: 17413 - DNA, 1368 bp, Oryza sativa
  Clone ID: PAT_MRT4530_23068C.1
gtggagtgagaactgagaaggcgggggagaagagcagcagccgccgccgccgccgagctctccggcgacgccaagtcgaatcggagcccgacgcggcggatgaagcgccggcccgccatggactcccacaacgagcagccgccgccgccgaagagcttaaagatctatgtgaagatgatgaagacgttcaccctcaatgtgaatagtactgatacagtcgatcagatcaaatccaaactcagtgctattgaggggattgacaagagcaagcaagagatgttctttgctgggatgcacttgaagaatgaggataagcttgctgattataacatcatgaccaactcttctgttgacctctatgtcactgatgctattcaaatatctgtaaggattccctctgttggaaagaccaccaagctcaatatgaggaaatcgaatagtattgctgacatcaaggcggagattgaacaggaggaaggaattcttatgaacgaacaaatcctgatgtatgccggtcaacagcttgaggacaaccagttgttaagtcagtgcgatttgaggaatgatcagacatttcatgttttggtttgcccaaatgacaagcttcatgtctttatcaatgttagaggagagaaaactataggccttgaaactaaacgctggtacaccgttgctgatgtcaagttgatgattgagaatttggagggcttgcctgcatgcagccagatactcacacggatgcaatctggtgttggtgtggcgctcacagatggtcggatgctacaggatcagcatgtcaaaaacaatgatactctcttgctgcagcagaatgttcagttcttcgtcaagtcatgggagggtaagaccttaactatggttttgaaaacgtccgacacgggtaagcaaatcaaggatagaattgcagagaagttgcggatcaaagaaagtctgtactatctctgtcacaagggacgtgttctgttaactgaggatactcttctggatcatgaggtcgagagtaactccacagtttacatccgccttcggaattcagcggtggtgaaaccaaatgcaaagaagcgctaggtagctacttctatgaactatcaacttccttaaggcaagagacaaaacatagttgcttagacgttagaccctcgtatggttagtttttggtgttactaatcctagttctctagcagtgaactggaggtttcaggttcctgacttgtgatgcctatctattagtaatacttttgctgtaaaaacttttgcttgaactgaaggggagacacagaaagaactgtgcatatttccatcttgatctactgttttgtgaaacaggtcaaaaaaaaaaaaaaaaaaaaa

SEQ ID NO: 17414 - DNA, 376 bp, Oryza sativa
  Clone ID: PAT_MRT4530_23069C.1
ctacacgccgagggcgtcgctgccgctggagccgggtccacgtcccgccgccgtcgaggtctcccacaagccacatccggcgggcggcggccgcccctccgccgcccggctcctgccggagctcggcggcggcgcgccgttcttgttccgcagccgcaccatcggggtgggcgccatcttcctcatgtggggggcctccgccatcgtcctcggggccgtccccgagcccgccatccccatcgcccacatgctgctctccttcgccttcctcatggcgggcgtcgcgctgctcaccctctccgtcgctgccccccgctgcgccatggcggcgagggcggcggcgaccctggagaactggctcacggcgttgatctag

SEQ ID NO: 17415 - DNA, 645 bp, Oryza sativa
  Clone ID: PAT_MRT4530_2306C.1
atggacaacaagaagagttcaagacatgttgcatttccaaagttacatgagttgcatcttaaggggatgatggaatggaatgagtggacatgggagaagcatgtggaggccatgcctgttctaagcgtgcttcatgtcaaagactgcaacttgagccatcttcctcctggacttccttaccaggcaagggctttgaagagattatgcgtaataaatgctcggaacctaaactccgtggagggtttcagctcggttatcaagcttgaagtctatggcaaccctaatctcgagaggattgttgatcttccaagcctgcaaaacctaaccattgtgaactgtccaaagctgatgttgttggatggtgttgcatcagttcagatcatggaacttggggaccacgggatggaaacgctccccgagtacctgcgacatctgacgttacgacatttgaagattgtttgcagcttgaatctgctcaggttgatgtcgaccaagcatgatgcaagcaggtcagagtgggagaagatcagccatatcatgcatgtggagggattcgctagcgataacggcgacggcatcttgagatggtacatgtcctacacaagagatccatacaacctggagacaaacattacaagcagatag

SEQ ID NO: 17416 - DNA, 786 bp, Oryza sativa
  Clone ID: PAT_MRT4530_23070C.1
atgttggcggtacaaaattggcacttaacagccgccaacagtggccatggctactatggatacaaccattgctcatatcatggatcaacaagaagacatcaagatcaagtcctccaagtgctggaacctgattcggccacctgctaactgttgaattcaaacagccgtcgaatctgcatacaaccttcattttcggtccgtgagtacttgaggaaggctctctgagtcctctttccaacggatccattctcatctccgaattccatctcgtttggatgcaaacataaaaacaaggtgctgcgtcacctcgtccatctacttgtctttggaaccccaacttatcatgtgtatttaattcctatttgcaaaaccagattacttttatcttgttcttgcttgtttctttgatttgcttgcaggaataaggttgatcagcaccggcaagatcaacaaccctcagagtggtgtatcgatcgctaaggcgcaacgcaacgtcttgtacgattgtagtcgggtcatcaacatttttcccaaatcgtagttatctcaactcaccaaaagatcgggccaaacaatagccttgagcgtatcgagtggagctcaaggtttatcaagtggtatcagagtttttgttgttctcgtctagtccatttagagtttcaagttcttgtcacggttatcaccactgtcgccgccgccgtcttctgtttgttgtcatcgtgacctacgaaaacggaatcggctcgctgccacggttctatttttgtagttttcagatgttttttt

SEQ ID NO: 17417 - DNA, 316 bp, Oryza sativa
  Clone ID: PAT_MRT4530_23071C.1
aaaaagttgggaaacgtgggggggggggggggggggggggggcggggattccggagggggaccaggaggcgaaaaaggtagacgtatagggaggtggatgaaagattggggaaaatcgagggcaaaggagaacccgggaaaaaatggaaatgcagtaaaaaattcaaacaaaaaaataaccgggaaggtaagtggataaagaggaggggcgataatgagggagatgattgacaataatagtgatggggaaaaaaggaggaaaaaagtgaggaaaaaagatgaggaaaaaggatcaaagaataaggaaaagggggga

SEQ ID NO: 17418 - DNA, 378 bp, Oryza sativa
  unsure (1)..(378): unsure at all n locations
  Clone ID: PAT_MRT4530_23072C.1
atattacatccccttctccctctccttcttcctctacctcaacatcngcgtggagagcgtctactccttgctcttcaaaaactacttcatctgaattacaaatacaatcacattctcgctctggaccgcgcacctggcgctgtacatagcctaccttacgaccaataaaccaccagcgaaaggccgctaccactactaagactactaagaagcacaacggatctcgcgactcatggatcatcagatctatataagtctgacctgtcataaattgccaataagaggtgctcgtttctctgagcctctccaagaaatacttgacgctactcagcctgcccagttccatcattacatgcttccactatttaagcatattgc

SEQ ID NO: 17419 - DNA, 414 bp, Oryza sativa
  Clone ID: PAT_MRT4530_23073C.1
ttgttttttggttttttttttttttttttttttttttttttttttttttttttttttttttttttttaaaagaaggggcccccaaattcattgggggtatagcaggggcaatttataccccccacagcaggggaaaagaaccgaagagggaagacggtttcagtcgtcaacattggaaattcgttttgaatcacatgggggacatactaaaactggggccttccaaacctttattttggaacaacgttcattttgccaggctttgcctagggatgttggagatcccatttaactctgacatactggaatggggtgaacatgtttcttcagaaaacaaaggctaccgagacacttggtggttcaaaaggggggggggaaggaaacggtaattctttttttccaaaaagggaaata

SEQ ID NO: 17420 - DNA, 445 bp, Oryza sativa
  Clone ID: PAT_MRT4530_23074C.1
ttcggcaccattctcgcattctcgccttctcgctctctcgtggctggccgtggcgggcgctcgcggcggcgccgccggtcgctgggcctgcgcggcatgtgtcgcggtgaactgtggagtcgcggtggctgcggatgtattcttcgtcgtctctctcgtgtgctagggagcggtggtggagaatgggagatgggcccgtctggtgtttgacgaaatgccggagcgcagcaaggcatggagaggttggggcttcaagcctctacgcgcccatcatcctgggtagtggacagcaagctatgtctgcaagctatgcctctacagccgcaggcttgatgggcgtgtgggttgaaagcggctgcctgtcctcgtgcggtgcaaatgtgagttggttcaactgtacgggagtgaggagcagaaatcctcttagcagcttcccatttttgaa

SEQ ID NO: 17421 - DNA, 304 bp, Oryza sativa
  Clone ID: PAT_MRT4530_23075C.1
gcgcagcgaaagaagacgctgagaagtcgaaggaactctcgcgaagaagcacaccggctcgaccttctcctcctcgtgcgttctcctcgccgtactcccatgccgatcagcaccgcaaaccagcagtgcctctaccggatccatcactcgggcctccaacgcccgtaggactcctattcggatccctatccgaagttcatgtatacttggctgtaacccgaaaactctttttcggtccacgcgtcaatagcggcccctagtagaacgtattgacacaccgggcatacataaagatcatatcggc

SEQ ID NO: 17422 - DNA, 948 bp, Oryza sativa
  Clone ID: PAT_MRT4530_23076C.1
agcaaacagtgctgggtaacagcagcaaggatttatgacaaataaaaccaccatatggtctttcaccaaacgtgacttctatgcaatgtagctctggataattatgagggacaaacattacgcaccggcactcaattcccaacgaattctttcatgctcttcaaccaaaccagatactccttctcatccttgctcatcatgtactcgcacagccagtcatgcagtgagtgcttgattcccctcacttcgagataccggtgcaaggccttctgcaagctctcatcaagatcctgaaatgtcggtcccacatacaaattctccgcatcactattattttgatccagcatcctcatactttcaattgccagttcatcatcattgaagtggcattcaaattccaagatggaggcttctggtttctcaacagtgacgaccatctggattgctggcttaaaagattcctcattgttctcattatcatcgccatcctcattcaaatcttgtgtatcaaagtttgtgtagacagtagctttaatagtctctcctgcaatttctcttttgagtgttatggattggtcaccaggattgtcgattatctcaaaagggaagtcttctggtagatcaatttgcttcgcggaggcggcgccctcctccgactgaacaatgcactcgatctcggagtcgatgacccgcaccaggttctcgtcggcggaggccttggagggcgaacgacgacgtacggggatttcgacgcgaggaagcggcgggaggtgatcccagaggacggcgaggaggaggcggcggcggcggcggcgcggaaacgtgggagcggaacgggcgggcgggacggcgcggcggcggaggaggagtgggcgcagcggcgggacagggcggaggatgtgcggcggaggaggctggcggcgcgcgacgccgacgacgacatggctg

SEQ ID NO: 17423 - DNA, 1180 bp, Oryza sativa
  unsure (1)..(1180): unsure at all n locations
  Clone ID: PAT_MRT4530_23077C.1
atggcccacgcaaatactggcccatcacgaggcccaaatctgcgtgtccaaggaggaggagagaagcagcaaagcccaacttcatctgcctcgtctcgtcctcaccccgccgggccgcctcaaaccctctccccacctgcatcccctctcctccacggcggcggcggacaccaccgcacaatgaggagctcccctgcggcgagtggcaccacgccgtcgaacatggacagcgggagcgaatctgacagcgcccccgaggagctcaccgccgtccagggggttgagaaacacgacgagatcagtaaagttgagaaggacagtgccatcagagtatcgcagcaggagaaagagcggaggagaaggtgggcccaacgaagaacatcctcaaaaccagataaaaaggagcctctggaggtagaagataaagacatcaaacagaaggcagagaatgaagaagatgaggagagcgaggagacccatactatgcctggcatgctccctaccaatgttatcgaaatgcttgcagcacgtgagaagcaaaccttctcatctgactccgaggaagagataacaaatcagaaggttcagaaaaggaagaagcggttgaaatcttccgggcctgaaacaattctgttgaaagacgttcgctcgacacagcatgtgaagaatgcccttgctttcctggagcaaaggaaaaaccaggtgccaagatccaatgcagttttaaagaacgcgaacaaagctttgcgcctcctttcatcgaagggcaattttttgagttgaatatggtaattgcgagagcaaaggattttctcaatttgctgttaggtatgtgcttcggaagacatttatgtttcagagggatggtcttttttgtgcttttatttgagatgaattggctttcacatcccaggcgcacaacgggcatatcgatgagcatgaaactgtacaatacgaatgtttgcaaatgtaatatgtatggtgcgtcagtatttgacaattctttgggcatgagtaatttcttatatggaatattattgttcattacttctttgctaaagaaaatgggaattgttcagttaaacccgttgacatgaattatttggaaacttagcaaccaatcaaatgaggatggcatggacatnccggaggtttgcatccaaaaaaaaaaaaaaaaaaa

SEQ ID NO: 17424 - DNA, 849 bp, Oryza sativa
  Clone ID: PAT_MRT4530_23078C.1
tcaattcccaacgaattctttcatgctcttcaaccaaaccagatactccttctcatccttgctcatcatgtactcgcacagccagtcatgcagtgagtgcttgattcccctcacttcgagataccggtgcaaggccttctgcaagctctcatcaagatccctgaagcacataatgaggaactcaaaggttaggggaaagtgaaatgtcggtcccacatacaaattctccgcatcactattattttgatccagcatcctcatactttcaattgccagttcatcatcattgaagtggcattcaaattccaagatggaggcttctggtttctcaacagtgacgaccatctggattgctggcttaaaagattcctcattgttctcattatcatcgccatcctcattcaaatcttgtgtatcaaagtttgtgtagacagtagctttaatagtctctcctgcaatttctcttttgagtgttatggattggtcaccaggattgtcgattatctcaaaagggaagtcttctggtagatcaatttgcttcgcggaggcggcgccctcctccgactgaacaatgcactcgatctcggagtcgatgacccgcaccaggttctcgtcggcggaggccttggagggcgacgacgacgacggggatttcgacgcgaggaagcggcgggaggtgatcccagaggacggcgaggaggaggcggcggcggcggcggcgcggaaacgtgggagcggaacgggcgggcgggacggcgcggcggcggaggaggagtgggcgcagcggcgggacagggcggaggatgtgcggcggaggaggctggcggcgcgcgacgccgacgacgacat

SEQ ID NO: 17425 - DNA, 411 bp, Oryza sativa
  Clone ID: PAT_MRT4530_23079C.1
atgccgaaggccgaactcagcaccgccaccaaacgccgagcgcaacgccgctggcgccgtagctgcatgccgggccttcaggcgctgaatgcatatctgtgtctgggtgtccccgagctctacctcttgtctgcagaggcgcacgcgtggttccgtcgcatcatcttcgagccttctccccacccatctctaggcgccgtcgttgagcttctacctaccgccgccacccaacaaccgccacccttatccctgctggtcaccggccaccacacacctctcccgcgattcagcgtctggcatcctcttcgtgtgcatgcacggacactcatggagtcagtggtgctcgcaactatgctcaggcgtcgcaacgagcccttcctacttcgcttcttcgcgctctttgccgtgtag

SEQ ID NO: 17426 - DNA, 1758 bp, Oryza sativa
  Clone ID: PAT_MRT4530_2307C.1
atggcactggccttgttcatgccatcgaagctctcactgacactctccatggtcgtcgtcgccgtcgtcgcgccgccgctcccgtcgtcgtcgtcgtcgccgtcgccaacagccgcgtcgccgcagccgccgctccgcctccgccagcattcgccgtcgccgccgctcccgtcgtcgcgcagccgctgctcatcgtcgcctccggcctatgctgagcgcagcaagccggccggcgatgtcacctccggcgggggcaccctcctgcctcgccacgcgcagcccggcgagcctgtccgcgaggccgtcaccgtggagatggcgccggagacggtggtgcaggcggccttgtcgaggaagaaaagcgcgaactcgtcgccgcactccggctccgcccaggagagcgtctcgccgtccatcctctcgaaggcgtcgccgggaagggaaggggaggggaggaaagaggaaagaggcagatacaagaatgaccggtttgtgactggtctgacgccggtcacgtcatcggcagacaaccgtgctcccacgttgcgcctgcttccggcggagtggagggggcgcgtgtgtttttctaagccctcgtcctctttcgtgtgcgccaagcttctcccgctcagcccaatggctgaacgggcagtggcgcacaacctctctccgagcgctagcggtgacgacggggagcagaacccgcgtcgtcgagctcgtactccaccgcccccctcttgccaaagtcttaggcgggaggaggcgctcgagggggtcgaaagatcagcgacttcgccgcccacgagcgatgaagaaggacggcgagacggggagcgtcgcctcctcgtctacggcgatggcagcacgccccagggcgcgctccaagctgcgggcgcgctcttgcgtcacccgcccgtcgtccccgatccagagactccagcccgacgttggctggatgacgtggccgacttggtcatgacggcacagcagcgcctaggcgccggcgggcggtcctccgctaccgaggcctctggcgctgccgccgccggctccatgtcgtcgaggcggaaggcgcggcgagcggcggccgttgcccgccgttcatccgccattccctcatcaacgcctccgacccaagaagatgtgcgtggggggccagatgcccgcctcgatatcgagtgccggcgcgacgctcgtcgcgccgcccatgcaacggagggcgcttcctcgtccggagcgccacttcggtccgggcacgggggccggccccccgtgtccccggttggcggtgccggctgtcgagcctttgtggcgagccttcggaacgtccgttggcccccaaggttccggcccaccaactacttggaagaacgaaggcggcgcgcggccctccgagccgcgcgctaccagcagagcctgcggcgctaccatcagcgccacgtccgggcccgatcactctgcgtcgacgacctcgtcctacgccgcgtccaaacgcgtgctggactgagcaagctctcaccaatatgggagggtccgtatcgagtgatcggcgtcccccggccgggctccgttcggctggccacggccgacggcacagagctgcctaacccgtggaacatcgaacaccttcgtcgcttctacccctacattttcgatttcctgaggattgtgtctgtgccatcgtttccttttgaagaatcttggtttgaattaacacgctcgtgctcgaccctgccctcggtggcccgggccggctaa

SEQ ID NO: 17427 - DNA, 207 bp, Oryza sativa
  Clone ID: PAT_MRT4530_23080C.1
cggcgctggaggcggagctgaagcggatgggcgcagagaaacgggagctgagcgagatagctgtgcggcggtggggggcaagtacgaagcgctgcagagccagttcagcgacatggtcaccgccagcgccgccgccgccgcacccacacgcggcgccgcaccacatgcacgtcatgcccggcgccgccgccgccggctacgccgacc

SEQ ID NO: 17428 - DNA, 355 bp, Oryza sativa
  Clone ID: PAT_MRT4530_23081C.1
gcctcatggatctacaggttgggattgaaagacagggttattttagatggctaggctcttagcaatgcatctaatacaaccaggtttggtggaccacccatataaccggggcctcaatgcatgcatccaacactttacttggtcatcggtaacgtaaccttttttatttagccgcgcacaaatttatctggagcagattgcattttgtaaaccgttaataagaaagatctactatcattagccggggggactgcctcgcacggaaggaaaaggtcttgttgcccggggtaaatataaaaaggaggcatcctcgtccggccggcggcggcgtgtatgctaggcacgaagcctaact

SEQ ID NO: 17429 - DNA, 141 bp, Oryza sativa
  Clone ID: PAT_MRT4530_23082C.1
atggccttctggggtggcctgatcgacgatgagcggcgaggcggcggaggcgctgctggagacgcggagttagaggcacgcaggtggctagtgagccatggggcgaagtgcggtggcagtggaggcctcagtgctcagtaa

SEQ ID NO: 17430 - DNA, 617 bp, Oryza sativa
  Clone ID: PAT_MRT4530_23083C.1
gatcacgctggcaacacggtcgcgaacgtgacggtggcgcagcagccgcattacgggcggtccgtgtcgccgccgtcgagggtgtcgtcgtgctcgccgccaccacctcctacgtcgtcgtcgtcgtcaccgacgacgaccgtcgtgctgagcccgtgcgccgcgtgcaaggtgctccgccgccggtgcgccgacggctgcgtgctggctccttacttccctcctaccgaaccgaccaagttcactaccgcgcaccgcgtgttcggcgccagcaacatcatcaagctcctccaggaattgccggagagcgcgcgggcggacgcggtgagcagcatggtgtacgaggcggaggcgaggctgcgggacccggtgtacgggtgcgcgggggcggtgtgccggctgcagaaggaggcgaacgagctcaaggtgcagctcgcgcgcgcgcaggccgacctgctcaacgcgcgggcgcagcacgacaacctcgtcgccctcgtctgccatccggagatggtcacattgaaaagacacatgtcagggggtcgtcggcatccggagacgaggacacgatcgctgccgacgaggaggacgaatcatggtggcaccggttgatcgag

SEQ ID NO: 17431 - DNA, 447 bp, Oryza sativa
  Clone ID: PAT_MRT4530_23084C.1
tagtggatccccgggctgaggctcagtcgccaagctctcgttcgctttgagatcgagagatctccgtctgcttcgcgccgcctcgtgcggggtgctgttaccttgcttctgaattctgatccctcgcgctctctctctcgtgagctcgcgggcggcgtggggatggccgttggaggaggcgtgcgcgtggcgtcgtcggtggaggtgtgggggcggcggaggaacagcagcggcgcggggacggcgaggcgcggcgccgcggcggcgacggcgacgaccatccggtgcagctgcgtgggcgaggcgggcgcggccacgggaggcctcgcggaggagcactaccggacgctgcggctgcgcccgggggccacccgcggcgaggtcaagaaggccttccgccgcctcgcgctcatgtaccatccggacgtttgcaaggagagcgatcgc

SEQ ID NO: 17432 - DNA, 152 bp, Oryza sativa
  Clone ID: PAT_MRT4530_23085C.1
attgcgccgcagagcgagcgagcggcgcgcgctgcgctggtggctggcgtcactaccggtgccaggctgtaagcatgggctccgcggtggccgcctcgagattggtgacgcggacgcttgggggcctccagagcccgacacgtgtccacagg

SEQ ID NO: 17433 - DNA, 2685 bp, Oryza sativa
  Clone ID: PAT_MRT4530_23086C.1
atggcctctccgcctccgccgttagggtcagagacggcgatctccccggcgtacggcgaggaggaggaggaggaggaggaggagcagtgccgcatctgccgcgtccctgcggaggcggggcgccccctgcggcacccctgcgcctgccgtgggtccatccgcttcgtccacgacgactgcctcctccgatggctcgccacccgccgcacctcccactgcgaggtttgcaagcgcctcatctccacctgccctctctacgccgcgaatgctcctgcaaggctccccttgtccgagttcatgctcggcctcgccaacaagctcatgggctggttcttcctcctcctctccctcctcgccgccatgtacatctgggaattcgtcatgcccttcaccaccctctggatatggcgcctcgctcttgctaggagctttgctcgggtgcgccacctgctctccctccggatcttcgctcatgctcatggacatggcgcccccctctatggccttatgccttctcccgacgccgtcttcgcctgtgtttctatcagaagagcctttctccgggacctcccccacttcagggacctcaatccccttgccagatttgctgcccatgctcttgctccctttgcactctggattgctcgcctggaaactcgtctcgaccgaaggtttggaggcttggatagtttgcaagtcattgcgctacataccgttgaagcttccttgatggtggtacttcttgatgtgatgcttgcttgtgtttttggttttatccccttctcactggggcggataatcctattctgcacatcgtgcttcagttttggaaatatggatagagtccactcctacacttcaacatcttctatccttttagttggatatggatttatcttttcactgggtgtacttttcactgggtttcatactttcgaccagtactcgaggggagaacacctcacaattgcagttttcttcaaggtcttgaccaatggaatgtacagactattcagccctcttagaaggttgcctggtatacatgtaatggtccagatggcattgtctttcttgcgactgttcttcagagggatcataaatctagtcaccgttgccaatatttcagttaatctcattaatgtgattgcaatatggccgttgttctttggctggtcagttgatatctgtgcttcacaattgtttggtgaaacaatatatcagaagcttgaacttctatttgcctcatcttttgcttctactgctcttcattggctcattggatgcatctatttgatgttactctcaatattttccagtcctctttgtctggtattgggtccaggagttactattccctttgtccacttttctggagaagaaagcttgatacagctcttccgcgaaccattctacaaattttctttaaagctgctacctggtctttttgtcagtgctgtagatgttgctatggtcattcttgttcctgttcaaattgctggccaattggcacctaaggtgttcccattagatataacctactttgatcctcctactaagggatcagcattttggcaagcaccacggaactatgcagagttactttctggtgcccttcttctgaggtttctcatctgcaatacactcaaataccttcagcctggtccactattgcagaagttactgctgtattggtctgccaccactagacgtgttcttggtctgcttgatttattgattgcctggtctgctggagatggtgaatgcgaggatggaaatggttccacacgaaaattccaccatggtagcacttctgaagatgagtacaaaaggagatttgctgcggttcgcctgattctacttgtagtgctctcatcgtcaactcttgtgatattcaattctgctgtgcttattgtcccagtctctattggccgtgcattgttgtttgtcatccctaagttgccaatagcaggtggattgaagtacaatgatctgtttgcttttgccattggattttgcatcatatcaactatcattgccgcctctcgagatttatttgtctacatggcttctgggagaacacaccttctggcttccgttatctacaagtggggtataactgctttgaagggttctccactgctgttcatatggattgtcataatcccccttctgattggtctgctggttaattttctacttatatcacccttcctcgtgactgccaatggcatgttcgttatcgacctcttctgtacttggttcctagggctgctactgctgaagttctgggtgaagttggttcattggacaacggtcacacctttcctggtgtatttcattgatgaaaggtgggactggaagcttactcgggcaagagaggacgggttttcggggctgagggcattgtgggtcttacaagatgtattgatgcctatcaccttgaagcttctgactgctctctgtgtcccatatgcgcttgcgaagggtgtcttcccaaactttggctaccctgatgctgtgaacttaacagtataccgttttgcatggttaggcggctttgccttgtgtgtgctgtatgatctagccaaggtattctgcaaggtcctggttaaactccatgattctatcagggacgagcgctatcttattgggcagaggttgcaaaactacgttgacaatagctga

SEQ ID NO: 17434 - DNA, 963 bp, Oryza sativa
  Clone ID: PAT_MRT4530_23087C.1
atggcgccagaggcggctgctcctcccgccggcgagaagatggccatccgcgtcctgctgcggttcgcctgcggcagcttctccgtcgtgtgggggaactacaacctcctccacgacggtcaggtcagcaccatgatcgtcaggatgtggtcggagctggcgcggacggggaggatctccgacggcttgccgattaaccacgaccggtcggtgttccggccgcggagcccgccgtcgtacggcgccgcgatcgacgccatgttcacggcgtacgacgacgggggccggctcgtcaacgccctgaccgcgcacgacagcttcgtcgagcggctgtactacatcgaggccggggacatcgcccggctgcgcgacgcggcgagcgccggcgccgagcagcagcgcgcgtcgcgggtgcaggcggtgtcggcgtacctgtggaaggcgctcgccggcgtggtggccgcgtcgtgcgtgcccgaggagcggtgctgcatggggtggtgggtggacgcgcggcggcgggtggcgtcgccggcgctggtcccggcgatgtgcggctactgcggcaacgtgacgtcgtacgctctcggcgacgcggccgtgggggaggtcctggagaggccgctggcggaggtggcggccatggtgcgggagagcatcgcgtcgatcgactacgacgagtacctgcaggagctggtggactgggtggtggggcacaagacggagaagacggtgttcgcgtcgttcccgctcgacaccgacttcgggttcggccaggcggcgctcgccatgcccatctgggaccacggcaagatgggctgcgggacgctggccgtcggagtgcgcccgggaggcgacgggtcgtggctcgtgagcgcctacatatggccgcggatggcggcggcgctcgagtccgacggcgtcttcaagcctctcacggcggcgtatcttggactcgtctag

SEQ ID NO: 17435 - DNA, 550 bp, Oryza sativa
  Clone ID: PAT_MRT4530_23088C.1
cagccaagctgaacgattaagcatacataaataaataataacggtgaaggaacgcaacgaaatggcagaggtctttctcaattaaaacaaaattttcatgatgcgtctgtttttttcaaaattgaaaacacatcatcatcgttttcattatctctggctaatgcttcgccttcttcttgggatgtgggattttctcttttctttttgttgttgacgaacccttctttgagggttgccgcttgttccgtttctttgatttctctttcttctgtttcttccactggctgtctgggtcgacgaaatcgtcatcgctgtcatcttcaacaggcatagagccatcatcctcatctgattccatattcttgtccctcatcttcgtcttcctcgtctgaactcaagaatcaaatccttcaacaattattcctccctccgttagccgaacattcgtcgtgatttatggggcttcgctttcttgcctctttctccttttggagtttttggttttttcttctttttcaggtcaacaagtttctttacctgaaatgcaatg

SEQ ID NO: 17436 - DNA, 1180 bp, Oryza sativa
  Clone ID: PAT_MRT4530_23089C.1
atggcgtcaccaagcagaagatcgcaccattgctgcctggtactagttgctctctcgttggctgcaatgttgctcccaatggccatggctactacgatatcgatgtctcccattggcaccttctgctggaatccgagctacaacgagatgagcagcggcgaggccatcgccaggcggcgcagcatcaactccgtcgtctccgacctcgccgccaaggcgcgcgccggcggcggattcgccacctcctccgccggcaggggcatcgacgccttctacggcctcgcgcagtgccgcggcgacgtctccggcggcgactgcgacgcctgcctcgcccaagccgccaaacagatggtcaccaactgcaactatacattagactccagaatatggtatgagtactgcttcatgcggtacgttgacttcaacttctttggggagatggacacgaggacagacgcaagtgtgaccctgaggcaatggccggatatggacaaccccatggcgttccagaaggcagtaggaaaggcgacggggaaagcggtagcgcatgctgtcacgatgggtagcggtgggctgggcagagcgaaggagcagtgcacatcattcgtgaacgtctatgcgttggcacaatgcacgcgggatctggcaccaccactgtgcgcacaatgcctgtcaacgacggtttccaagtttgccgaggcctgcggcagtgggcaggggtgccagattgactatagtagctgttgggtgcgctacgagatctacccgttctattttccactcgaggccaacaggcaggcccccaccgacttgacaaagtacaccaaggtcacgatgcattgaggaccagggtgccagatcgactatagcagctgctgggcgcgttacgagatctaccccttctacttcccccttgctgctgccggtcgcgccaccatcgatatgaccaaatacactaaggtcaccgtgcattgataagaatataagatcagtgtgagacctcctcaaataagtacttgtgttgacgtttaatttcagtaatatgataaatttgtatcgatccttagcatgctagcttcagctagcttggaataaataaacaaataaagatgtgtactgagggcacgttgtatgagcaagtgaattgaatagtattgaaatcctttgttactatacaatt

SEQ ID NO: 17437 - DNA, 393 bp, Oryza sativa
  Clone ID: PAT_MRT4530_2308C.1
atggcaattaaggagtggttcgcgggacaccctggaagacatacaacgcttgccacaagcgggaatggggtcttgtcacaatcactcgacatggtgacgtgtcaggcctggcgcggtgacatgccggtggattggaggaggtggtcgggctggtgggttggtggcggcgacgtgcagcggcggtggtggccaagggaggtggtgggcggcctccccataggtgacggggtgcagatccggccggtctccctcctctccctcttcgtcggcctcccaccaatggcgcgcagatccggttggtgggttggcggcggcggtggtggccaagggaagcggcgacagcagcagcgggtggccaagggatcccagctacgactggcagcggcggactga

SEQ ID NO: 17438 - DNA, 319 bp, Oryza sativa
  unsure (1)..(319): unsure at all n locations
  Clone ID: PAT_MRT4530_23090C.1
gcaacaaggtaaacaatggatttcttgactgcccagttgtaatctttcacccatggactataattatccaatgtgactgtaatgctagctgcaatgtttgctcacaggtgtagagaaagacgcacaacgtattctgactgaaccatcttattacaacctcaaggcctatgaaaacaaactttatattcatggtaaaagcacgtctctgaaccagagactatcgtctaactggacttaaccatgaaggtntgcaggctgatggacatgatgttgactggttggccaccaatatccggccaagcctggaacttgttgtcag

SEQ ID NO: 17439 - DNA, 422 bp, Oryza sativa
  Clone ID: PAT_MRT4530_23091C.1
cgaaaaaccccttcgaatttgaaaacctgggaggcagcccccggggcacaaaacaaaaaaaagcccggttaaacccaacaaaaagggggaaaaaaaaatgggatcaagcccgaaaaaacccccattaaaaaaaccaaaaagggcattaaacagggggaacaggcgggaaatggatcttggacaaacccaaaaattaaaaagggctaaacggggggggggggttaacacaacggccacagccaaaaaaaaatttggccacccgggggactggttttggccgcccccaaaaaacaaaccgccaattccactagggcccttcaaaaaaaaaaaaattctcgttaattcgttggcaacggaaaacgttaaagggcaaacggtcgtgggggggccatttttccgacacttaaaaccctgaaccaaaa

SEQ ID NO: 17440 - DNA, 1050 bp, Oryza sativa
  Clone ID: PAT_MRT4530_23092C.1
atgaccttctcaatctcagtgggaatggtcgaagctgaacacctcgtggacaccgcacttgcaagtcacgcgcgccgccggcgagcgagcttggcatgggtgcctctctctccgcgctcgatacctcaacctctagctcctgaaagattatgcgaaggaataaatggaccgggaaggggaggctttaccggcgcgatcgtcttctactcttcttcactgaggtgtagaaagttctacattgtcaccaaatttggtagttggcttattgactgctattgtacctgctcaaagaagagtaagctaaggaagtggaaatgtcgtccgttggatatcacgcatctaaagaatgttggtgctgttcatggagataaccatgcgttccacaatgagttacgtagatctctagtacatctggtttcctttcaaccaggaaatgagaagcctttttctgtcgctgccattcctattgtgtcagttaatggattttgctatatgatatcacatagcaaagtgttccgtcaacaagatgcggccaactggcaacatagagtcatttttcctgatgaaattatagtgatgcttagaatagaagatgtaataatacaaggatctctggcagcattttctgttaatacaactgcggaactgccaaatccagtaaaattcagtgaacaacaggtttcacacaatcaggaagttcatacagttaattttgaaggggtgatggagccaagcctgttagttcgtggccgtgtaactcactatctcagattgtgcagcatttggaggcagcaaaccaaggaaattgaaatgcatttttcttcttggatcaaagtttccatttggcttgtgatgagtagtagtattctgactagagacaatctaatctacttaaaagagggtggaagggcaaggataaaagataaaacacaaggggagaaggactgcagtggggagccatgctggctgctaaacaaggtggcaggtgaaatgttcaacacaaagttcggttggaggtttgggagttgggactcccaagactggaattag

SEQ ID NO: 17441 - DNA, 926 bp, Oryza sativa
  Clone ID: PAT_MRT4530_23093C.1
cccgggctgcaggcgagccaccgactgaagggaatggggagctgtactgtattttgcccccaagaaatgatcattcaggcaggagtagcggtgattctagccattcaactgcgagtcggaaacacgatgattctgccagtctgtctgctgaaggagatggtgaactgtactgccgattgccaaggactggccattcaggtagaagttctgggggatcaaagcatgccttcggtgcaaaaggtttgattaggcgcagcagtagtttctccagtgatattcaaaaggatgtctcagtttgcatgactacaactgaacagacttcgtccatggtatctacagaagctgaggattcaccaaagaacgctgcacgtgatgtcgatacaccctccagctctccaatgtctctaagaaggatgatagagggaaggcccgaccgctgtcgacttcgaaggaggatcttcaatcatcaaagaagctcatcttttgaatgggccaaaatttccatggttcagtgggcaatgacgcgtccgagccgttatacttcagttgcagacaacaaatcatttaaatcagatgcaagtccaaggttgaattgtgattccgaatgtgaatccacttcagctgttgacacagaatctatgttttcgttctctttatatgatatatcatggcctccaaatgaagtggaatcgcttcaagagaagtactcttcaacgtgtaggctgtttacctatgaagagctgaaacttgctacgtcaaacttctcaccagatatgttaattggaaagggaggaacaagccaagtttacaaggcacaactatttgatggcacattatcagctgtaaagattctgaaaccttcagttgatgcaatacaagagtttgttacagaggtggagacattgccaagcttgcaacatgataat

SEQ ID NO: 17442 - DNA, 396 bp, Oryza sativa
  Clone ID: PAT_MRT4530_23094C.1
atggcgaggcagcctagcgcggtggcggcgtgggtgttggtgccggcttctgctctgcccggcgtcctcgtcggttggccgcgacgcgtgcaagatgggcgggatggaggaggtcgaggccgcatgccaaggcaaggcggcgccggagagtcggagctgcttcgctgtaggggtgcgacgaagcttggcaatgatgacacaatgcaatctctttattggattattgatgctagttggcaatgcacattggacacagcactgtatttggatgccatctcatcactatcgtggaacataagtaatgtgccaaagctacagcaaagtctaattgaacagatgctgagccataataatgagatccccggcttgatcagcggtggattcatgaaggcgtag

SEQ ID NO: 17443 - DNA, 357 bp, Oryza sativa
  Clone ID: PAT_MRT4530_23095C.1
aattcggcacgagcaattcttgagctcaatcagcaacaacatctatctccttctygcttagttaagtccttcgccctccmaaggaagaagaagatgtcttkcctkccggccgcmaactkccggccttccggcacggcctgccagtbcggccgccgcttcggcggattcaargattgttccctratgtgaggccacagccaccaccaagacctthggtcytgcttcycatccaacaargcgastctgaggawtgagatgcggtgagaacgcgagaacgcggctcggctcaacacctcaagtttgcacagctkcagcggctctcctcttctcctgcaactkaatctatcgtcgtcgtcg

SEQ ID NO: 17444 - DNA, 207 bp, Oryza sativa
  Clone ID: PAT_MRT4530_23096C.1
atggaggatacccctaatagcctaacgagtgcccctagcccaaaaagctcagcgcgctgccgctcgccggagacgcaaggcgtgctcagtgatggcgcggtcctcggccgtggtggcctcgtcgaacccagggagcgcaatgcgtcgacggtggcggtcccggcggtggtgggagtggcgccggcggtgtcgggtgcggcgcgatga

SEQ ID NO: 17445 - DNA, 558 bp, Oryza sativa
  Clone ID: PAT_MRT4530_23097C.1
atggctgctactacttctgcttgccttgcttgctgcttggtgctgctgcgccatccgccctgcccctgccctgcttggcgcctgtgctgcacgcctgcgcggctgcgccccgccacgcgaggaaggtctcggcagctaccaggcgaggaaggcgtcggcggcgacgagaatcggtggcgatcgaagcggggcgacattgttctggcagcgctgaggagatcagcaaggcgagggacgaggcgtttcgtgctgatgctattccggcggcagagattggtggcggcggagaaggaggcggacgaggaagaggaagatattgggacggcgctgaggagatcagcttggtgggcgacgcagacccaggcgactccgggcgatggtgatctagcggcgcggattggggagagtgagccaagaggcaaaagcagcgagcatcggtctcctggcgaaatggaggagatcggcaaaatagccaacggcaagcgtcggtcacccgacggcgtagtcgtggttgctctggcggtgcagagcagatcaacgaagcagccgagtaattag

SEQ ID NO: 17446 - DNA, 327 bp, Oryza sativa
  Clone ID: PAT_MRT4530_23098C.1
atccactaaccgatatcttgattttatcatattactaacagaaactagtcgtgcccagctacaggatcagtgtgcgatctgttgcccagaacaaaaaaaagacgggaagtggtcaattatcatatatcttagcgtgaagccggtctgcttaataggagttaaggaatgatgacgccgccattactatacgttgggtcctacatatcgggaacaatgcaacagccacctttcatgacagggaggatacctgcgtgatgtgctacctgacctactacttgtatgcatgccggctactaagcatcagtggcatgcgattagctaaagatc

SEQ ID NO: 17447 - DNA, 281 bp, Oryza sativa
  unsure (1)..(281): unsure at all n locations
  Clone ID: PAT_MRT4530_23099C.1
ttncagtgagtnagtnagtnagtgaagcagccatggcggcggcggcgagggcaacggcgcggntcgggcttgcnctgctgctcgcggtggtgggcgtcggtcgcgcaggactacgncttcttcttcctggttgctgcagttngccccgggntcgttacttncgacacgnagcaagagctgnttgctaccccgcagctccggcaaagcccggntggncnaactttcngnaatccaacgggccttctttgcccaacccngtnacngacgggcaagcntacccc

SEQ ID NO: 17448 - DNA, 892 bp, Oryza sativa
  Clone ID: PAT_MRT4530_2309C.1
ccccatgggactagaacactctgatgcagagagtccttcactcaccgatagcacattcctcttcctcatcatcaagcaccgctgtgacccttcactttctacttccttcatcccaagccgctcccgcttggatgacagtttcatgactggcgactgtcagtcaccagtcatcatcgtaccgtatgggttaggccgtgttgtgctattcctaggccatgttgtgctggctcgctcatgcacttgtcgtgttgatacaccaagccagaagaccgcgcaggcccccctttgccggttcggccgggggcgctatgtgaggttcttcgccctcgatctgaggaatgtcagcgagaaggagcgcacaagacacgggcgacgtagacagccggaaatgacctctgacaagcagtacacacgcctcctgctccgctcgtcagctctcccggtggacgcccgtttcaaccttcattcaatggccagcgactttcttgccatgcttgcgctgaagcctggaatggatctgaccgggactgacataccaactccagaagtcagcacgccagctccggctagagacgagagccaggaagctctcatcattccgacgggacggggcgaggcgtgcgacaggccgcctggggtcggggtgccccagccctcggggccgaaacaggagtggcccgacccctcggggagactgagggaggggcggccacgtcaccctcgggcccgaccccccagagggggtcaggccacgtggagcccgagggagttgcggatccaagtgaaggccaagacccgcaagactttgaacaaggcaaaggccggagatgaagcttcggaggatccctatgcctattaccaggagggtgatgaagacgatgacgcccagtag

SEQ ID NO: 17449 - DNA, 3347 bp, Oryza sativa
  Clone ID: PAT_MRT4530_230C.1
cggacgcgtgggttcttcccctcctccaagcaaaaggcaaaaaaaagccgaagcagcgccgacgagacgagcatccaaatcgtcgaatccagcggcggcggaggcgggagatggcggcggcggcggtgatggtgagctcggcgagcgggctgctggcgatgctgcaggagccggcggcggagctcaagctgcacgcgctcgccaacctcaactccctcgtccacgtcttctggcccgagatctccaccagcgtccccgccattgagagcttatatgaagatgaggaattcgaccagaggcagttggcagcattggttgtttccaaggtgttttactaccttggtgaattagatgattctctgtcttacgcactcggtgctggaccactatttgatccctccgagggttcagactatgctcaaacacttttagcaaaagctttagatgaatatgccagcatccgatcgaagtccttgaaagcagcaggtgaaggggatgaaaaaatggacccaagattggaggcaattgtagagagaatgctggataagtgtatacttgatggaaaatatcaacaggccatgggtatgtctcttgaatgcaagagacttgataagctagaggaagcgatatctcgatccgataatcttaatggatctctttcttattccatcattctatctcatcaatatgttagtcaccgtgaatatcgctgtgagattctccgatgtcttgtaaaaatataccagacactgccaaatccggattacttaagcatttgccagtgtcttatgttcttgggtgagcctgaaactgttggaaacatcttgggcaagctgctttctggaagcaaggatgatgctctccttgcattccaaattgcttttgatcttgttgaaaatgaaaaccaggccttcctcctgaatgtgaaaaatcaccttgacacgctgagtttgcagacttctgcccagactttacctagcgatcaaactgctgctacagaaccatctggagatgcccaaatgacggatgatgctatcacaccaaatggaaatgcgcacactgtagatccaaatgaagtagcgcacgctgataggctgaccaaaattaaggggatactgtcaggggagacgtctattcagttgacattgcagtttttatacagtcataataggtctgatcttctgattttgaagactataaaacaagctctggaaatgaggaatagtgtttgtcatagtgcaactatatgttccaatgcaatcatgcatgcaggaacaacagttgataccttcctaagagaaaacttggaatggctaagtagggcaaccaactgggctaagttcagtgcaactgctggattaggtgtcattcatagaggccatctcacacaaggcagagctttaatggccccataccttcctcagagtggtgctgcaagtggtggtagtccatattctgaaggtggtgccctttatgctctgggtctgatccatgcaaaccatggtgaaggaatcaaacaatttcttcgtgagagccttcgcaacactagttctgaggtcgttcagcatggtgcttgtctgggacttggacttgcagctttaggcacagccgacgaggaaatatttgaggatgtaaagaatattctttacactgacagtgctgtggctggtgaggctgctggcattggcatgggcttgcttatggctggaacagccagtgagaaggctggagagatgcttgcctatgcacatgatacacagcatgagaaaattattcggggcttgtcacttggaattgcattgacagtttatggcagggaagaggaagctgacaccttgattgaacaaatgactagagatcaagatcccatactccgttatggtggtatgtacgcattggctctagcgtacaggggaactgcaaataacaaagctatccaccagcttcttcattttgcggtgtcagatgtgagcgacgatgtccggaggactgcagtattggctcttggttttgtcctgtacaatgagcctgagcagactccaagaattgtgtctctgctctctgaatcatataatccgcatgtccgttatggtgccgctttagctgttggaatatcctgtgcaggaacaggattaagtgatgccatctccttgttggagcctcttacatctgatgttgttgacttcgtgcggcaaggtgctctcattgcaatggcaatggtcatgatccaaactaatgaatcatatgactctcgtgttggaacattcaggcgtcagttggaaaagatcattctcgacaagcatgaggacaccatgagcaaaatgggtgccataatggctactggtatccttgatgctggtggtaggaacgttaccatcaggcttcagtccaggtcaaagcatgacaagctgactgctgttgttggccttgccgtcttcacccagttctggtattggtacccgctgacatatttcatcagcctggccttctctccgacggcttttattggcctcaactctgacttgaaagtgccgaagtttgagttcctgtcaaacactaaaccatcgctctttgattacccaaagccgacaacccaacaaaccacgactgcttcagttaagctgcctacggccatcctatcaacatatgccaaggcaaaatctagggcaaagaaggaagccgaaagcaaagctcaggagaaagcagaagcaccaccaagtgaagatgcttctacttcaatgcaggtcgatggtgtggcggagaagaaagcccctgagcccgaaccgaccttccagatcctgactaacccggcccgggttgtcccggcccaggagaagttcataaaattcctggagggcggcaggtacgagcctgtgaagctggcgccctccggatttgtcctcctacgggacctcaagcccaccgagacggaggaactagtcctcaccgacgccccggcaactcaggcgacgaacgccgcagccgccaccgctggccagcaaggctcaggcgccgccgccatggccgtcgacgaggagcccctgccaccccagccatttgagtacacctcgtgatcccttgatgatcccagggctaaacacttgtactgtttgtttctaacttggtagccatgatggaatcaaatgtttctttcacaaagcttatgaattgattctttccattgatttactggtttagtgtgtggaaaaattgttggtattagtcaccagagtaaaatatttcacctgcaaaagaggagttcgatcaagatttgtattggagactggaattggatgcgtgtcatcgcgaattttcgttttaaaaaaaaaaaaaaaaaaaaaaaaaaa

SEQ ID NO: 17450 - DNA, 311 bp, Oryza sativa
  Clone ID: PAT_MRT4530_23100C.1
agtcagatggagaagagaccaaaataaaaattttgcatctcaatgagctctacaactttggttttgtggcggcaccgatctgggcgagggtgctatgccctgccctgaggggcgaactcggcggcggacaggacgggggcgcagccacgacgatgtggggaggaaggcgtgcaaaggaaagagggtggagcggcgtcaacgcgatgcgtagcggtggtgctggtcagcagcggccgcggatgatgtggaagtcggcgccgtgcggggatctagtggcggtagcggtggagcagcgtcagcgcgatgcgtaa

SEQ ID NO: 17451 - DNA, 306 bp, Oryza sativa
  Clone ID: PAT_MRT4530_23101C.1
atggggaagaggagaacgggagagagacgtgtaagcaaggggaacgaatttttctgcacgagcaaaatggtaggcgacgtacccgtcgacagcgagacgcctgtgattatttgtgaagtggttttggagatgattggattttcaggtgatggacatgtgcacttctatatggatactatgcatcttcaatttgtgtttgctcggttcgttggtccaaccggcgggataccggcggttagaccaacgacattccggcagtcagaccggcgaggtaacgacggtcagaccggcagcgacaactggtga

SEQ ID NO: 17452 - DNA, 1245 bp, Oryza sativa
  Clone ID: PAT_MRT4530_23102C.1
atggcgtgtgcagagacgtatatcgagaacatggaggacagatgcatctacttctttagcaggaggctattcgcagcgaaggctaggaacaagaggcagccgatgagggtggcaaacggtgggacgtggaaggcatctggtgggagcaagacggtgaggagcaagaaggttggcggcatcgatgttggtcagaagctcaccatggtgttctacgagcgtaggttcgagggcgaccaaaaccctgtcaagaccaactgggccatgcacgagtacaccaagatcattcctagctccaaaaaccagtgtatttacaataaggaaggaggacacagagccggtgaacgctgccgccgcggcgtcgagcacggacaagccctccacgccggaggcactgccaccgcctacgccaccgccacggccattgctgaacatggccggatcatcgtcggcaacgtcgctactgccaccgcaattgccaggcctggctgggtcgtcgtcgacgatgccgctggcactgccactgcagctgcctggcctgcccgggtcgtcggcggcgatgtcgctctgccgggcttggctggagagatgacgtccatggcggaccaggcgaacatggcctcgacgtcacaggcgtcagcaccgtcgtcggagctcccgcaggactggtacgacgagtacgaggtcgcgtacggtgccgcggcgccgccgtctcctagcacgatcagctgcgcggcgctgccgagctcgccgacggcgtggtggccgtcatcgatcggcgggccggtgcagcacgacggctacctcgggatggcggatcctgcgtcgtgtaatacgttggaacacctgttgcccagcgcggcgatcccaccagagccaatggcgccgccgaagaactcgccggcggcgccaccaccggccgacgccggcggcaactacgaccacccggagctcgccgactacggcggcggcgtccaggcgcagcacgagcatcatcagccgcaggagctgacggatggcgcggacggcgacgcacagctagagctaggcgccgcggagtttgattccgaacgagtagccgaaatgatatcccaaataatggatggtgaattcgtgtttaaatttgaggacgacaccattgttagcttcaacgaggtggcggcggcgccgatgttgatcgacggcggtggggacggcgacggcgatggtgcagatggaggtgtcggagatgatccattcgataattag

SEQ ID NO: 17453 - DNA, 703 bp, Oryza sativa
  Clone ID: PAT_MRT4530_23103C.1
gtgataggtgtgagactaatcacgaaaaacattgctcaacccgctcatgaccgcgggcacggctattcgaatagttttactctggctagaggtgtaccactgtacccacaagacacagcaccacaacatgttaccatgcacctcaataccaccatgatacctcggaaaggaactgtggcaatacccctcgcacaacacaactcaccacagtgcatcatacctggattataatcaccgaggcatggactccccagcgacccccacggatttctcgccacttctcagtctggcaccccataatgaactatgctatacaaaagcacgggaccacactgtcgccggcgctagaggactcggccggaccaaccgagggcatctacgcgaagaggacgacgagacgaactcaccaaggggcggcacgacgacgaaggacgacctacgacgagctccgaacggcggcgaagtcgggacgaatcggcttgacggcgtcggcagcgctccggcgggcttcggcttcggccaagtggtggacggtgtgcagctccttctcgcgaacccgatggtggcgacggcgaccggagaaggcggctgcaaaggcggcgcggcttgaaactcggcggctacgacggcgctaggacagacgcggctagggcgctacggccgacggcgagctcgggcgagggtggcaaacaaaagaggagag

SEQ ID NO: 17454 - DNA, 401 bp, Oryza sativa
  Clone ID: PAT_MRT4530_23104C.1
ccgccttctccggtcgccgtcgccaccatcgggttcgcgagaaggagctgcacaccgtccaccacttggccgaagccgaagcccgccggagcgctgccgacgccgtcaagccgatctgcttcgcctccatccgcgccgtgccgtcgcctcggtcgtccccgacctgtgccgccacctccctcggcatcgcagcaccgaggagaagcccgtccaccccttcgttgccgctgctcgtcgccggaaagccgccgtcctcgtcgtcccgacttcgccgccgttcggagctcgtcgtaggtcgtccttcgtcgtcgtgccgccccttgcatagttcattatggggtgccagactgagaagtggcgagaaatccgtgggggtcgctggggagtccatgcctcggtga

SEQ ID NO: 17455 - DNA, 770 bp, Oryza sativa
  unsure (1)..(770): unsure at all n locations
  Clone ID: PAT_MRT4530_23105C.1
ccggccgggacaaggacaacgtgactttggacgatgtactgcaacctggaacagacatgcttgctgctggctactgcatgtacgggagttcatgcacgcttgtgttgagcactggaaatggagtaaacggtttcacccttgatccttcccttggggagttcattctgactcatccaaacatcaagataccaaatagaggaaagatctattcagtgaacgaagggaatgcgaaaaattgggatgctcctacagcgaagtttgtggagaaatgtaaatttccccaggatggttcgccttctaaatccttgagatacatcggaagtatggttgctgatgtccaccgtactttgctatatggaggcatatttttgtaccctgcggatcagaagagcccaaacggaaaacttcgtgttctgtacgaagtgttcccaatgtcattcttgatggagcaagctggaggacaagctttcacaggcaaacaacgggcccttgaacttgttcccagaaagattcatgatagatctccaatattcctggggagctatgatgacgtggaggatatcaaagcattgtacgcttcagagtctatcatcggttgaccggtgttactgaagagtaaaaggacacatgaatcaccctctaccttgtgaacatagacatttttttttgctttaatgtaaaaaatcagcctatactgacacggtacggcttcaccatatgaaagataaaggatatgnatctacataattngatggaacatagtgcctttc

SEQ ID NO: 17456 - DNA, 822 bp, Oryza sativa
  Clone ID: PAT_MRT4530_23106C.1
atgaccctggtggtgggctaccccgacgcgccggaatacacgaccatcccaccgctcagtggcgagcttccttaccgtgtccgcttggaggtccatggctacgtggggacttgcctcgctaacatggcggtggaggcgtcaggaggcacagcagatcacgcctgtcaggaggcagcctacttgatgatggccagactacgggagcgccacgactacatcttccacgacacggcgtaccgctaccacccccgtcgagcccatggtgatggcgtcagctccttccgtccgacagctggcgagaacgacaccaccttcggtcacatgtgtgctgtgatgaggggattggataggatgcactcggacctgcacaaggcgaccaaggccttgaacgatgggaagctcatgaggatcgtcgctctgaaggacgaggtagcgcgcctgaagaaggagaatgctcagttgaagggtcttccagcgccaggaggagtccggatccgcactacgccccgtaagaggacgactgcacctgtgcgcatccagcttgcgcccaggaacccacctccaccagcagctcccgcagcagctccagttccgcccgcagttcctgcagctccagctccagctcccgcgttcactctctccttcgctccagcatcagccgccagaggttcagccagcggtaccggaggttggttgtctgctactcccagtggcagcggcgagactgatccgtcagactctaggagtcgctcagagggaccaggtgacgagcaggaggacgctttcgactccaccgaccgcaggagccgttccgagcattag

SEQ ID NO: 17457 - DNA, 147 bp, Oryza sativa
  Clone ID: PAT_MRT4530_23107C.1
atggcggcagcatatccttatatccgagaacaagatgattatcctgaggctgacgtcagcctgcagttcagtgacttggagtatcagaaagttttccatggtgaagggaacgccctccaagtcatcaggtgtaaaatgaagcactag

SEQ ID NO: 17458 - DNA, 900 bp, Oryza sativa
  Clone ID: PAT_MRT4530_23108C.1
atgggttgcaagatggctggccacccacccaaccaccgcggagaaggcatgatcgactttgtggcagagctggcacgcatgacactggtggtgggctaccccaacgcgccggagtacacgactattccgccgcttagtggcgagcttcctcaccgtgtccgcttggaggtccatggctacgtggggacttgcctcgctaacatggcagttgaggcgtcaggaggcacagcagatcacgcctgtcaggaggcagcctacttgatgatggccagactacgggagcgcgacaactacatcttccacgacacggcgtaccgctaccacccccgtcgagccaacggtgatggcgtcagctccttctgtccgacagctggcgagaacgacaccacctttggtcacatgtgtgctgtgatgaggggattggacaggatgcactcggacctgcacaaggcgaccaaggccttgaacgatgggaagctcatgaggatcgttgctctgaaggacgagatagcgcgcctgaagaaggagaacgctcagctaaagggtcttccagcgccaggaggagtccggatccgcactacgccccgcaagactacgacggcacccgtgcgcatccagcttgcgcccaggaacccacctccagcagcaactcccgcagcacctccagttccgcccgcagttcctgcagctccagctccagctcccgagtccgctctctccttcgctccagcatcagccgccagaggtccagccagtggcaccggaggttggttgtctgctactcccagtggcagcggcgagacgtatctgccaggctccaggagtcgctcagagggacttggtgacgagcaggaggacgccttcgactccaccgaccgcaggagccgttccgagcattag

SEQ ID NO: 17459 - DNA, 780 bp, Oryza sativa
  Clone ID: PAT_MRT4530_23109C.1
atggcggtcgaggcatctggaggcacagcagatcacgcctgtcaggaggcagcctacttgatgatggccagactacgggagcgccacaactacatcttccacgacacggcgtaccgctaccaccccagtcgagccaacggtgatggcgtcagctccttccgtccgacagctggcgagaacgacaccaccttcggtcacatgtgtgctgtgatgaggggattggacaggatgcactcggacctgcacaaggcgaccaaggccttgaacgatgggaagctcatgaggatcgtcgctttgaaggacgagatagcgcgcctgaagaaggagaacgctcagctaaagggtcttccagcgccaggaggagtccggatccgcaccacgccccgcaagacgacgacggcacccgtgcgcatccagcttgcgcccagaaacccacctccagcagcagctcccgcagcacctccagttctgcccgcagttcctgcagctccagctccagctccagctccagctcccgcgtccgctctctccttcgctccagcgtcagccgccagaggtccagccagtggcaccgggggttggttgtctgctactcccagtggcagcagcgatctcagcagcagcagctccagtggctcgcagtcaggcagcggcgagacgtatctgccaggctccaggagtcgctcagagggacctggtgacgagcaggaggacgctttcgactccaccgaccgcaggagctgttccgagctttcgggacgacgagctcgccggcgctag

SEQ ID NO: 17460 - DNA, 294 bp, Oryza sativa
  Clone ID: PAT_MRT4530_2310C.1
atggccggtgctatgaaatatgtcgtcggtcttcgttggcaggttgggcgcgacgactctgtatttttcgagatcgttctcgataatacgtcatcggttgacctggccgaggcttcccggtgggaaacatcaaaccatcgttatccccggcgacgatatcttgtagctcggtcgatctcgccggatcgacaagttaacggcgctgattccgatcttgtcagggggcatactccggtcagcaccaaaatccccctacctagcgcgccactgtcgacgtttgatgtcgcgattccg

SEQ ID NO: 17461 - DNA, 945 bp, Oryza sativa
  Clone ID: PAT_MRT4530_23110C.1
atgggttgcaagatggccggtcacccacccaaccaccgcggtgaaggcatgatcgactttgtggcagagttggcacgcatgacactggtggtgggctaccccaacgcgccggagtacacgactattccaccgctcagtggcgagcttcctcaccgtgtccgcttggaggtccatggctacgtggggacttgcctcgctaacatggcggttgaggcgtcaggaggcacagcagatcacgcctgtcaggaggcagcctacttgatgatggccagactacgggagcgccacaactacatcttccatgacacggcgtaccgcttccacccccgtcgagccaacggtgatgatgtcagttccttccgtccgacagccggcgagaacgacaccacctttggtcacatgtgtgctgtgatgaggggattggacaggatgcactcggaccagcacaaggcgaccaaggccttgaacgatgggaagctcatgaggatcgtcgctctgaaggacgagatagcgcgcctgaagagggagaacgctcagctaaagggtcttccagcgccaggaggagtccggatccgcactacgccccgcaagactacgacggcacccgtgcgcatccagcttgcgcccaggaacccgcctccagcagcagctcccgcagcacctccagttccgcccgcagttcctgcagctccagctccagctcccgcgtccgctctctccttcgctccagcatcagccgccagaggtccagccagtggcaacggaggttggttgtctgctactcccagtggcagccgcgatctcggcagcagcagctccagtggctcacagtcaggcagcggcgagacttatctgccaggctccaggagtcgctcagagggaccgggtgatgagcaggaggacgccttcgactccaccgaccgcaggagccgttccgagcattag

SEQ ID NO: 17462 - DNA, 1663 bp, Oryza sativa
  Clone ID: PAT_MRT4530_23111C.1
tcacgccgccgccaactcctcttccttcgccgcggagcttcgcaagccaaaccatcgcgccatcgagttcgcctcgacgaggtgattccatttttcccgttttccccttcccccccactccatagcaaccaccaccgccacctctctttgccgccgaagacaagctcttgactgcgccgttccggccaactccttcactctctccgccagccaccgccctccccgggtgtgtcttgctcgggaacacgcgtggacgccgacgtcgccgccctccagccaccggagcgccgccgccccgctcgccttctcctctctcttctctcggctctctctgccttccatggggacgtttgcgcagtctacggacctcaacgtcggatcgttggttgtaaagcccggcatcaaccaaacccaaggtcgaagtgctgctcctggcaccccacgccttgatgcgtacagcggctcgccgccacaccgcgccgtcgccgccgttgggttcgagtggccgagatccaccccgtccacccctcctcagtcgaggttcgccgccggagcgccattcccgccgtgcgacggtgagagccgccatgtcgtcccggaccccgtccgacgcttgtcgacctccctacgtcactcctcgtctccggtcatcgccgccccctccggcttcgtccgtgccgtcgaggatgcctgtggagtggtgttcccgctgcagatcaagaatatgggttgcaagatggccgaccacccacccaaccaccgcggagaaggcatggatgatttcgtggcagaattggctcgcatcacactggtggtgggctaccccaacgcgccagagtacacgactgttccaccgctcagtggcgagcttcctcaccgtgtccgcctggaggtccatggctttgtgggcacctgcctcgctaatatggtggttgaggcgtccggaggcacagcagatcacgcctgtcaggaggtagcatacctgatgatggccagactacaggagcaccacaactacatcttccacgacacggcgtaccgatttcaccctcgtcgagccagcggtgatgatgtcagtactttccatccgacagccggcgagaacgacaccacctttggtcacatgtgcgccgtgatgagggggatggacaggatgcactcggatctacacaaggcgtccaaggccttgaacgatgggaagctcgtgaggatcatagctctgaaggatgagatagcacgcctgaagaaggagaatgctcagttgaagggtctcccagcgccagcaggagtccggatccgcaccacgccccgcaagacgacgactgcacccgtgtgcattcagcttgcgcccaggaacccacctccgcccgcaattcctgcagctccagctctagccccagctccagttccagtgtcagctcccgcgttcgctctctccttcgctctagcgtcagcagccaggggcccagctagtggcaacgggggttggttgcctgctactcccagtggcagccgcgaccatagcagcagcagttctagtggcacagagccgggcagtggcgagacgtatctgccagactccaggagccgcttagagggacctggtgacgagcaggaggacgccttcgactccaccgaccgcaggagccgttccaagcattag

SEQ ID NO: 17463 - DNA, 522 bp, Oryza sativa
  unsure (1)..(522): unsure at all n locations
  Clone ID: PAT_MRT4530_23112C.1
actgtcatgcgtgaccttaatccaccccggcggtggacgctctataactagtggatcccccgggctgcaccaattcggcacgagacaagcccaagtcgcgtcgcaccgaagcagagtagagaaggagaggagcggagcgccatcagccgtccgatcgagtgatccgatggctctcgctctctccacctctgctgctgctgccgctgccgccgctgtttctggcgctcgcggggaaggtgatcaacaacaagggttacccccgctccggcggcgtccctcccggcaattaagtcggcctgtcggccggctggttgacaggcaatgggccccttccgggaattaatctccgggccaaaggaacggttccttccttccttccgggcggggaaaaggaaagtttttctttttgggtttccccaaccccctttttaaaagggggccctcttattccggggccccccctaatttttcccccccggggggggggtcccaaaaaaccnctcttaaaantttttncggncc

SEQ ID NO: 17464 - DNA, 411 bp, Oryza sativa
  Clone ID: PAT_MRT4530_23113C.1
gaaagtgtgcgggtgtgtgtcagcccacgtgtgccacccgtcggaaaacaaaggtgtaaagaaggtgtcacagtcgtgtgtcacaggtggtgtgccgtgtcggtggtgacaccctgagtgccgtaggtgagttgaaaagtgtttgtagtccacccggggggtacttttccgtggttgccaggtagtagtagtaggaagagtaccgtgtcccgtggcgtgtcgtggtagtggtgcgtccgtcagtgtaaaagtgttggtcgtgtgcgttgctgtgtcgtggtaccaccccaccgtggtaccgttacttgtaaagaagtggtccggtgtagcatgaaattagaaaaaaatgaatgatttgaatatgcctcttaatcgttgatatttagtttccaaaaaaaaaaaaaaaaaaaa

SEQ ID NO: 17465 - DNA, 945 bp, Oryza sativa
  Clone ID: PAT_MRT4530_23114C.1
atgggtagcaagatggccggccactcacccaaccaccgtggagaaggcatgatcgactttgtggcagagttggcacgtatgacactggtggtgggctaccccaacgcgccagagtacacgacggttccaccgctcagtggcgagcttcctcaccgtgttcgcttggaggtccacggctacgtgggtacctgcctagctaatatggtggttgaggcatctggaggcacagcagatcacgcctgtcaggaggcagcatacctgatgatggccagactacgggagcgccacaactacatcttccacgacacggcgtaccgatttcaccctcgtcgagccagtggtgatgatgtcagcaccttccgtccgacaaccggccagaacgacaccacctttggtcacatgtgtgctgtgatgagtggattggataggatgcactcggacctgcacaaggcgaccaaggccttgaacgatgggaagctcatgaggatcgtcgctctgatggacgagatagcgcgcctgaagagggagaatgctcagttaaagggtcttcccgcgccaggaggagtccggatccgcaccacaccccgcaagacgacgacggcacccgtgcgcatccagcttgcgcccaggaacccacctccatcagcagctcccgcagcacctccagttccgcccgcagttcctgcagctccagctccagctcccgcgtccgctctctccttcgctccagcatcagccgccaggggtccagccagtggcaacggaggttggttgtctgctactcccagtggcagccgcgatctcagcagcagcagctccagtggctcagagtcgggcagcggcgagacttatctgccaggctccaggagtcgctcagagggacctggtgacgagcaggaggacgccttcgactccaccgaccgcaggagccgttccgagcattag

SEQ ID NO: 17466 - DNA, 1155 bp, Oryza sativa
  Clone ID: PAT_MRT4530_23115C.1
atggatggcaagaagccatatgtgatcgccatcatcatacaggtgatctacacggggttgtatgttgtttccaaggcggccttcgatcaggggatgaacaccttcgtcttcatcttctatcgtcaggctgctgccactcttctcttgctgcctctcgccattattctcgaaaggagaaatgcgccagccatgtcgcttcggctgtttaccaagcttttcatgtatgctctgctcgggaacacaataaccatgaacatgtacaacgtaagtctcaagtacacctcggcgacggttgcatctgccaccagcaactctgtgcccgtcgtcaccttcttcttggctgtcctactaaggcttgaagtgatccggctgaggaccttgtctggcgtggcgaaggcggcgggcgtggcgctgtgcctcgccggcgtgctcgtcatcgcgctctacgccgggccggcgatcagcccgttgaaccaccaccgcgccttgagcggcggcgtccatggagcagagagcagcgtggggacggggacgagggcgaggtggatgaaggggacgttcctgatgctgctatccaacacgacatggtcgctgtggatcgtgctccaggcgtcgctgctcaaggagtaccccaacaagctgctcgccacgctcatccagtgcgcgctcagcacgctccagtcgctgctgctggcggcggcggtggtgcgggccgacccggcggcgtggcggctgcgcctcgacgccggcctcctcgccgtcgcctacacgggcttcgtcgtcaccggcgtctccttctacctccaggcgtggtgcatcgagaagaagggccccgtgttcctggccatgtccaacccgctctgcttcgtcttcaccatcttctgctcctccttcttcctcgccgagatcgtccacctcggcagcatcgtcggcggcgtcctgctcgtcgccggcctctacagcgtgctctggggtaagagcaaggagcacaacatcaatatgcagctcacgctcgccgccgccgcttctaccgaacaagtgaaacagcggcaagaggaagatcacaagatggagatcgccggcggcgacgagcaggaggagatcaagcagcagcagcaggggaaaatggcggcgtcgccggagcaacaagtgtag

SEQ ID NO: 17467 - DNA, 1167 bp, Oryza sativa
  Clone ID: PAT_MRT4530_23116C.1
atgagcgaggcgaccgccggccactcctccgcggcggcggcggagtctgcaccggacgacgtcatcgcggagatactcctccgcctcccgccccacccttccttcctctcccgcgcctccctcgtctgcaaccgctggcgccgcctggcccgcgacccgggcttcctccgccgcttgcgcgcattccatcgaacaccccccgtgctcggcttcttccacaactccccggacctcccccgcttcgtccccgccgagggcgtccccggccgcgtcgccgccgaggccgcctccctcaggagggacggggatgacggcatgtggtggtgcgtcgactgccgccacggccgcgccctcctccgcagccgcgactgggccgagttgctcgtctgggaccccatgaccggggagcgccgctgcatcaccgtctccagccagatccaggagggggccctcgacctcaacgccgccgtgttctgcgctgcctccggcggcggtgaccaagactgccactctagtcccttccatgtcgtcgtcgtgttcaccaccggccaatgccatggccgcgtgttcgcctgcgtgtactcttcggggatcgacgcgtggggggacccgatctcgacgccggtgacatcaccatgtgagctctatgaggagccccctgttcttgttggggaagctctgtattggcttcttgatgggagccgtatacttgagttcgaattcggcaaccaatgtttatgtttagctctgattgatcatcctgtggagaatcatgccatcctcaagcggaacatccgtcttgtgaggatggaagacgatgatgtgcttggccttgctttcgtcaaggatttcagcctgcacttgtgggcgcgggaggttgccgatgatggtgcgtcgcaatggattccgcgcagagccattgagctggacatgatcctgccgctggagggctatcggtgccgtgcgatgcctatttggatatgtggatttgctgaagatggagatgtggtgtttatacggactgttgctggagttttcctggtttggcttgatacattgaaattcaagaaggtgtctggctccttactcatgaagactgtttactcctatgctagcttttatgttccaaatggtatgaagaattatgcctctgtccctttgctgtga

SEQ ID NO: 17468 - DNA, 177 bp, Oryza sativa
  Clone ID: PAT_MRT4530_23117C.1
atggaggaagagcgagagggagggcgaaggagagggattgttttgatcatcaccataaaacaaatgttattagtcatatcttcaaaggctattgatatatctgcatttttcttcattgagaatgagaaggtaaggattcaaccagggaacgagggaggtgggaggccaggtgactga

SEQ ID NO: 17469 - DNA, 436 bp, Oryza sativa
  Clone ID: PAT_MRT4530_23118C.1
cccacgcgtccgaacacataggaaaactgtagaaagaaaaagaagaactgattgttttgttctttaatttatataaattcactgtgcagttgcacagtccttaaggatatctgtggatatgaatgccagaaaacaacaggtttctgtcattagtaaaattatcttcaaaaccgggcccgttctttctgatacacacacatgcatgaccagtaagtatacgtcctgtaaatcaaaaccgtttcgtattggattggattgttgctgttggaatggcatggcctgtaacctggaagaagattgtccggtgtggtatggtagcactggaccgctgattgcattggtgcatgtcaaattattggctgtcagatccatctggggactaagtagcagcaacagcagcagcagcaggtatgcttgtctttgtatgcactgcaca

SEQ ID NO: 17470 - DNA, 204 bp, Oryza sativa
  Clone ID: PAT_MRT4530_23119C.1
gtatggctagtcccatccttctactcttactcctcggcggagcctcacatggggggctataccaccctatgacccaaagcctagcgcgtcatgagctatgcctggccatggtacgaacctacaacatacatgccttaagacaaatgcaaaccgaattagcttataagcagtaacctcaatttcaaaagacagaaagcatgctga

SEQ ID NO: 17471 - DNA, 762 bp, Oryza sativa
  Clone ID: PAT_MRT4530_2311C.1
atggagctcgacgcggaggcggagagggagggcggggccggggcgaggtgggagctctcggcggcgcgggagtactacgactaccgcaagtccgtctacggcgacgtcacccaccgcgccctcctcgtcgacgccgtcggcaccctcgtcgtccccgcgcagcccaccgctaaggtgtataagagcattggtgagaagtatggagtgaagtactccgaagatgagatccttgcgagataccggcgtgcgtatgagcaaccgtggggcggatcacggctcaggtgcgaatctgtgtactttgaggaactatatcagtactatatgacagagaaggcttggaagctttgtgatcctgatgctgaaaacgtatttaaagctttaagaaaggcaggtgtcaaaactgctgttgtctccaattttgatacccgtctacggcctctgttacatgttctgaagtgtgatcactggtttgatgcggttgcggtctctgctgaggttgctgcagaaaagccaaacccaacaatatttctgaaggcatgtgagtctttaggtgtcaaacctgaagaggccgtgcatgtcggcgatgatcgtagaatgatatatggggagctagagatgcaggctgcgatgcctggctatggggaagtgatgttcactctttcaaggaggttgcagagaggatcggggttgaggtggccaagtgatgggcagtggttctcaggagcattaatcgatatatatggtttaggagtgcggtcgtga

SEQ ID NO: 17472 - DNA, 2950 bp, Oryza sativa
  Clone ID: PAT_MRT4530_23120C.1
cattcccccacgcaacaccccccttccggccccggttctttaacctaccggctcccccgccccgttctctcttccccttccttccattccagctagcaaccgcaagtccgcaacgcgagaaacgcaggcagcaaagcaagcgaacccaaagctggcctcgcactcacactgacagccttgctctcctcctccccctatatctctcctccccaatcctccaaaccctaatcccccacctcctctctctcgatctcgtgctctcctcctttcgcgagcgcgttctttggaggggagatggcggaggagccacagccagaggccgcgcccgccgcggtggcggcgacgaccgaggtggcggtggcggagaaggcgcccgtggaggcggagaaggagaagaaggtggaggaggagacgccggcggtggaggccgaggcgaaggaggagaagaaggatgaggcggcggcggcggcggcggcgggaggtgatgaggccggggcgatagaggggaccggatcgttcaaggaggagagcaacctggtggcggacttgcctgacccggagaagaaggcgctcgatgagttcaagcagctgatcgccgccgccctcgccgcctgtgagttcaatctgcctccccctccgccgcctcccaaggcgaaggttgaagccgccgttgaggagaccaaggcggaggagaccaaggccgaggaggaacccaaggctgaggagccggccaaggaggaggagcccaaggccgaggtggcggcggcggcggcggcgccgccggaggcaggaaccgaggagccgaaggcggaggcgtcgtccgaagaggccaagaccgaggagccgaaggccgaggcggcggccgacgagccggccaaggaggagtccaaagctgaggcggcgccggctgaggaagccaagccggccgagccggagccggaggagaagaccgtcgtggtcaccgaggaagaggcggccaccaagacggtggaagcgatcgaggaaaccgtcgtgcccgctgctgctgcgcctgctgccgccgccacggaggaagccgcggcgccggaaccggaggtgcaggcggcggcggcgcctgagcccgtgttgatctggggcgtgcccctggtaggcgacgacgagcgcaccgacacggtgctcctcaagttcctgcgcgcgcgcgagttcaaggtgaaggaggccatggcgatgctcaggtcggccgtgctgtggcgcaagcgcttcggcatcgagtccctcctcgacgccgacctcgccctgccggagctcgacagcgtggtgttctaccgcggcgccgaccgcgagggccaccccgtgtgctacaacgtctacggcgaattccaggacaaggacctgtacgagaaggcattcggcgacgaggagaagcgggagcgcttcctcaagtggcgcatccagctgctggagcgcggcatcctgtcgcagctcgacttctcgcccagtggcatctgctccatggttcaggtcacagacctcaagaactcgccacctatgctcggcaagcaccgcgccgtcacccgccaggccgttgctctgctccaggacaactaccccgagttcatcgccaagaaggtgttcatcaatgtgccatggtggtatctcgctgccaacaaaatgatgagcccgttcctcacgcagcgtaccaagagcaagttcatttttgccagcccagccaaatcagctgagaccctcttcagatatatcgcaccagagcaagtccctgtccaattcggaggtctcttcaaggaagatgatcctgagttcaccacctcagacgccgttaccgagctcactatcaaaccttcatcgaaagaaaccgttgagattcctgtcactgagaattccacgattggatgggagctccgggtgcttggatgggaggtgagctacggagcagagttcactcctgatgccgagggtggatacacagtcatcgtgcagaaaacgaggaaggtgcctgcaaatgaggaaccaatcatgaaaggcagcttcaaggttggcgagccaggaaagattgtgctaacgatcaacaaccctgcatcaaagaagaagaagctcctctacagatccaaggtcaagagcaccacggccacaggacgtgtctccggttgtaagaaaggttgccagtatcaagatactactagctcgaacgtgttggtgtgtgctgcggggggtttcgtgactgaggtgtccctgtcgtttctccagttcagctacacgacggatgccgcggctccactcgctggtgctggtcagtccagccaatgcttgcaggattgcggccgtgaatcacgcgcggcgtatcggcaatcaaaagactcgtactcctactctgccacgctgcccgcacgcgtacgcgatccacagcgcggtcggtggcctgagcagtgtaatcgtggatgggattcctccgtaacttggcgatgcaggattaggcgtgtctggtttatgcttcgtgctgcagcagcagcagcagcatcggtgcttcgtcagttcaacacaatgcctgacttgtgcaatgtccagagagcatatgagcagatccagtgctatgtcgtctagtccgtttggttctgcctgataccagattcaccacaatggcagctgaactcattccctgatggaaaccttttggttttggttctttaatttattggttttgctgttttggttcacattttgtatttgtttaattaaaaaccaaagtgagcttgtttttgtgatagttggaaggagagggttgatatgatataatgacatcgtgatggtttgttgagggcagaggacaaaaattgtggaaggactgaagaatatctgctgctttgtatatctgtctgtacattgcatctctggattctcatggacatgttaaatttagaagcttgtcatcaagaagtacttgtcatcattcccc

SEQ ID NO: 17473 - DNA, 186 bp, Oryza sativa
  Clone ID: PAT_MRT4530_23121C.1
cggacgcgtgggccgacaggctcccacgtagccggcgctccaccaactatggcttcggcaacctcagcaatggctgaaggatcaagggcatacaggcgtggccaattgagggcataaagaagttcgagaccctattgtacctgccaccactgaccgtggaggatcttttgaagcatatcgagttcc

SEQ ID NO: 17474 - DNA, 279 bp, Oryza sativa
  Clone ID: PAT_MRT4530_23122C.1
ttttggtgtttaggccttttgtttgccactagaacacggcgaagaatatataaaccaaagggatcaagaaaggagtagggcaaacaattgaagcacgatacctgaggcatgcgatgaaggggcctatcggcgactaaaacgccaagccaaattgggcttggaagtggttcgtaaaacagcgggtggggtgaccgggaatagatgtgtaagaggcacaaggctcgaaaaggcaagaaggggctgagggcagagcatggacgaggaccatggtatcgaaaa

SEQ ID NO: 17475 - DNA, 282 bp, Oryza sativa
  Clone ID: PAT_MRT4530_23123C.1
atggctcaaaatgtgccatcgaagggtgttaaaatacccattgattcttcttattggaatgactacaacactagagttgtgtgtgacatttttgctgatcaagtagctacaggtttgggattggatgatgcaaggaaagcagtcacaactattgctgcacgttggaaacaactaaaatcagacatagcaggttgtaccaaatttatgaaggtcggcttgcaaaatgaggagttacttgagaagatgtttgaagacattcacaataccgatgctaatcattga

SEQ ID NO: 17476 - DNA, 278 bp, Oryza sativa
  Clone ID: PAT_MRT4530_23124C.1
aactaaaaccaaatcgatgacgcggttgatacaaaaattaatatggacggatttacaagatagcaccctatgcttaagctgtacattacacagagccaaacagcgagatcactgcacggacaaccactgtgtgaacacgctcacgcaatattcaatcacatacacacagtactcacgcacataaaaaccacccatgggctttacgtacccccgtacacacacactcgttggtgcctagcacaatgatagatggctctcgagctgatgatgtcgaccat

SEQ ID NO: 17477 - DNA, 346 bp, Oryza sativa
  Clone ID: PAT_MRT4530_23125C.1
ccaaataaaaaaacgatgtttttttgggtgtaaaataggaagttcaagttagaaattgggttctataactcaaggtggggcacttaccgctatagacggtgcgagtaccatatatagcttaagactccttccccgatcttgtttggtaccgcttctctaccccagatcatgcatggagaggtcgaacgcgtggccagtgccattcagtccaaaaacttaagattacctggttagttggcctaaatccagaagccaggtctgttgattcgctttacacaggctctagagatatatatgcccttcagagtgtttcttgcctgatgatggaaagagaaaaccaagcaaa

SEQ ID NO: 17478 - DNA, 983 bp, Oryza sativa
  Clone ID: PAT_MRT4530_23126C.1
ccggccgggccccatccctcctcttcctttgccctgccctgccctagcgccgccgccgcttttccttccctccccggcttctcttcgccggcgacgacgatgcggtgcggtgtctccggctcagattctcaagaattctcgagctctccatgtcaagtagagggagtggacggtgcggtctgttccccgaaaccctagccaccactattcccccacccttctctcgctctctcccctgacctttgcgacggcgcagcctcgacctcgacttgccctcctcttctcaacgccgccgccgccagccttcctcgcatgccctcctctgacctaccccatatcctggagctctccctaccaatgctcccttctctctctctctctctctctctctctctctctctctttctcccctcagttgagctagctccggggaatgtggtgatggagatcaatggtgagggggatcaatccgctagcccggtgcttgatttggtggataggcgcactcaatcttgaatccggtggtgttgtgctcagctcgggcatgagggggttgatccagaactgtggattgaactcaagatggtgatggtgaggcaagagctccacggtggggtggcatctcttgctcaagcttaaggatccgccgttgtgcgcgccatcatcactattcatcggttctacatctaggcggtaggtcagattgaaaccacatgccgtcgcatagaaaaacttcatttgcagttgggatgccgtcctcacttccggtgagtcaaagcatcaatctctttctctgtagacttgcctcatgtatagctggcatgcatcttctttttcctgcttccctgggttccctgctcacactgtgattctaacatcccaatctgaacaggcaaactgtcaaacttcgttttttttttcatgtatcattcttctattcacaatgataaacattgatagcctatcaaatttctttatcataa

SEQ ID NO: 17479 - DNA, 138 bp, Oryza sativa
  Clone ID: PAT_MRT4530_23127C.1
acagtgagaactgggaagacttcaagtatcagacagtgagaactgggaagactgaagagatcagtggattatacaaattgtcaaagagcgagggcacgtggagtgcacggcgcggcgccgaaatatataattctgaag

SEQ ID NO: 17480 - DNA, 2904 bp, Oryza sativa
  Clone ID: PAT_MRT4530_23128C.1
atggcggcatccccggcccctcccggccccaccttcctccgcgaggtcgagctccgcctcctccgctgcacgctcccctccccggccaccctgcctcccccgccctcgcctccccctcgccacccgctcgccccggtcgccgcctccgccgtcgccgccgtcgacgccggcgactacgcggccgccctcgcctccgccgccccgcacctcctccctcccaccgcccccgccgcgccggggtccgcggcgcggttctacggcgacctcgccgccgccgccgaggggttcctgcgcggggacgacggcggggcggcggcggctggcgaggggttcgagtgcaggtgcgccgtcgttctgtcggcggcggtggccgcgattctcgcgttcacgcagcagaacgtgacggggcctccagggaagtattcccctttccctttctggacttcatcattggatgaaggatgttatagtaatcttgaagatgaatgggatgcatgggcttctgctcagttagcttctattggttcccatgttcatgggaaattctcacttatgcagtgtaatggatggttcaatcgagttaaacatagtggtttcatggttttctgcatattgagaatcattatgttcattgtctttgcagaacttatgttaacttctataaagagtctggaccccacagattgttgtagtgtgtcatggtggttgtgtagattatctatggtccgacagaacattgtagacgagttatcatccactttgtttgatcaagtacaagagtacaagaataagacattggcccactttggtgaacttgaaaatgtttttagctactggggtcctttgttgtgtgatggagaaggctcatattttgtctcagctgctttcttagaagctggaattgcggaatataaatatggcagaattgatcaatcaagctacatgattttaatcgtgtgtcacatgcatgggctagagatgggagaacttaactttggaagacagccggacgaggtggatgcaaagtcccaaatggtacttgttgcaaacacaagtggaccagcatctggtgagggacaagtaacagaactcacaggaactcaggatgatgctgctgctttaaaaaatgcaaggagttccgttcctggtgaaagtgatgaattttgtgatatactaagaatgccaaggctggttgaaaatgataatgattcgggtaatgacgagaagaaagatccaagcaaaaaggcagtactgacggctatgcaacaagctgctgtcctagcagaatgtttgcatgtgagccgaaggagtcggcatgatgaaatgtctgggtgggagatggcaccgttcatagagtcaattgattctcaggaggattcctactttgtggtcaggagcttgtgtgatattctgcgtattagatgggagtccacccgcaatcggactaagcagagggcgctattgatgatggaaaatatggttgaagatgttggcaatgatttccctgtggctgcacagagagccaaactggtttttggagttcagatgccaactatccctgcattaagaaaagaatatggtgagcttttgataagctgtggtatagttggagaagcactggatatttttaaagaccttgaattgtgggataatttaatctactgctatcgattattaggtaaagttgctgatgccactagtctaataaatgctcgaatctctgttacacccaatgacccgagattatggtgttcacttggcgatgttactaacaatgatgatcattacaaaaaagcattggaagtctcaaataacaaatctgctcgagctctgcgttcactggctcgcagtgcttacaacaggaatgatttccatgcatccaaaatgctctgggaatctgcattggcgttgaattctttgtttccagatggctggtttgcatacggtacagtggcatggaagacttttagttgcaaacatttttttaaagacctttcctctttcacttccttccactctgcttccacttggatggttattggatatttggatgctgtaaaaattgataaagatcttgagaaagctgtggacgcttttactcgttctgtgcagatagatcctgaaaatggagaagcatggaacaacatagcctgccttttactatccaggcacatgattagaggaaggagccaagcagcagtccaagcattcaaagaagctgtaaagttcaagaggaatagttgggaggtttgggataattacagtaaggttcttttggacacaggaagtattcaacagacactagaggctgtcaaaatggtactaaacctatcctcgaacaaacgtttcaacattgatttgttggaaaaggtgatggccatgcttgaagaacaacctacacatctctctgatactcaagaagctgaatcttccagaagcacctcagatgatgcaaatcaagagaccaggaagtacaaccagttgttagatataattggtgatatccttcagcagattgtacgaagtgggggtagcaattcggagatatggggtttatatgcgaggtggcataagacgaagggtaaccttatcgcatgctctgaagctatgttgaagcaagttcggtctctccagggttctggactatggcatgaccagacgaagttcactaagtatgctcaagcttccctgcagctttgcaagatctatatggaaatttcttcttcgactggaagccaaagagagttattttcagctgagatgcaccttaaaagctccttaaaacagcatgccttatggtgtccactgtggcatactctgatacccaagccctgtcttgtttttctgtcaccttggtctgcctactttgagtttgagaaagataaccgagggcacgtagcatag

SEQ ID NO: 17481 - DNA, 1628 bp, Oryza sativa
  Clone ID: PAT_MRT4530_23129C.1
atgacttcagtcatttttgttggacatatcctcttcgtcataagtctgatgttcatcaacacattgtggactttgttgcatatgcacacgcacagtttggtcgccatctgaaattcatacaggccgacaatggcactgagttcgtcaaccgtagcaccacatcctttcttgctagccgcggctgcctgctctgcctctcctgcccatacacgtccccgcaaaatggcaaagccgagcgtgtgcttcgcatcatcaacaattctatccgcactcttctccttcaggaagtgactactcgcaccatggtcgctctatccatcacaggtgtcgagcaaccgcggctctccctgccccgcgccacagatgacccggtgcggtcgtctttggtggccgctccctcggatgaggtcgagcagctgcttattccctaccagcacaaggctcgttgggtggtccgcggcaactcccaacaacatggcatcgactacgacgagaccttcagccccgtcgtcaagccgtccacgatccaagtcgtcctcagcatcgcgacctcatgtttatggcctatccaccagctcgatgtcaagaacgccttccttcatggcacgttggacgagacgatgtactgccagcagccatccagcttcgtcaacctggccacgcccgacgtcgtctgtctactccagcgttcgctctacggcttgaagcaggatccttgtgcatggtaccagcggttcgccacctacatccgtctgctcagattcgtcgccttgatgtccgacacgtctctctttgtctacaaggatcaagaccatatcgcctacctcctgcactacgtcgatgacatcatcctcatggcttcctctatggatctactgcgcctcatcaccacttggctgcactccgagtttgccatgaccaacctcgtcgacttgcacttcttcctcggcatctccccccacctcgccttggtcaagcgcattctacgctacgtcaaaggctctctccccgccggactccacatcggcaccggttttgtcaagtctctaacggcttactctgatgccgattgggctggctgtcccgactcctggcgctccacctccggctactacgtcttcctcggcgacaatctgatttcttggtcttccaagcgtcagacgactgtctcctattctagtgcggaggccaagtaccgcgctgttgctcacgccatcaccgaatgctgctggctgcgacaacttttccaggagcttcatgcccccatcgtctctgcgatcgttgtttactgcgacaacgtcagctctatctatatgacggccaatccggtgcatcaccgttgtacgaagcacaacgagatcaacattcactttgttcgggagaaggtggctctcggacaggtccatgtgctccatgtaccgtcgtcccatcagttcgccaatatcattaccaagggactgcctatgcagttgttcactgatttcaggtccagtctttgcgttcgtgagagggtgggagggattcaagacacaagcctctcacggtgcgaagaaagtgaaaaatgcaatatagccggagcagattgcagttgcaacaaccttggaaaaatatggggagttgaggactaa

SEQ ID NO: 17482 - DNA, 4035 bp, Oryza sativa
  Clone ID: PAT_MRT4530_2312C.1
atggccgaacgggcagtggcgcacagcctctctccgaacgctagcggtgacgacggggagcagaacccgcgccgtcgggctcgcaccccaccatccccctctcgccgaaatcttgggcggggggaggcgctcaggaaggtcggagcaacgcctaggcgccggcgggcggtcctccgccaccgaggcctctggcgctgccgccgccggctccatgtcgtcgaggcggagggcgcggcgagcggcggccgttacccgccgttcgtccgccattccctcgtcaacgcctccgacccaagaagatgtgcgtggggggccggatgcccgcctcgatatcgagcgccggcgcgacgctcgtcgcgccgcccacgcaacggagggcgcttcctcgtccggagcgccacttcggtccgggcacgggggccggcccccgtgtccccggttggcggtgccggctatcgagcctttgtggcgagccttcggaacgtccgttggcccccaaggttccggcccaccatcaccgaaaaatacgacggaagcgtcaaccccgccgagtttctccagatctacacgatcgggatcgaggccgccgggggtgacgacagggtcatggcgaatttcttccccatgaccctgaagggtcaggcgcggggttggctaatgaacttgccacccgcgtcggtccactcttgggaggatttgtgccagcagttcaccacgaacttccagggcacatatctgtgcccaggcgaagaagcggacttgcatgcggggggcgtgcggcacaaccgcatgctcgagaagatcgcctccaaggagccccagaccaccgcgcagctttttgagctcgcggaccgtgtggctcgcaaggaggaggcctggacctggaactcctccggttctggtgtggcagctccggccgcccccgggtccgccgctcggtcaggacgtcgggacaggaggaggaagaaggggtcggcccgttccgacgacgagggtcatgtcctcgccgtcgagggcgcttcgcgggccccccgaaaggggaggcctgcgagcgacaaaaagaaggaggccggcgctcccggcagggagcgcccgactggcaagtggtgtaccgtgcacaacaccgccctccatgacctcgcggactgccgcgcggtcaaaagtttggctgagcggacgaggaagtgggaggaggagaagaggcaggagcgccgtgagggcaagaccccggcggctcccgccggcaaccggcgaggtgaggccaagcagaaggccaccgctgaggacatcgacgatggcgacgatgacctggggttccaggagcctgaggccaccgtcgccaccgtcgatgggggagcgtgcgctcacgcttctcgccggagcctcaaggccatgaagcgagagcttctggccgcggcccctacccatgaggcgacgcggcgggcgcggtggtcggaggttgccctcaccttcgaccagaccgaccacccgccacgggggtgcagccctcaacatcctttcccccgcggcatcgaggccaaccccgagaagatacgagctatagagcggatgcgcccccccagcaagcttagggatgtgcagtgcgtcaccggctgcgtggccgccctaagtcggttcatatcgaggctgggagagaaggcgctacccctatttaagctcctcaaacgctccgggccgtttacctggacggaggaggctgagcgggtcttcactcagttgaaagcgtacctcagttctcccccagtcctggtcgccccggagccagatgagccgttgctactctacctggcggcaaccccgcaggtggtcagcgcggcgttggtcgtggagcgcgacgaggacaaccctcactccgcgcgtccccaccctgtgtcgactcgacccgggagagagcagggaggagaggcccccgaaccgaacggcggcccgaggcccccgacggccggagctggccctccgcctgcttgtccgacggtgccaggtgcccccgacccccagaatggcctcggggccactgcgggaaggccgcgcctgtcaccctctgaccccgaggtcgtcggcacaaaagccgagtgcgccccgcgtggcctctcggacgaagagcgccctagagatgcggcccctggcgaagaggatcggccccgccgaaaggtgcagcggcccgtctacttcgttagcgaggccctccgggacgccaagacccgataccctcaggcccagaagatgctttacgctattctgatggcttcgaggaagttgcgccattatttccaggcgcatcgggtcacggtggttacgtcttaccccctcggccaaatcttgcataaccgagagggtactggacgggtggtgagatgggcaatcgaactctctgaattcgatttgcgctttgaaccacgccacgcgatcaagagccaggccctcgctgactttgtggcggagtggaccccagctcccgagcccgtctccgcccccgaggctagttcgggcccctcgcagcggcctcacaccgtctactgggtgatgcagttcgacggctccctgtctcttcagggcgccggtgcgggggtcacgttgacctcgccgagcggagacgtcctcagatacctggtccgcctcgattttcgggcgaccaacaatatggcagagtacgagggactccttgcgggactcagagtggcagctggactggggatccgccgcctcctggtgttaggcgactcccagttagtcattaaccaggtctgtaaggagtaccagtgctctgacccgcagatggacgcttacgtgcgccaggcgtacctcgcagataagactctacccgaggaccgcgaagggagtgaacgcgtccggcgcatctccaagcgctacgtgctggtggaagggaccctctatcggcgcgcggctgacggagtcctcctgaagtgcattcctcgggaacaaggcgtcgagcttctcgccgatgtccatgaaggcgagtgcggagcctactccgcctcacgcaccttggttggcaaggcctttcgtcagggtttctattggctgacggctcttaacgacgcggtcgacctggtccggcggtgcagggcgtgccagttccacgccaggcaaacccatcagccggcccaggccctgcagaccatacctctttcgtggccgtttgctgtctgggggctcgatatcctgggtccgttcaggcgggccccgggcgggttcgagtatctgtatgtcgctgtcgacaagttcactaagtggcccgaggcttatccggtcatcaagatcgataagcactccgcgcttaaattcatcagaggcatcactgctcggtttggggtgcctaaccgtatcattacggataacggcacccagttcactagtgagctcttcggtgactactgcgaagacatgggcatcaagctctgcttcgcctcccccgcccaccccagaagcaatggccaagtggagcgcgccaacgcggaaatcctcaagggcctcaaaaccaagaccttcaacatcctcaagaagcacggcgactcgtggatcgaggagctgccagcggtgctctgggcgaaccgaaccacgccaagccgagcaaccggggaaacgcctttcttcctcgtctacggcgcggaggcggtcctcccatctgagctcaccctgaggtcccctcgggtcaccatgtattgcgaggctgatcaagatcagcttcgccgagacgacctcgactatttggaagagcgaaggcggcgcgcggccctccgagccgcgcgctaccagcagagcctgcggcgctaccatcagcgccacgtccgggcccgatcactctgcgtcgacgacctcgtcctacgccgggtccaaacgcgtgctggactgagcaagctctcaccaatgtgggagggtccgtatcgagtgatcggcgtcccccggccgggctccgttcggctggccacgggcgacggcacagagctgcctaacccgtggaacatcgaacaccttcatcgcttctacccctag

SEQ ID NO: 17483 - DNA, 238 bp, Oryza sativa
  Clone ID: PAT_MRT4530_23130C.1
acatcgtcggtggtagtcgcacggggtcacacgtacccagtgtcggtgtcacaaagggtatcgtggggcgtcaaagcacgcaccaaacagcggggcaagcacaccagccagggggggaggcagggcaccacggtcaggacgtcagtacgtcaccgggggtcgtaggggagtgtaagcgtaaagtaaacaaaggtaaggtaaggtaaggtaaggtaaggaaaaaaaaaaaaaaaaaaaa

SEQ ID NO: 17484 - DNA, 431 bp, Oryza sativa
  Clone ID: PAT_MRT4530_23131C.1
attatcagcgaatttcgagagtaaaatcacggtcatactagtacatataaatgttgatagtactaatttgggcacatgccatacaaagtttaataatattattatgcgtacccatggggcatgatgcatgcatcaagctagctagcttttgggaagtaggtccttgtgtccgataaagacataaagttcagtccccgcccaaagtacacaccttgaaaatacttcagcatgttgtgcgtataatatggtggtgaccaccaaattgttgcttgctccagcatgtgttgcattgtctgcactttattggcactctagagagagccagacagcacgtagtaggatgcaataacacacatgcatgtgttcaagtagtacttgcagttgcatacttgcatgtgttcaagtagtacttccagttgcagttgcatact

SEQ ID NO: 17485 - DNA, 570 bp, Oryza sativa
  Clone ID: PAT_MRT4530_23132C.1
aaaaaggaaaaattttatcattggacgggggtttcccccctagggggaagcaaaaaaagcttttggttcatgggccaacaaaaaaatttggggcctcccccccggcggaaaacccgggtggatcttacgggaagctgggcttgatggggggtccctccctccctccaaaaccccccctggggcttggggggggaacgataccccccagacaaaaaacccccccccaccaaccccagggggggggggaatttaaggcccaaaggagtggtttctcccaagaagaaaaagaagaggccttttggttataaagagccccgggggccccccgaaaaaaaaaaatgaagggccccgggggccaggtggggggggcctggtggtttgggggggaaaggtgcccctattgggaaaggggcgaaaaaagcccccccccttcttggagccccaggcggggggctttccctttcccggggggggggccggggcaaaaaggggttttctggggcccccccggccgggttttccgggcccccgggggcaaggggggtgccccccggttcccggggggggggc

SEQ ID NO: 17486 - DNA, 237 bp, Oryza sativa
  unsure (1)..(237): unsure at all n locations
  Clone ID: PAT_MRT4530_23133C.1
attcaaaacattcaaaatatactgcttacattatatatccaggctgctggcctgaaaccaagttgcaggaaacaagagaattctaatgcatgccttgaaacgtttgaaactagagtgtttcatcacaaaaggaaagaagaagaaaccagagattcagaacattcagcatacattattgctactaagctaattgcatttttgcgncgaggaattaagaccggaagtgaattacatgag

SEQ ID NO: 17487 - DNA, 3685 bp, Oryza sativa
  Clone ID: PAT_MRT4530_23134C.1
atggcttattgtgccaatgcactgaggctggataaattctccggtatacactttaagggatggtagaacagggtcactctatggttgacggcgatgaaatgcttctgggttagtaatggcaaatctaaaggaattctcattgctgaaaagcagaaaaaattcataaatgatagaattggatgcattgttagcgttcttggcaatcgtctagtcgaggtgtatatgcacatgattgacactaaggagttataggatgcactgaataccaaattcgatgctactgatgctagcaatgatctgtatgtcatggagcagtttcaagactacaagatgattgataaccattctgtagttgagcagactcacgaaacacatacaaaggctaaggaactcgaactccttaagtgtgtcttacccgacaaatttgtggtcgggtgcattattgcgaaactaccttcattttggaaaaatttcaatattgcacttaaaacacacgagacatgaatactatgttgaggggttaatagcatctcttgatgttgaggagaaaactcgggaaaaagacatcgcgtctaaggagaacttgctttgtgtgtggcttgcctggtcatctggccaagaattgtccacaacgcaaggggatgaaggcacctgcagggtagtcttctaagtcttccaatgtgaccattggaaacactggagatgaaagcgggtatggtaatttacctactatttttttctgttaatcagtctactaactggtgggtagatacaggggccaatgtacatgtttgtgctgacatctcactattttgttcttatcaggtcgcacgggattccaccgtcctaatggagaataggtcacatgcttcagttcatgtattgacacggtagatctgaagtttacttcaggaaagatcgtgcaactgaagaacatgcagcatgtccctactatcgacaaaaatcttgttagtgtctcccatctatgtagagatggatttaagttggtgtttgaatctaataaagtagtcgtgtctaaacatggatattttattggtaaaggctatgagtgtggataatgaggctaatgtttggcactcacatttatgtcacattttattgggcttgatgtctcggctttacagtatgtgtttaattcataagttctccattgttaaaggttctaagtgtcataattgtgtgcaatcaaagcaacctcgcaagccttacaaggcagccggggagagaaacttggcacctctggaactcctacgtttagatctttgtgaaatggatggggtcttgagaagggagaaaaacgatatttcatgacgttgattgatgaagctacttgattttgctatgtgtatttgttgaaaacgaaagatgatggtccagactattttaaaatctataaggcagaaattgaaaaccaacttgacagaaagataaaaagatttaggtctgatcgtagtggagagtttttctcaaacgagtttgacttattctgtgagaaacatggcatcatacatgagaggacgcctccctgttcacactgactgacatggtgaatgccatgttggatactgtgggactacaggcatggtggggggaggcattgttgacctcgaatcatgtcttaaatagggttcctaatagaaataaggacaaaacaccatatgagcaatggatcgagagaaaaccatcactttcttacttgtgcacatgggggttcttggtgaatgtcaatgtaccaataacgaagaagtgcaaacttggaactaatactgtggaccgtgtctttctaggatatgctcattacagcattgcctatagatttttaatagttaaatcggaggtacctcacatgtatgttggtacaattatggagactcatgacgctaccttctttgaaagcttttttccaataaaggatacacacagtacttctagccaatcctgtgaaataattctcagttcaatcacaccaccaggacaaactgaacatacacatgaatatatcactgaggaggatgactgaggaggatgacagtgagactccttggagaagtaagaaacaaaggactactaagtcttttagtcatgatttcactgtgtacctcgtagatgacactcctaagtcaattttagaagcatacgcatctcctggtgctgactactagaaggaggctatccatagtgaaatggattccattattgctaacaggattttggaggtgacagagtgaccctatgggtgtaaacatgtgggatgcaagggggtgttcaagaaaaagctttggcctaatggtactattgaaaagtacaaggatcagcttgttgcaaagggctatactcagaaagaaggcgaagatttcttcgacacttactcacctgttggtagattgaccacaattcatgtactacttccctagctgcctcacatggtcttctcattcatcaaatggacgttaagacagcttttcttaatgtagagctggatgagatctatatggatcaaccttatgggtttatagttgaaggtatagaaggcaaggtgtgcaaactacgtagatcctcataccaacggaccccaataccctctatatccggtctacgggtatcccccgtcgacagatatctgtaggctttgcagtcaatgatgcaaaaaaatatgtgtactatcaccatggagggggtgagggagttattatatgcttgtatgttgatgacatactaatattttggacaaatcttgagttgattaatgatgttaaatcattcttatctcaaaattttgatatgaaagatttgggagtagctgctgttatcctaaacattaagctaattagaggtgaggatgggattacactcttacagtcccattatgtggagaagatcttgagtcactttggctactaatagcaagccttctccaacaccttatgatcctagcttgttgcttcgcaagaagaagagaattgctaggaatcaattggaatactcccaaattattggctcacttatgtacctacctaccacaactaggactgacatctcctttgctgtgagcaagttgagccggtttatctctaacctgggagatgatcactggcgtgcgcttgagtgagtgatgcactgtctaaaaggtactatggaattggggcttcactgtgctaggtatcctgcgttactagaggaatatagtggttttaattggatctctgatgtggatgagatcaaaaccactagtggatatgtcttcacatcaggtggtggtgctgtttcatgaaggtcttgcaaactgactattttgatgaggtcatccatagaagcagagctgatggcagaagatactgctattgttgaggcggaatggctgcgtgttctgttgatggatctgtctatggttgaaaaactgaaatgtgaaaagacaattgaactttgtcaggagattgagaaactccgaagttataccattggattacatccaaacagcaagcaacctggtagatccttcacgaagggactatcacgaaatgtgatagacaatgcatagaaggagatggtttgagaccatgtagcattcttgaaagaactcacatttgtgagcttgactgttggtcgcagtctatggagattttgggtgaatcttctaggaagcttaataagagaccaaggagta

SEQ ID NO: 17488 - DNA, 172 bp, Oryza sativa
  Clone ID: PAT_MRT4530_23135C.1
atcatcaaagaggaattgaataaaacttataattttctgtgtcgaacacattgtttccactctccaatcatgtgttcgacacagaaaattataagttttatcatcaaagaggaattggataaaacggacgcgtggcggacgcgtgggcggcctcgcgggcggactcctggtc

SEQ ID NO: 17489 - DNA, 288 bp, Oryza sativa
  Clone ID: PAT_MRT4530_23136C.1
tggggttttttaattttgggggttaatttttttcaaaacccccttattcgaacatagtcccctgtattatccaaagaatccacaccttgcagcgcatgggaaataaaaacttttacacattgacaaaagcaatggtatattttacccggtttataactttggaccataggcacaaagaatgttttggacggggtctattgagccatggtggatccaatacaaattccggatgctttgggaccattttcgattgttttactaaagaccgaggtgttttatttgggtccc

SEQ ID NO: 17490 - DNA, 927 bp, Oryza sativa
  Clone ID: PAT_MRT4530_23137C.1
cagaactgagacaaaaggacatgagaatctccagatcttctcctcagcagaagcagtttacccacgaccacgaagaacaatagccaggatcaaccacctgctttgttcaaccaaaaaattcagaaattttagtgtgaagtttgttgcgtcaaaatattgagagaaaaaatatgttctataggaccatatgtagtgagcaattcagagaaaatcaatcgatttgctttgttgagccacgaaatttcagagaactgctattgaatcgagcttcttaaatttttaatctatcagaaatatcaaagaacctgatgatgatggtattggcagtgttccgaacattgcacacacaaacttcttaaattttaatctatcataaatatcaaagaacctgatgatggtggtattggcggtgttccgaacattgcacacacaaatatatcactgaaccaatgaaatacagatgggagcagttttttgaacatacatattgcataaaccatttcacgactgaacacataaaaattctgatgagagcatcaaaattaggtgcttcatgcattgcaaaaacaacagcctggcaacaggactattcacgcatgatgctgatccagcaaaagcggcattcacgaaaaaatcaattagaaaagcctgctaacctatcaattacagaaaccagtggatgtatagaagcctgaaaaattcagaatctcagtggatgttagtgttacacaaaccaaatccagatcacatataaaaaatgaaccagcaagaagtttgataggattatagttgaaagtctcatgaattctctgatatctaaatgctgccctacagtgtttcgtgacatcaacaggaaaaaaaaagtaatcatacattcagattcactacatactagtacaaatcagcatctctcgacctgcagcccgg

SEQ ID NO: 17491 - DNA, 2192 bp, Oryza sativa
  Clone ID: PAT_MRT4530_23138C.1
cggacggggcttcgaaataagtagttcgtagttcgggttgacggagcctaggaattacaccatgtaagctgaagtttccgtgtactcgccatgaactgtaatcttccacttgatttcgttgggttcggtggggtgagttccaccaattgtactgcagtccataggttgaatagttggtctatgagaagtaccgtcatgccttgggtgattgggagatcaagatcttggagccagtagttattggttacaacttctttttagaatgtggtttttttctctttgaaatgttgtacacccctgagaataaatcctttggcaattgtccctttagccaactaaatcccataaacttaatggaggccccgtcacctactgtgatacttgtagctgccacggagaggattttctctgtttcatcgcatggcatctccattccaacccatgttttgctttccattcgagccacaaccatcatatccatagtactcttgcgaatttttccagattgagaatcctaaggcccctgttggtcattggggagaacatctttgtccaattaactttgcactttccccccattaggtgtcttggtcatgcccaaatgaaaaatgacttccaggcactccttgctcgcctttagcactatgaggaggtagactggttgtgaagtgagaaccgatttgacaagggtagatcgcccagccatgcccagattcttccccctccatcagaccatccatattgctaatttgtcgaagagaagttggaggtgttaagagaggtaggcccaagtatctcattgggaaagaagccctcgtgatctttgagtaattcatcaatggccagtttctcgcatctgattgccgcgacctacgatttttgaatgtttgtgcatagtccagtttcatccccaaattttgtcaagagctccgtgaagactaggatgtcttccctttgggagttgatgattgcaacatcatcagcatacatggagaatcgtagacgtattgctcttcccttgagcttattactgatcattcccatatctgtaggcatggagagtaaactatgtagaggattaattgctaagataaagagcaagggagaaagcaggtcgccttgcctcggaccattaccgtgttgtatttgttcacctaggataccatttaggaggacttcagagtaggaggattttaggatggtgactatccagtttatccaccactatgggaacctcgttggtgtagaaggctgagcagtgggtaattccaacgtaccgagtcaaaagctttggaaatgtcgagtttgaagagcagcgaggagcttatgttgcgatgctaacacctaacacctaattaagttccggacatagaggatattatcttggatgctccttccgcttataaaagcactcttattcaccgagattaacaaatgcgtaaggcatcggagatgcagtgctaatagcttcaagtggatcttggcgaagctatgtatctggcttatcggtctagaattcataatcttgtcgacccccacttttttgggatgagaactacattcgccgagttgaggaggttgaggtgcccgcagttcatacatggagttgaaagccgccactatgtccttgattatgtcctaggaactcttgtagaagttgatcatgaaaccgcctagccctagcatcttatctataggtaatttgcttaatagctttgcgtatctcctcttatgtgaagggtttggcaaggtagcgcaactccattggaccgattcccaaagcttgccaactaagctcacgttctcttggggccagcctccccataatcgatgtgaaatggtcattgattagatgcactttttcatcatgcattgttgcctaaccatttcgtttggacagttgatgtctatggtttttccttcggcgtgcatttgcttttagtttgaagaacctggaatttgcatcgccttcatgaatcgttgttacacgggaagcttgtctttttctttggtaatttgatgttagctagtccgagcactcgacactttagagccgttctcagtcgtctctctgcttgagaaagacatctacattccttggccatctcaagctgctttattatctcaagtgccatgtggaattttagctttgcctctcagcatgtggttttggctcacgatttaagggcttt

SEQ ID NO: 17492 - DNA, 1686 bp, Oryza sativa
  Clone ID: PAT_MRT4530_23139C.1
atgcagttgtcatgctctgggcatgatacaatcctggatcaccctgtcttaggctcctgcaaagtgaccgcaatatattacaggtaccgtgtcataaatgccatcctccttgtggaatcatcatcaaattgcccacttcagaagctcgcttcaacaaatgtatcaactgccgtgtacgaacctcaaaagaaagatggtgcaaccatagtagggtgttcaaaagattccatagcaacaaatcaagatggtattgttggcccaagatcttgcctcaacctaagtagtcatggaagccagttatggtatttggtgcctcctcgaacatacatgtctgctcttccaccggactgcacagtggttgcgaaaggcatcccaataccctacaattatgatagaaatggtccaaatgaaaatcaatacctcgacatctcaaacttaaaagaaaaggcaaataaagtcatcaactttggtgaaacagcatttacttggcaccttaacaagattaccaatgcttgtcaggggtgtgagtggaatggtcatcactgcggatttagttcacaaaggggccaggcattctgccagcatcaaggttcacaagtcatcctcattgcagctacatcctcagcagccacactagttgttcttttgctgatggtgggcacaacaatctatctttcactaaagacaagatataatgaagagatacatttgaaggtcgaaatgtttctcaagacatatggcacatcgaaacccacaaggtatagtttctctgaagttaagaagattacaagacggttcagggaaaagataggccacggtgggtatggaaatgtatacaagggtgagctaccaaatggagtgcccgtggcagttaagatgctagaaaattccagaggcgacgggcaggaattcatcaatgaagttgcaaccattggaagaatccaccatgccaatgtgcttcgtcttttgggtttttgctcagaaggaacaagacgcactttaatttatgaattcatgccaaacgactcattggagaaatacatattctcacaaggtcctaacgtgtcacgggaattcctagtgcctgacaagatgctagatatctctttaggcattgcccgaggaatggagtacctacatcaagggtgcaatcaacgcattctacatttcgatatcaagcctcagaacattttgctagattacagcttcaatccaaagatttcagattttggacttgcgaaactgtgtgcaagggatcaaagcattgtcacactgactgcagcaagaggcacaatgggctacattgcaccagaactgtattctcggaactttggggtgatatcttacaagtcagatgtatacagtttcggtatgttggttttagaaatggtgagtggaagaaggaatctggacccaggtattgataaccaacatgaagtttattttctagaatggatttatgagaaagtattcactgggcagaacttattgattggtacggaaatgacacaggatgaaaaatacaaagtgaggaaactggcaattgtggcactatggtgcattcagtggaaccccaaaaacaggccatcaacgacccaggtggttaacatgctaacaggaaggttgcaggatctgcagatgcctcctaaaccatttgtctcatctgcaagcgaatctataccataa

SEQ ID NO: 17493 - DNA, 551 bp, Oryza sativa
  Clone ID: PAT_MRT4530_2313C.1
gcgccccgccgcccgcgcacccacgcgtctctctccctctctctccgccgccgccgccgccgcagccagccagccatccagccatgtcgggttgggacgagggcgccgtcttctacagcgaccaggcgcagttcccgcgcggcggccccggcggcgacccctccgccgacctcacccgccactccgccctccgcaagttcaaggagttcctccgcggcttcaccggcccaaccggcgacttcccctaccgcgagagcctggtgcacaaccgcgaccatgtcaccgtcgccatcgaggacctcgacgccttcgacgccgagctgtccgacaagatccggaagtctcccgctgattacctaccgctgtttgagacggctgcgtccgaggtcctcgcgagccttcggtccaaggtcgctggagagaccggcgagatggaggagcccgccaccggcgacgtgcagatcttcttgtcctcaaaggagaactgcctgtccatgaggtctattggggcggattacatgttcaagctggggaagattggcgggatcaca

SEQ ID NO: 17494 - DNA, 500 bp, Oryza sativa
  Clone ID: PAT_MRT4530_23140C.1
aaaaaaacaagaaaggagaggagaaacccaagtgggaagacatatatgaatcactcaaagctgctaggcgagcaaggggtgaatgcttcaagtgtggggagaaatggggacctgggcacaaatgtccaaagtcagttcaattgcatgtgttagatgagttgcttgaagtattgatgttacaggatggaactgctgacatccagaaagaagaagaagaagataatgaataactggtagattctgggagctctagtaattttattgtagagagtttggttagcaaattgcagcttcccacagaaagaatgcctgcaagtcaaggtagtacattccaggatacactaaaagtgttgacaatatgaagggtccaacatgatcctaggaatggcattggttcgaggagtttaatccaatgtggatagaatgggagagaaagaaattgacgcttgttccaatggggaacaggatcattttgttaggactaaaacaggaaaataaat

SEQ ID NO: 17495 - DNA, 464 bp, Oryza sativa
  Clone ID: PAT_MRT4530_23141C.1
atggggatgcctagcgtgcaagccgcattgcgctgcctcctatcgcaaatctggccgcactgtgccaccgctaatcctgctataccctgtattggcgctgtctcctgccgctaatctcactgccaagaccgccacaaccatgtgcgaagatatatgtgaagggggctgaacacaaaagtgttgcttacgtggcatgacacattggcggtcaaacgtggtcaaaggacgattgaacgggggtggtacattaaaccaagttcacggacttaaatgtgcaatttttaagtttatggatctaagtgacaccacctcacaagtttaaggaccggccatatatttcgctcattatatattgttctcatattcacaaatatcttgatcagaaattgctgacaaccttctgtagaaaaattgtcattcctcctatttggaaatgttaaagcattcctcttacaacaaaaccc

SEQ ID NO: 17496 - DNA, 385 bp, Oryza sativa
  Clone ID: PAT_MRT4530_23142C.1
gctgtcttggtttttgcctccaagcagtaactcggggagcgaaaccaccgtcaagctaggtgaatatcaaccccacatgtgatgcggcaacgtctaggcatacgtatgagctggagagctacatccagggatagggcaaccacctggccgcactgtatccgaactagagttgccgctataagaggaacatcccgtggatattctaactgagcgaagtggagccattgataaatcttgcacatgacgattcatttactactctggattatgatgcacgattggcaatctaactgcagcctgactaatcaaaacttatcagtctgatgattactgcgacatgtctagtgagccatcctgatattcctttacatgcctatccccgtag

SEQ ID NO: 17497 - DNA, 2895 bp, Oryza sativa
  Clone ID: PAT_MRT4530_23143C.1
atgggggcagcggaagaagaagcagaggtgttgggcgagaaggtggtggagctcacaacaagtatcaacaacatcctcggatcgcttcaaggtctggagaaatggatcccatgcgtggattcaggaatccgggagctgaacaaggcggtggatgagattgcggtcagggtgacgcagctagaagcggtgacgccaacgacaccatcgcaggcggcacaagcgcccgtaggcacggcgtcgaatcgactcaccagggtgacgcatccgaagccttcaaggctaaggagcaaaccctggtcaagagccttacatcctgtggaaacttgggctgagctggttgtagctgttaatgggaaatttggaagggataaatatcagcaacacctagaagagttggagaatctaaaacagtgtgggagtgtggatgattattatgttaagtttgtggagttgatgcatagggtgttgttagtctacaatagaagctatgataaaaccctctttgttaccaaatttgtgaggggactgaaacctgaagtcaaaatagcaatcaaattgcataaacctagaactgttgatctggctctgtctttggctaaaacgcaggaggagttgctaggagaattgtcagcatcgaaggctcaacagaaagtgattgtgaaagaaggattcaaaggaggcatcaagccagcatatgttgccaagggaatattgggggcacatcctgaggaaaacaagaaaggagaggagaaacccaagtgggaagacatatatgaatcactcaaagctgctaggcgagcaaggggtgaatgcttcaagtgtggggagaaatggggacctgggcacaaatgtccaaagtcagttcaattgcatgtgttagatgagttgcttgaagtattgatgttacaggatggaactgctgacatccagaaagaagaagaagaagataatgaagaagagctaacactttcaaagtgtgcagctgctggaacaatgggaaagaaaacaattaggctgcaaggtatgattcagcatcaagaggtactgattctggtagattctgggagctctagtaattttattgtagagagtttggttagcaaattgcagcttcccacagaaagaatgcctgcaaattcagtgaccatagcagatggaggaaagatgacttgtgacaaatgtgttcaggtggaatggtggtgtcaaggtagtacattccaggataaactaaaagtgttgccaataggagggtacgacatgatcctaggaatggattggttagaggagtttagtccaatgtggatagattggaggagaaagaaattgagggaggagttggtggaagctgaggatgtcccagaccaaattaatgaggtgataacagaatttcaacatttgttcaaagagccaacagagttgccacctcatacgcagtttgaccatagaattcccttgctgccaaatgttaaaccagtgaatgtgaaggatgaaatagagaaacaagtagctcagatgttgcaccaaggcataatccagaccagtgtgagcccatttgcttcactagttcttttggtcaaaaagaaggatgggtcttggaggttttgcattgattacagggcacttaatgaagtaacagtgaagaacaaatatcccatgccagtagtggaagagttgttggatgaattggcaggagcccagtggttcacaaagcttgacctcagatcaggataccatcagataaggttggaagaatgtgatgagtttaaaactgctttcaaaactcatgtagggcactatgagttcagagtgatgcctttcggattgacaaatgcaccagccaccttccaaggattgatgaacacaatttttgcccatttgatcaaaaaaggggtgatggtgtttgtggatgacatcttgatttacagtcgaaccctacaagaacatgttaaatatcttgggcatgtgattggagcttctagagtggcaactgatccatcaaaaataaaagcagtccaagactggcctgttcctaaaactgtcaaacagttaagaggatttctgggattaactggatactataggaaatttatccaaggatatggggtgattaccagagacttgaccaccctacttaagaaggattggtattggggggcattcaggccaggcaggtcgactctagaggatccccaaagtctattcacttggtcaagcttacggaaggatgtccaccagtttgtgcagcaatgcgagacctgtcagagagcaaaagtggaacatggaagaactctagggttgttacaacctctgccagttcccctccaagcctggcacacagtgtgcatggattttattgaagggcttcctaagtcaggcaagtttgacacaatcctggtggaattattcagacttgctaatgtgaagcttaatatgagttcctcataccatcctcaaactgatggacaacctaagaggctgaatcagtgtatagaagccttcttgcgctgttcagttcatgcaactccaaacaaatggtcccaatggttgtctcaagcgcaacattggtacaatacagcttttcatactgcgttgggcaagtcaccatatgaagtgttgtttgctcaaaagccgacgcactttggggtggtggatcttggacagagtactgttccagatgtgcagacttggttggagcagagatcattgatgcaaggattgattcatcaacaactgttgtgggcccaacaacggatgattctagagaaggttgggaaggtggcttatcgcctggacttaccagtgagcagtctggtgcacccagttgttcatgtatcgctgcttaaacaggctgtgcaaccaggagttcagaggacgcgcagccggaagctatattga

SEQ ID NO: 17498 - DNA, 2643 bp, Oryza sativa
  Clone ID: PAT_MRT4530_23144C.1
atggaggaaaaaaagggaggaggacgcatacacacgcacgtgaggggagagggtaatattttttttttgacagaagagaggagggtaatattgggcccactagatgtcatccatacaccatcagggcactatgagttcagactgatgcctttcggattgacaaatgcaccagccaccttccaaggattgatgaacacaatttttgcccatttgatcagaaaaggggtgttggtgtttatggatgacatcttgatttatagtcgaaccctacaagaacatgttagtcagctgaggattgtgttagagattctagcaaggcatcaactgtttgtcaaaaagagtaagtgttcttttgccaaacaacatctggaatatcttgggcatgtgattggagcttctagagtggcaactgatccatcaaaaataaaagcagtccaagactggcctattcctaaaactgtcaaacagttaagaggatttctgggattaactggatactataggaaatttatccaaggatatggggtgattaccagagatttgaccaccttacttaagaaggatgctccagtgttagctctgccagatttttctcaacaatttgtggttcaaacagatgccagtgacatagggattggggttgtactaacgcaggctgggcatccaattgcatttatcagcaaggcactcagtaaaaggtctcagatgatgtcaacatatgaaaaggagtgtatggcaatactattagctgtggaaaaatggagggcatacctccagcatgcagagtttttaattctgactgaccataagagtttaagtcatttacgtaagcaaaggctgacaaggaccatgcagcataaggcctttgtcaagttgatggggtttcagtataaaattaagtacaaaaagggttcagacaatggggctgcagatgccttgtccaggagaagtaactcagatgagttgttggcagtctctatcagtgttccaaggtggttggagataatccaggaagagtaccaacaggatgctgataccaagaagcttctagccgcacttagcttacatccagaaggacaaggccaggctgcaacataccaacaaattataagtctgttcacttggtcaagcctacggaaggatgtccaccagtttgtgcagcaatgcgagacctgtcagagagcaaaagtagaacatggaagaactccggggttgttacaacctctaccggttcccctccaagcttggcacacagtgtgcatggattttattgaggggcttcctaagtcaggcaagtttgacacaatcctagtggtaattgaaaatttctctaaatttgccaaatttatacctctttctcacccattcactgctctgacggtggccaaagcgtttatcactaatgtttatgacatctttggaatgcctaaggtgatagtgagtgatcgtgatagaatcttcactagtgcattgtggcaggaattgttcagacttgctgatgtgaagcttaatatgagttcctcataccatcctcaaactgatggacagtctgagaggctgaatcagtgtatagaaaccttcttgcgctgttcagttcatgcaactccaaacaaatggtcccaatggttgtctcaagcgcagcattggtacaatacagcttttcatactgcattgggcaagtcaccgtatgaagtgttgtttgctcgaaagccgacgcactttggggtggtagatcttggacagagtactgttccggatgtgcaaacttggttggagcagagatcattgatgcaaggactgattcatcaacaactgttgcgggctcacctgccctatgtgcaactatcagtggccaatcgagcttgtcagaagttgagtttttgcttctttgggccgtacaagattctggagaaggttgggaaggtggcttatcgcctggacttaccggcgggcagtctggtgcacctagttgttcatgtatcgctgcttaaacaggctgtgcgaccaggagttcagcaccggcttggggacaagccgctctttaaggggagggaaattgtcatgacaactgtagttcatcaaggcttgtctgtatgggccagttatgggccaagaatgaggaggcgactgtctcgtctattcaaggggtccggctcttcatcaagtcatcacgacgggtctagcactcgttcatcagccgatgtctcgatgcaagacgccgaagctccgcgacgactcctgaatgacactgacctcgaccttgtcagtgatcgggagagacaagcctactacatgctgagcgaccgggagtatgctcacacgcgagaatactcaccggagttgctgaaaaagatagatagcaaaagggctaggggtcgttgtcgacgtttgatgtcgcaattctggtatttgtatagtatggggatcatcggtgctagggtatacgcgagactgagggacaatcaacttcctagatcaagtggtgtgcctccatttccaagtgaatggcgctcgacttcctctcgctgggacttgggtgaaatcactaggagaatggacacccttgatatgcagacgggggagatacagtacaaccacatggaacacatagctcaaacgcaaagaatggcaacaatctgctga

SEQ ID NO: 17499 - DNA, 546 bp, Oryza sativa
  unsure (1)..(546): unsure at all n locations
  Clone ID: PAT_MRT4530_23145C.1
aagaaggcaaatccaaccctaaccgagaggatgggggcagcggaagaagaagcataggtgttgggcgagaaggtggtggagctcacaacaagtatcaacaacatcctcggatcgcttcaaggtctggagaaatggatcccatgcgtggattcaggaatccgggagctgaacaaggcggtggatgagattgcggtcagggtgacgcagctagaagcggtgacgccaacgacaccatcgcaggcggcacaagcgcccgtaggcacggcgtcgaatcgactcaccagggtgacgcatccgaagccttcaaggctaaggagcaaaccctggtcaagagtaagccccaattccaccattcgcctgttaattttgagttgggagaaacatcagagaagggagtaggggggtccagctttagtgttagatccgccagccctagactgcctaagacagatttcccaaagtttgatggagataacccaaaactctgtaaaaccaacaggtaccgagctcggttggtacaaantgannctaccgtcaaagacgcgc

SEQ ID NO: 17500 - DNA, 464 bp, Oryza sativa
  Clone ID: PAT_MRT4530_23146C.1
gaacgcacaaaatcatatttagtactttatcaccagctattttgttttcaaaacatttcattattcattatttgttttgatcactatctcgttgcatgcaacacagcaaaggggtgatcctactagctatgaggcaagccagctaagcctagtactggccgggggaaaaaatgctgcactggtggggctaaacccggaaaatcgacgggaggtgccccgtatactgcctccccctggacaccctcacgggggtcatccccggttgttgctggttctccccataaaaccccttcttagaaaaccccttgctgaagtacccctgttcaaacaaagacccctggcgggcgtttttctccaaagaaaacaacaaacacccttgctccaggggcatggaaatgctttccttagagcttctaacacaccggcgggaggggggaaaggggccctcggggttaacgtcctga

SEQ ID NO: 17501 - DNA, 521 bp, Oryza sativa
  Clone ID: PAT_MRT4530_23147C.1
cttgatatatcctcattaatgtggacgctaggtgcgggtttgatttggtataggccaccttcttggagggggcagccgccgcgccaccctgggctcgacccccctcgggggtagccacgtgggtttgggggcggcccaaccccaagctgggagggggcagccgccgcaacaccccgggctcgatccccctcggggagaggcagcggcgtcggcaacgaggtggcggcggtttggagagagagagagaggtcgaggtcgagagagagaggaaggcggcggcggctctcaccatagagatgcggcggcggaggaggcggcgacgatgacgcttgcgagacgacggcgagatacgacggcggcgtcggcgcggggatgccctaggcagtggcggcgaaggagaagccgatcgagatcggggaaaaaacttctaagtgttggtggagaatacgagggtgcgcatcgggaatatatatactcctagttctttagtcccggttggtgagaacaaccgggactaaaga

SEQ ID NO: 17502 - DNA, 603 bp, Oryza sativa
  Clone ID: PAT_MRT4530_23148C.1
ttaactgaacaactggtgctgcgtgtgttgcagtacattctcgaggaagttgagaatgatgttttatatctgctaattgatggctcaggagatgtgtcttacaaggagctaatggctgttgtcttgtgatatattgtcaaatgtggaaatgttaaaaatatattagttggtttttttcatgtgaaagacaatttatctatgcacctcaagtctactattgacattttatttgcggagcataagttaagtctggggcaagtgagaatggtgcaaacaatatgagaggtgagttcaatggttttctctcaccaattatgagagaaaatacattggcatattatgtttcatttgccttgctcagcttcttgaattaatagttttggccattattgtaaagaagcatgtaaaaaggaattgaggaattctttgatatgatttacatatgttctattaaatgtgattggtggatcttccaagtgaagggatacggtttgattcatcaacatgtggcacataagcaatagaatacaacaatttataatagatacaagcacagtacttcttgcagtagtttcttgccggtctccttccccgacatggcat

SEQ ID NO: 17503 - DNA, 703 bp, Oryza sativa
  unsure (1)..(703): unsure at all n locations
  Clone ID: PAT_MRT4530_23149C.1
tttttttttttttttttttttgggacaccaatgggaagagtgaattgaatcattgaagtttgttctaacatgtgtggcgtgtttatacaagtattgtaggcacctgtttcgaagaaatacaacaacctgggtatggacagtgtttcaagggaagttttatcgaactatacactcatgttacagctaagctataggggtggaataaacagttgccttccggaagcaacaaaaatttactggcatccgcttggcaacatccaagtaagacatttggcttgtatacctgtaattcaaatcatcgtcaactatagattgtcccaatcggtcgaccgcaaaggaatgtactttgatcggtcggttgcgattcctctgaaccctgttgttcgtgaggagaccatcggcatcgcaagcaccgatgaagcgctgatggtctcctccccaaggccaagtgacatggagcaagccgactttgccttggacagtatgcgttttgcttttacttttactgaacttgtgaaggagttagtaccatcaacttctgtctcctccgtctgcatctttccaggcctgtttgcatcaattgcaggttcctgggtggcactaggaaccatctttggngtcaactttactgtcgtcgggtgncagtaaggagatgcctataaagacagatgtnatgccaatacaaacatcactatcctcaggg

SEQ ID NO: 17504 - DNA, 189 bp, Oryza sativa
  Clone ID: PAT_MRT4530_2314C.1
atgggtcatacctacctccactccgccggaagcagatgcaacgtgggagcacggttgtctaccgatgacgtgaccggcgtcagaccagagttagcacgccggctccggcttagagacgagttcctggaggctctcatcattccgacgggacagggcgaggcgtgtgacaggccgcctgttgccacctaa

SEQ ID NO: 17505 - DNA, 1107 bp, Oryza sativa
  Clone ID: PAT_MRT4530_23150C.1
atggcgcatttctattgtgttctggactgtgataatcctgaactgcttgatgagagtgctagctgtaataatgaacctggtagtctgccatttctgttaatagaaatgaacctggtaagctggtctttcctgctggaagtcctacaacgttttggcttcgaaacaagatggcacaattgggtctcaaatttgcttgcctcctcttcaaagattctcctcaatggttcaccaggagaggaaataaagcattgcagaggtttaagacaaggtgattacctttcacctctcctatttattcttgtcatggaaccgctgcaaagaatgattcgtaaagctgaagaattgtctattctcataccggtgtcaaacaaaatgagccgttttcgctgttctctttatgatgatgatgttgctatttttgtcaagccaacaaaacaagatctcgacatgttgtgccagattttaatttcatttgccagagcatacggtctgcacaccaacattaaaaagactgaaatattcccaatagcttgtgagggggtggatgttcaagatataacgcaagttctcctggggtcaataaaaactttcccctgcccctatttaggtttgacgctgcatacgtgcaaactgaggaaagtggacttcattcccttgattgacaaatttggtgcacgcttaccaggttggaaaggaaagtttttcacttcagaaaaccgtgaaactcttgttaaatcagttctcaccgtccttccaatatatcatatgataggaacccaaacacctaagttggttattaaacacattgatcgtttttgtagagcattcctttggaaaagagacgaccccgagaatatcagcgcaggaaacagcctagttaattggagcacagtttgcatgccgaaaaatttaggaggcctcggaagtgtagacctcaacaagttctctagagccattcgtcttcgcttttcttggttcagttggaaggaggaaaacaagccttggttgggctcagagttgccttgtgacaatgttgacaagagtcttttccaagttgctacagagatcgtgctaggagatggaaaaaaaagcgttgttttgggatga

SEQ ID NO: 17506 - DNA, 820 bp, Oryza sativa
  Clone ID: PAT_MRT4530_23151C.1
aggggcagttgtcaaggatagctgccagaccttcattcctgagattattagcaaaaagctgcagagaccgtagctcatgcatagttgcaatacctagggcttcctcgtccatctcgtattcattatcttcaaagctctcgccgacgttgtcgcgcccgtgtcaccgagctagcgctcttctccctcgccgacgttgtcgtgcccgtgttgccgacgctcggtgagctgacggagctgcgcttcccgcccgctcgctcgctcaaccgctctcgattggtgcccgccaccacgcctcccactgttgcccgcgcaagatccgccgcgccgccgccggatccgcgtgcgtggggtggagcaccggccagatccgtatgggaggaaggcagtggaggaggaggtggagacgtcgcgcctctggcccaccggctcccggccacctactcgtcggcggcggcgccgcccgaggttgccgagccgacaaagcccaccactgccgctcgctcgccgcccgctcacgaaccatcccaacctccgccagcgcgcgccatagcccgcctgcagaagcggcagcatcgctgttatgtcgtcgtcgtcgtcacgtggaagcagcggtgagccggcacagcaccgtgacgagggagagccagttctgcagcgctagggccacatccatccacgccgacgcacgggccacatccatccacgccgacgctagggccgcccacatcatcgtcgttgtcctcgtcaagcggccgccgacgcgggaggctctcgatcagcagcgccaagcgccagacggggtccacctcaccgtcggcgg

SEQ ID NO: 17507 - DNA, 1401 bp, Oryza sativa
  Clone ID: PAT_MRT4530_23152C.1
atggcgtcgctctctcgcgtgcctcctcccgcccgcggaagccgccgccggccgcccccgtccagccccgtccccctctccccgcggcaggagatgctcctcgaggcggcatccgacggcgacctcggcttcctcaagcgggtggtgaggtcgctggacggagggaggggccgccccgcggaggcggtggaggccgtgcgggagtgcggcgcgggcgcgctgcacctcgccgccggcgcggggaagctggcggtgtgcagagtccatctatatactaaatttgtgtttagcgcattgttaggaaagcaactgctacatcagtcccaattctcaaaaggaccttcatcgggaatggaggagatggaaggtgaaacacctctggcttatgcagtcaatggtgcaaatgtagctaccgtgaggtaccttcttgaccatggtgcccatccagaaaaagctgataataaaggattcacccctctccattttgctgctgaagaaggatattgcaatgtagtggagctcttgcttgctaaaggggctcaagttgattcgatgtctgttcgtggtacaccactacatctggctgctactaatggacaacatcgtgtagtgaagattttattggaccacaatgctgattgcaataagattgtatctgctgtctacactcctctcctcgtcgccatttatggttcatcactgaaatgtgtaaagctgctgattaaggctggtgctgatgtaaatggtgttggtaatataacccccttaatagcttctgttggctcaactgagatcatgaagtgcttattggaggccggtgctgatcctaatgtccctgatgaattcggcaggatgccaatagaatttgctgtgcgatgtggtacattgaaagatgtcaatatcctatttcctttgacatctcctatgccgactgtacctgattggagtgtcagaggaataatccgtcatgtgaacacactgccagggcaaaaggactatgagagtggccttgaaaaagaagtggctggtttgaaattacaaggagttgaggcactgaagaggcaggattatcttgctgcatcagacctatacactaaggcgctttgcctcgacttcaatgatgcaaccctgtattcaaacaggagcctctgctttcttcacatgggtgatggagacaaagcttatggggatgcctatacttgtaggatgatgcggcctgattggccaaaggcctgctatcgccaaggagcagctctaatgctgctgaaggaataccaaaaggcgtgtgatgctctcctcgatggtttcaaaatggacccagggaactctgagattgagaacgctctaagggaggcgatggagtccttgaagatatctgatggtgctaagctgacaacctga

SEQ ID NO: 17508 - DNA, 276 bp, Oryza sativa
  Clone ID: PAT_MRT4530_23153C.1
atggcagccgaaattcagattgggagcagattagcagctcctcagaaattcaagattcttcggccttcggagcaatgcgtcacagcgtcagtgagaaaagggtctgtgtcttatgacatgggcaacatccaggaatcaagtggtacacgggagaccgtggagaaaagggtcaggcttgcatatgaccctacaggaaatgtagaccatactgtactacctttggtaggggacaagcatggcctcgccgtccttgtcaaaaattttaaaaaaggataa

SEQ ID NO: 17509 - DNA, 2625 bp, Oryza sativa
  Clone ID: PAT_MRT4530_23154C.1
atggacgagcgcggcgcaggagatgaaccggtgctcctgcgtgaggtgcggcaagtgggcgaatcaaaccctgaagccggcgaagcaagccaagtgttggtagtaaccggttttatgttcaactctattggccatcatgctatgggtgaaagctcggattgcaatcttgagggtcataatgtagagttcagatcagattgtgagaaatttgaacaatttgctcaatcaaatataaaggctaccaatcagaatgctccttgcgagcaagtgccaaaggttggcatgacctttcaatctgaggatgatgcatacaatttctacaattcatatgctagaagagtgggctttagtgtaagaaagtgccattgggctttagtaaactttctgaaagcaatgtctggaaagcaacctgaaacaattttcacagatcagtgtgctgcaatggcaaaggcgattaggattgtattcctaagctcaagtcaccgtctttgcctatggcatatcactacagaaaagaatgaattggaagaaaatgatgagtgtccagtttgcaaggaatcaaggtggaaggaacataaagggaagatcaagcgagtaccccgaaaggttctgcggtactttcctttgataccaagattacaacgattattcatgaataaggaaatagcttcagatttgcgatatcatagtgataagcgcgtagttgaagaaaatgtgttgaggcatccatccgatggtgaagcttggaaagacttggataaaaggtacccatggcttgcacaagaacctcaccatttgcgcttaggacttgctacagatggcttcaacccatttggaactatgagtagctcttatagtgtatggcctgttattatagttgtgtataacttaccgccatggaaaagtatgaaggaaccattcatgttgatgcctttattgatacctgggaagaaaacacctggaagagatattgatgtttacttgaggccactagttgaagaattgaagctattgtttaacattggagtggttacttatgatgcttctaaaggagacacttttaatatgcgtgcagtagtgctatggacaattaatgaccttccagcattaggcacactattcggatatgctactatgggttataaagcatgcccaatttgcttggatgagacatattcagagtcatttagaagcaaaattggtttcttgggtcataggaggaaagcttcacagaagggtatggaaatccctgggaagaatttcaccaagcaaagcattttgtttgaactaccgtattggaaggatcttaaactaccccataatcttgatgtcatgcatattgaaaagaacatttgcgacagtttattaggaactttattaaacatagatgacaagacaaaagatacacttaaggcccgcatggacttagaagatatgaatatccgaaaagagttgcacttgcaacataggggtagtagtatagttaagcctcatgcatgttacacactatcccgagacgagaagcatgagttccttaaattcatagaatcagtttgctttcctgatggttttgctacaaatatatctaatggtgtgaactataaagagggcaagatagccgggctaaagagccatgaccttcacatacttctccaaagaatacttctaattggaatgcgtgggtttttacatgaagatttctatcaagtactattgcagctgggtagtttttttcgccaactatgctcaaagacattaaagcttgatgtgctagagaagttggagaaacaaatagtcattgtactgtgcaaactagaaatgattcttccacctgcattctttgatgtcatcgtgcacttggctgtccatctacctgaacaagcaaggcttggaggtcctgtacaatatagatggatgttctttgttgaaaggttccttggttctttgaaaggaatgatgagcaatagggctcgtccagagggttctattgcagaatcatatataatgaaagagtgttcaacttttttctcgatgtatctccatggaattgagacaaggttcaacagagcagagcgcaactatgatggagagaggccacctcttgggctctactcagtattttctactagattcagggcatttggccataaagattgtgtgatcttaacacaggatcaatatgactccttgtgttggtatgtgctcaataactgtgaagaactgcaacagtatatatatgaacatgaggatgccttagtagcagaagatgtatatgtcttgagttatcccaatgagcgacaggttgttttattcaagtgtgaatggtatgaccttgagagaaacaagcccgtgaggattgacaatgactttggtagcattaacttgggaaagaaatggtatatagatgactcttttgtgctagctagtcaagtgaatcaggtcttttatgtagctgatacaaaactaaaagaggaggggggtgatgttctactggatgaaacttttgaagctatcatgttgcatcgagatgatgttaggccagaagtagtgactgatccaaaagagctagcagctttgaaagaacagcctatttctcgaaatgagtatgaggaggaagctgagtag

SEQ ID NO: 17510 - DNA, 437 bp, Oryza sativa
  Clone ID: PAT_MRT4530_23155C.1
ctgggaaattaacctaatttcctttaatggaagggaaccttttttgggccaaaaaaagcggaaacccaaccccaaaacctttcaaccctagcggcaaagtttatccaaaccgaaaaaaaaccccccccccctttttggcggaaattggcccatggaaagggggggggccacccggtttgcagggcccccaaagccggggggaaaaaggcccaaggttttttgttgccccccacaaaatacccccggccccgggggcccccccggaaattccggcccggacccggggggggccccatttttccctatagggggccgaataaaagctgggggaaaccagggccaaagcggttcccgggggaaaattgttacccgctcacaatcccacacaaaaaacaacccggaaccaaaaagggaaaacccgggggggcctaaggggg

SEQ ID NO: 17511 - DNA, 1840 bp, Oryza sativa
  Clone ID: PAT_MRT4530_23156C.1
tttttttttttttttttttgaatagagcaacaaactagcagcttttcagtatatgattgattggctttcagtttcagtttcagtcatttgagttctaggtagaaaaggcaaataggcgatcgacgaggcagagaccgttgctgggtgtaaatttgtcgatgatgcattgtctttgtgactttcacaaagaggcaaggcaacgacatgacagttcagactgctgcaccagcgaagatgctcatgtctacatcacgttgtagctctgatctacatggagaagctgtctcaactctcatcacgagccatcagagctaccccaaggagacaagcagatcagagctactccacggcatattgggcacaaacagttacacaacccatacagatgacaactacttttacaacaagcagagagccaaaaggccgcaaattttgttcaatcgccatcaggaactttgaatgggatgctgctagcatgatttggctagaaaaagttgtcacactaaccgggggtcatggttcattcaggttgcgattacttggacttggacgatttgtgcttcttttttgggcgtgacccttcattacttgcaacataagactcgagtctcacattttcctgtgcttcactctttctgaattcctttgctttcttctttagggacttagccatatcagcaatctcgtcgttgttgctggtagacttggcagattcgtatggagttgcagtgtcctcctttggaggaacaaatgcagcttctctctttcttttgttctcttcagctttctccgattgcttttccagcttctcttgccatttctttgcggacttctttttgtcactcatgaaatactcaccactctcaagttcaagatcaatcttgctaggttgctgaggaggtggaaagggtgtgtatggcttcttctcctttgttatcggtttcttttgtttgacatttttcttcttaaacttcgggagaaacctgtcccagctttcattggctagcgcaggatttttggccagctcacgtttaattaggagttccttgatgtggtacacagggtgcttgatgttctttatgcagtcctccacaacccttcggacttgtttcaatcccttccaggaacccatagcagcaacagtgtttccctgaactaagatgtagcagccagtcaaaatctcgatggccttgagagtagataaattagggcccagaagacgttctctccttttaacgaatctttccttgttccgtataatactaccaatcttgataatatcacagctcatctcatcgttgagtattttaatcgcctgtggagcggggacgctcctcgacaacaattttatcagctccttggccttaacgataatgtagggatccctggtcttgcgcgtggtcgaaacggtcatggatccttccaccagattgagctcgcaagcgaccccaaactccttcagcgcgcccttcacaatcggccacgcctcctgcaggtacttctctcggtactgggggaagagggtggagaaggagctgacttcgagcatgccgccctcgttccacgaggggtcgaacttctcgatcttccagtggtcgatgttggggtcgtcgtcccacggcttcggcttgtcgtgcttccccttgtgccgcggcggcttcttcctccccacctcctccgccgacgacgcggcgttcgcttcttccccctcctccgacgccatggcggcgggaagtagtggaggtggcttcggccgaaggggtggtcggcgtcgagggggacggcggcggtggtcggatggtcggacggcggcggcgggggagaggagtgaagtctgggc

SEQ ID NO: 17512 - DNA, 1074 bp, Oryza sativa
  Clone ID: PAT_MRT4530_23157C.1
ttacttggacttggacgatttgtgcttcttttttgggcgtgacccttcattacttgcaacataagactcgagtctcacattttcctgtgcttcactctttctgaattcctttgctttcttctttagggacttagccatatcagcaatctcgtcgttgttgctggtagacttggcagattcgtatggagttgcagtgtcctcctttggaggaacaaatgcagcttctctctttcttttgttctcttcagctttctccgattgcttttccagcttctcttgccatttctttgcggacttctttttgtcactcatgaaatactcaccactctcaagttcaagatcaatcttgctaggttgctgaggaggtggaaagggtgtgtatggcttcttctcctttgttatcggtttcttttgtttgacatttttcttcttaaacttcgggagaaacctgtcccagctttcattggctagcgcaggatttttggccagctcacgtttaattaggagttccttgatgtggtacacagggtgcttgatgttctttatgcagtcctccacaacccttcggacttgtttcaatcccttccaggaacccatagcagcaacagtgtttccctgaactaagatgtagcagccagtcaaaatctcgatggccttgagagtagataaattagggcccagaagacgttctctccttttaacgaatctttccttgttccgtataatactaccaatcttgataatatcacagctcatctcatcgttgagtattttaatcgcctgtggagcggggacgctcctcgacaacaattttatcagctccttggccttaacgataatgtagggatccctggtcttgcgcgtggtcgaaacggtcatggatccttccacttcgagcatgccgccctcgttccacgaggggtcgaacttctcgatcttccagtggtcgatgttggggtcgtcgtcccacggcttcggcttgtcgtgcttccccttgtgccgcggcggcttcttcctccccacctcctccgccgacgacgcggcgttcgcttcttccccctcctccgacgccat

SEQ ID NO: 17513 - DNA, 1266 bp, Oryza sativa
  Clone ID: PAT_MRT4530_23158C.1
atggcgtcggagggcgatgcgagtgccctggtggcggcggcggaggggaggaagccccgtcacaaggggaagcacgacaagccgaagccgtgggacgatgaccccaacattgaccactggaagatcgaggagttcgacccctcctggaacgagggcggcatgctcgaagtcacctccttctccacgctcttcccccagtaccgaggcaagtcacctcaccccacacccccatccgcgctctcctggtttcttccgcgatcggcgatcgattggttttgcctggttgttaagaagtacctgcaggaggcgtggccgattgtgaaaggcgcactgaaggagtttggggtcgcttgcgagctcaatctggtggagggatctatgaccgtttcaaccacaaggaagaccaaggatccctacatcatcattaaggccaatgaactgataaaattgctatcgaggagtgtccctgctcctcaggcaattaaaatactcaatgatgagatgagctgtgctattattaagattggtagtatcatacggaacaaggaaagatttgttaaaaggagaggacgtcttctggggcctaatttatctactctcaaggccatagagattttgactggctgctacatcttagttcagggaaacactgctgctgctatgggttactggaagggattgaaacaagttgtgagggttgtggaggactgcataaagaatgtcaagcatcctgtgtaccacatcaaggaactcctaattaaacgtgagctggtcaaaaatcctgcgctagcccatgaaagctgggacaagtttctcccgaaatttaagaagaaaaatgtcaagcaaaagaaaccgttaaccaaggagaagaaacaatacacaccctttccacctcctcagcaacctagcaagattgaccttgaacttgagagtggtgagtgtttcatgagtgacaaaaagaagtcagcaaaggaatggcaagagaagctggaaaagcaatcgcagaaagctgaagagaacaaaagaaagagagaagctgcatttgttcatccaaatgaggacattgcaactccgtatgaatctgccaagtccatcatcaacaatggcgaaattgctgatatggcaaagtccttaaagaagaaagcaaaggaattaagaaagaatgaagaacaggaaaatgtgagactcgagtcttatgttgcaagtaatgaaggatcacgcccaaaaaagaagcacaaattgtccaagtattcgcaacctgaatga

SEQ ID NO: 17514 - DNA, 429 bp, Oryza sativa
  unsure (1)..(429): unsure at all n locations
  Clone ID: PAT_MRT4530_23159C.1
ctttttcctcggatacatttcgtcgaacaccttgtgggcgtgcttcaccttcttctccgctccaccaccgcgacaccgatcttcgttgctcctccatctctcgaatttgtgtatcagttagttgtgaggcaacgtatgcagcttccaggaggtgaaggttgatcaagattgtatcaagaataaggatgattctgagcaggagagtgttaaagagaagcccttgtcggtacgcttggttntccaacaagatgatcggagtgcggtcttgttctaggtctcattccctagtcgactgcctgtggataattaactgggtccttatattattttgtcttccgctgttgttctctgatagttgttggnctacatggccctaatgtaagtatttaactcttttagcctgaattcaatcgtgaaaaaaaaaaaaat

SEQ ID NO: 17515 - DNA, 491 bp, Oryza sativa
  Clone ID: PAT_MRT4530_2315C.1
ggatgcttccgatcgtgaccttttggttagacaaatgaagcaatatgatattcctgttctgaacttcatgggggacaaaggcataaggagagaaccattcaacatcactctggagatgcaacaagttgggatctactcacgacttgatcaagtttttgaagctcctcctgctgtgaaagatgttttaattagtcaggctaatttggaccgttcgtatataggtacagatgaaacacacaatagagcagatgatgtaccaaagctaggcatttctgacttttggaccccagataaccactatcggtggtccaggtcaagatatggcggtcatttgtcagcatttgtagatgccgtcaatccttcccgtctttttatgtgcaatttagatgttattgactctgaaagacttcgatctcagaaggataagcatatcaaagatattgacggcatggatgaagacttaaagaagcttctgaaggaacagagacaat

SEQ ID NO: 17516 - DNA, 1220 bp, Oryza sativa
  Clone ID: PAT_MRT4530_23160C.1
gcttgggtaccgccctggcagggtacccgggttccgggaatttccccggggtcggacccaacgccgttccggccaccgccgttccggcccccgccgtcccggcccacgcggtcccgcacgaggggccccgatctccatcctactaggggagggggcgccggcgttctcctgctcccgccgcatcatcgctcaccggtgagcatcctaatccatcccatccggcctcggcctcggcctcgaatttcgtctcctcgcccgccgctttgtgccgaatccccatcctgcgagcagaggtggcgcccggcgtctgaatattttgctccttcctcctaccccgtttcaagcctttgcggcccttgcgcctctccccttgccggccggccccgctcagtcggttgcctcggactcagatcccactcgcatcgccatcctagaaaccgatgagcagcgaggccggcggcgctgcggcgagctctgcctccgcgcccccgccgccgcggaggacgcccctggagaggaccgcggacgcggcggaggagttgtatcgcctccgcgacaccttcttcccccgagaccccgtcgagaaggccgcggccctccgcgccctcgccgacgacgccctcgccgtcctcgactccctcccgccagagcaaaggaaaacaccgcaacaacgtgctgtttatgaattcttgaggggaaaaatattggatgttttccctgattatcataaggaggctgaagatcatttatccaaagcagtaaagttgaatccatctcttgtagatgcatggctgtgtttgggtaactgcatatggaagaaaggggacctggattcagcaatgaactgcttttcattagcattaagcaagggggcagacaagaaaatactatgccagctctcaatgcttgaaagaagtatggctcaagatcaacaagaaacaccacacaagacaggagaggttggggggggggggtcagatagggaggttgagcaatcttctgtgggtgagatcgacccttatggccattccacaactcatctgtttctgatgaataatatacttgaactctgtaagattccaaaacagccagttgtgatagacctgttatgggttagggttggtaaacaccgcctgggggattgccgggcggcgacggcttctagggatgagaagggatataggttgggggagactaattctgattcatttctcaattag

SEQ ID NO: 17517 - DNA, 525 bp, Oryza sativa
  unsure (1)..(525): unsure at all n locations
  Clone ID: PAT_MRT4530_23161C.1
cgtccgaattcctggtcgaccagcgtcattctccgcgcgtggctaaagctacgacctcgcagcttggatttggaatcactcgcttgggaagcaaaatcgcacgacaagctgaggtagcacgcggtttgacgtttcttcatgacgaagttttttctgtctttcagtggagatcctgatgatgtttgggccaaggccgtcgggccggttttgtctcctccggttagccggcggcgaaagcctccgcgaccaccgacggtttgttaatacctgccctaattattgtgctaatcatggaacatcgcgcatggtaattctcggttaatccttttgttttgcttgccctcgcttgattcgatgcgtaatactcgtagttgattcgtatgaacaagcgcacatgggaggaagacatgtatacatcttagttaattaaagaccatggataattgcatacgggttatgttcttcatcgaagggatacgtgctaatagtaatctcctctaatgnatttcttcaattgtttacttc

SEQ ID NO: 17518 - DNA, 580 bp, Oryza sativa
  Clone ID: PAT_MRT4530_23162C.1
caaaagggccaaaaaaaaggatcttaaagggtaaaaaaaaaacaaaggcgggttaaaaggggccctacttaaaggaggaaaaaggggccaaaaaaaaaacaacagccttccttttccccaaaaagcaacaaaatggccaggaaaaattttaaaacaggctaaacccgaaaacaaagggggagtcacattaaaaaaactggggaggccaaaaaggcggcccaaggggttaaatgggaataaaaacccaaggggggttcaaggcccggaaacccccagggccgggggaaacagttttcccatttgaaaaaaaacaaaagggggggttttggcccttggaccctaaggggtatcccatctgggatttcgggggaaaaaaattaccaggggaaaagcgggaaattcctaaaaaccccccggttttaaaaaaaacaaaatttgccccaaacaccaccggggcaggggggggccacactacccagggaagctttgtttaaaaagcccaaggccgtgggaacaaagccccttgttttgaaagggcatggccttttgagggacccagttcaaaataggaacccccccc

SEQ ID NO: 17519 - DNA, 374 bp, Oryza sativa
  Clone ID: PAT_MRT4530_23163C.1
cccacgcgtccgcggacgcgtgggcggtcggacggcgatgatgggcgtcgtcggcatggtcgcccgggagctcctcggcaagctgggcctcatccccgcccagacagcgatcccgtgggtccagaccgacgtgatcccccacggtgccacctacacctactgggccgacccttacactctcttcgcgttggagctcgccctgggcggcttggacgagcactgccggttgcaggactgggacacgccgggctccatggggaagcagtacttgctcggcctcgagaagtacctcgccggctccggcgagccggcctaccccagcggaccgttttcaacccgttcggcttctggaccaagagcgaggcggtgatgaa

SEQ ID NO: 17520 - DNA, 318 bp, Oryza sativa
  Clone ID: PAT_MRT4530_23164C.1
atgtcctcgtgttgtcgccttggtcgcgccgccaccgccgcttctgagcccgccgctcccggccaccaccgccgctcccgagcccgcctatctcgacagccgctgctcctgagcccgcctccgtcgcaactggccgccatcaccactcccgggctcctcctcctcctcgttgtcggcgcgacgtggatccggccagtcgcccgccgcgccgcctccgccagtatccgctcgctcccggccatcgcctcgtcggtggcagcggtggcgagccgggcgcctgccgcgtcctgtgcgctcggtgggaaggggaggagctag

SEQ ID NO: 17521 - DNA, 621 bp, Oryza sativa
  Clone ID: PAT_MRT4530_23165C.1
atggggagcaccgttgacagcgtctggtcgtccaacgaccacccgccgttctgggcgctcgcgccgccgccgccggcgccggagcgcaggttctgctgcccctactgcccggaagggccgcagcggggccgcttccgctcccacctgaggaggcactaccgcgcggccgtcaggggcatggtgcgcggcgggctggcgccgcgggcgcgcctcgccgtgctccgcgcggcggcgttccgcgacagcagggaggcgcggaggaggatccgccgcgaccggcggcggcggcgccgccgtggcatgatggtggcggcgctgtcccccaaccacgcgttctgggctgcgcaccgcctgcgtgggacccaccccgcggagatcgatttcctcggtctcggtctcggtgtccagcagggggcggggatgctggatttgccgggcgctccgccggcggcggcggcggcggcggcggggatatcgtctggcgacgtcgctgcttccgcgaatgcgcctgtgcctgcgccggcggttgtgctcgcggcggctgatgacgacggggaggagtcggtgggggatcaggcggaggaagacgtcgacggcggctcgttcgccgggagcaactag

SEQ ID NO: 17522 - DNA, 1045 bp, Oryza sativa
  Clone ID: PAT_MRT4530_23166C.1
cccccccttaatttcagacaacacacacagacgtatagtagttatccgttcgacacctgcaacgatgacgaagacgaagaagtccaacaacgacagtacgatcctggtgatcggcggcacggggatcatcgggcggcacatcgtcgcggcgagcctcgacgccggccacccgacgctcgtgctcgtccgcccgacggccgcatccgccgccgtcgacgtcgactccgacaaggcgaagctcctggcctccctcgtcgccagcggagccaccatcgtctacggcgacatgaacgaccgcgagagcttggtggcggcgatcaggcaggcggacgtggtgatctccgccgtcggccaccgtgggacggtggagctggacggccagcttaaggtcgtcgaggcgatcaaggaggccggaaatgtcaagcgattcgtgccgtcggagtacggatgcgacgtggagcaggcggaggaggggacgctggagccggcgaggagcatcatcgccgccaaggtccgcgtccgcgaggccgtcagagccgccgggatcccctacaccttcgtctgcagctactgggcccacggcttcatgctcccccgcctcggcgaccccctcgtcgaccgccctccggccaccgtcgccaccgtctacggcgacgacacccagcgagccatcttcgtggacgagaaggacatgagcgcggtggcgataaaggcgatggaggacgagagggcggcgaacaagatcctgtacgtgcggccgccggcgaacaagctgtcgctgggccagctcgtccgtctctgggagaagaagtccggcaacaccctccagaaacgctacgtctccgacctgcagcttgccaaccaagtccaagaggcaccgttcccggtgaactttcagctggcgatggtgcactcgacgctggtggccggggtgtgcgagcagacgatcaacccggacgtcggagcggaggcgacggagctgtacccggagatggacttcctcaccgtcgacagctacctcgacgccctcctcttgcatgcatga

SEQ ID NO: 17523 - DNA, 1326 bp, Oryza sativa
  Clone ID: PAT_MRT4530_23167C.1
atggcgcccggaggagctccagcacgaagcttcgtggtcgtcgtcctcgccgtcatcgcgctctccgcaatcgtcgccgtggccggcacgaagaaggcgctgtccaccgtggacgtggaggaggagctcgacgcggcgcgcgccgcgatacgacgggcggcgcggcagcatcgccgcggcggaggcggagacgtcggctccgccaactggctgaggttctacggcggcgaggcggactacgacctcctctcgcgcgtctaccgcaacccggcggcgttctaccggagctacgtggagatggagaggcggttcaaggtgtacgtgtacgaggaaggcgagccgcccatcctgcacgagggcccgtgcaagaacatctacaccatcgagggcagcttcatcgagcagctcgagctcatgtcgccgtcggacgccggcggcggcgtccggacgtgggacccaacgcgcgcccacgccttcttcctgccgttcagcgtctcccagatggtcaagttcgtctaccgcccgccctcccaggaccgcgccccgctccgcgccatcgtcgccgactacgtccgcgtcgtcgccgcccgccaccccttctggaatcgctccgccggcgccgaccacttcatgctctcctgccatgattgggggccatacgcgtcgagggggcagccggagctgtacacgaacgccatccgcgcgctctgcaacgccaacacgtcggaggggttccggccggggaaggacgtgagcgtcccggagatcaacctctacgacggcgacatgccgcgggagctcctggcgccggcgccggggctggagtcccgcccgctcctcgccttcttcgccggcggccggcacgggcacgtccgcgacctcctgctccgccactggaagggacgggacgcggccacgttcccggtgtacgagtacgacctccccgccgccggcgactactactcgttcatgcggcgcgcgcgcttctgcctgtgcccgagcgggcacgaggtggcgagcccgcgggtggtggaggcgatccaggccgagtgcgtgcccgtggtcatcgccgacgggtacgcgctgccgttcgccgacgtgctgcggtgggaggcgttctcggtggcggtggcggtgggcgacatccccaggctgagggagaggctggagaggataccggcggcggaggtggagcggctccggcgaggggtgaggctggtgaagcgacacctgatgctgcagcagccgccgcggaggctggacatgttcaacatgatcctgcactctgtctggctcagggggctcaacttgagactccaccgttga

SEQ ID NO: 17524 - DNA, 135 bp, Oryza sativa
  Clone ID: PAT_MRT4530_23168C.1
atggcgtgtgtcttgatgtctcgagaaagtatggccggtgatggattaggagtcaatctaggagaagatgatgtcccaatgatcatgatatcatgtggtatgattaggctaaagagcaatgcacgtggttggtga

SEQ ID NO: 17525 - DNA, 1182 bp, Oryza sativa
  Clone ID: PAT_MRT4530_23169C.1
aaaattgctactagtccccttgaagaacacttccccatctactactactactactcctactttgaatacctgctcttgctcttcgcctcgttcgtctccaagaagctcgagagccgagggcttctccgtctcttcgttcatctgctgctgtgtctcccctggtgaggtacgacaagatgttggaacattcggagagtgcaacagaaaaaattatgagcagcatcatggataccattgctgagaaccttcctaagcagaaatctgggaaatttgacgtaggcgctgcctctgacaaaatgaaggagaagctgtttggtcgtcagaagaccattcatcgagttctgggtggtggaaagcctgctgatgtgttgctatggaggaacaagaagatatcctccagtgtcctggctcttgcaacagcaatttgggtattctttgagtggctcgactaccacttcctaacaattgtttcatttgcccttgtccttggaatggttgtccagttcgtgtggtccaatttctcaagtgctctaagcggatctccttctaaagtaccccgtgttgagctgccagaagagctgtttgtgaacattgcagttgcagttggtacccaagtaaataagttcttgagttttcttcaggatgtgtcttgtgaaagaaacctgaagcactttgtactggcaatcgttggactgtgggctgcggctgttattgggggctggtgcaatttcttaactgtcatttacattggatttgttagcgctcacacgctgcccgtgctctacgagaagtatgaagatcaagttgatgatttcctatacaatattcttggcctcctgcgtgaccagtatcagaaacttgatcaaggtgtcttgagcaagataccgaaggggaacatgaagttcaagaagagcgagtagattgtctgggttttaagaactgaaatcatagattagctgggttttcatcagtggaatgaatcaagaatttgtaccatgctcagttgcgtattgcagacattggttgtcagttgtcatctgagagctgtgtgctttcctgaatggggcgctcatttgctgcaatctgaattaatatttcaactgctctgccctgcatttcttctgttatgtagtgttattcaagtggctcaattaatttccttcttttcactaaaaaaaaaaa

SEQ ID NO: 17526 - DNA, 6090 bp, Oryza sativa
  Clone ID: PAT_MRT4530_2316C.1
atggccgaacgggcagtggcgcacagcctccctccgaacgctagtggtgacgacggggagcagaacccgcgccgtcgggctcgcaccccaccgtccccctctcaccgaaatcttgggcggggggaggcgctcggggaggtcgaaggatccgcgacttcgccgcccgcgggcgacgggggaggacggcgggacggggcgcgtcgccgcctcgtctacggcgatggcggcacgccccagggcgcgctccaggctgcgggcgcgctcctgcgtcacccgcccgtcgtccccgatccagagactccagcccgacgttggctggatgacgtggccgacttggtcatgacggcgcagcagcgcctaggcgccggcgggcggtcctccgccaccgaggcctctggcgctgccgccaccggctccatgtcgtcgaggcggagggcgcggcgagcggcggccgttacccgccgttcgtctgccattccctcgtcaacgcctccaacccaagaagatgtgcgtggggggccggatgcccgcctcgatatcgagcgccggcacgacactcgtcgcgccgcctacgcaacggagggcgcttcctcgtccggagcgccacttcggtccgggcacgggggccggccccccgtgtccccggttggcggtgccggctgtcgagcctttgtggcgagccttcggaacgtccgttggcccccaaggttccggcccaccatcaccaaaaaatacgacggaagcgtcaaccccgccgagtttctccagatctacacgaccgggatcgaggccgccgggggtgacgacagggtcatggcgaatttcttccccatggccctgaagggtcaggcgcggggttggctaatgaacttgccacccgcgtcggtccactcttgggaggatttgtgccagcagttcaccacgaacttccagggcatatatccgcacccaggcgaagaagcggacttgcatgtgcggttctgtcaagtccgcaacaccataccgtgcatccccgcacacgcggtgatctacgcgttcagggggggcgtgcggcacaaccgcatgctcgagaagatcgcctccaaggagtcccagaccaccgcgcagctttttgagctcgcggaccgtgtggctcacaaagaggaggcctggacctggaactcctccggttctggtgtggcagctccggctgcccccgggtccgccgctcggtcagggcggcgggacaggaggaggaagaagggatcggcccgttccgacgacgagggtcatgtcctcgccgtcgagggcgcttcgcgggctccccgaaaggggaggcctgcgagcgacaaaaagaaggaggccggcgctcccagcagggagcgcccgaccggcaagtggtgtaccgtgcacaacacctccctccacgatctcgtggactgccgcgcggtcaaaagtttggctgagcggacgaggaagtgggaggaggagaagaggcaggagcgccgtgagggcaagaccccggcggctcccgccggcaaccggcgaggtgaggccaagcagaaggccaccgccgaggacatcgacgatggcgacgatgacctggggttccaggagcctgaggccaccgtcgccaccgtcgatgggggagcgtgcgctcacgcttctcgccggagcctcaaggccatgaagcgagagcttctggccgcggcccctacccatgaggcgacgcggcgggcgcggtggtcggaggttgccctcaccttcgaccagaccgaccacccgtcgtgcgttgcccggggaggacagatcgcgatggtggtttcccccaccgtttgcaatgtgaagttggggcgtgtcctcatagacgggggagcagccctcaacatcctttcccccgcagcctttgacgccatcaaggccccggggatggtgctccggccgtcccagccgatcatcggtgtgacgccggggcacacctggccgctgggtcatatcgacctcccggtcaccttcggtggttccgccaacttccgcacagagcgggtggacttcgatgtggcggacctcagtctgccctacaacgcggtcctggggaggcccgcgttggtgaagttcatggcggcggtccactacgcctatctccagatgaagatgccgggccccggtggccccatcaccgtccatggcgacctcaaagcggcgttggtcgtggagcgcgacgaggacaaccctcactccgcgcatccccaccctgtgtcgactcgacccgggagagagcagggaggagaggcccccgagccgaacggcggcccaaggcccccgacggccggagctggccctccgcctgcttgtccgacggtgccaggcgtccccgacccccaggacggccccagggccactgcgggaaggccgcgcctgtcgctctctgaccccgaggtcgtcggcacagaagccgagtgcgccccgtgtggcctctcgggcgaagagcgccctggaaatgcggcccctggcgaagaggatcggccccgccgaaaggtgcagcggcctgtctacttcgttagcgaggccctccgggacgccaagacccgataccctcaggcccagaagatgctttacgctattctgatggcttcgaggaagttacgccattatttccaggcgcatcgggtcacggtagttacgtcttaccccctcggccaaatcttgcataaccgagagggtactggacgggtggtgagatgggcaatcgaactctctgaattcgatttgcgctttgaaccacgccacgcgatcaagagccaggccctcgccgactttgtggcggagtggaccccagctcccgagcccgtctccgcccccgaggccagctcgggccccacgcagctgcctcacaccgcctactgggtgatgcagttcgatggctccctgtctcttcagggcgccggtgcgggggtcacgttgacctcgccgagcggagacgtcctcagatacctggtccgcctcgactttcgggcgaccaacaatatggcggagtacgagggactccttgcgggactcagagtggcagctggactggggatccgccgcctcctggtgttaggcgactcccagttggtcgttaaccaggcgtacctcgcagataagactctacccgaggaccgcgaagggagtgaacgcgtccggcgcatctccaagcgctacgtgctggtggaagggaccctctatcggcgcgcggctaacggagtcctcctgaagtgcattcctcgggaacaaggcgtcgagcttctcgccgatgtccatgaagggcgtgccagttccacgccaggcaaacccatcagccggcccaggccctgcagaccatacctctttcgtggccgtttgctgtctgggggctcgatatccttgggtccgttcaggcgggccccgggtgggttcgagtatctgtatgtcgctgtcgacaagttcactaagtggcccgaggcttatccggtcatcaagatcgataagcactccgcgcttaaattcatcaggggcatcactgctcggtttggggtgcctaaccgtatcattacggataacggcacccagttcactagtgagctcttcggtgactactgcgaagacatgggcatcaagctctgcttcgcctcccccacccaccccagaagcaatggccaagtggagcgcgccaacgcggaaatcctcaagggcctcaaaaccaagaccttcaacatcctcaagaagcacggcgactcgtggatcgaggagctgccagcggtgctctgggcgaaccgaaccacgccaagccgagcaaccggggaaacgcctttcttcctcgtctacggcgcggaggcggtcctcccatctgagctcaccctgaggtcccctcgggtcaccatgtattgcgaggctgatcaagatcagcttcgccgagacgacctcgactatttggaagagcgaaggcggcgcgcggccctccgagccgcgcgctaccagcagagcctgcggcgctaccatcagcgccacgtccgggcccgatcactctgcgtcgacgacctcgtcctacgccgcgtccaaacgcgtgctggactgagcaagctctcaccaatgtgggaggattcaatggattttagaagtggaagctcaaatgatagtggtagtgctagcaatcctagtggtaatactggttttgatgcatcgagaccatctagtgggagtggttcaacaatgggagggcatgcaaggagcattttgaatgctgctcgtgtgattccacccaatgatgatgaaaagaagcccttgtggagttactcaagagttaaagcacatctcttgaaaattggaacaattggtgtggctacatgcaaaaaggtgacagtagatatacttgggcaacttcaagatgaaatgactagagctgaagcaatctctgcaaggaatttgcctaaggacatcccactaccaacagagagtgtgagtagggggaagagaagggctgtttcagctattgagtcaagcttcaatttagatgctcgtgccaagcttgatgctttgattgcgaggatgttctatacatcaggtattcctttcaatgttgcaagaaatccatatttcaggaaggctttccagtttgcttgcaacaaccaacttggtggttatacccctccaaatttcaacaaattaagaacaacacttcttgttcaagagaggacaaatgttgagcgcttgctgaatgctgtcaagtcaacatggtctacgaaaggtgtgagtattgtatctgatggatggtctgatgctcaaaggcgaccaatcttgaattttcttgcagtgacagaagatggaccaatgtttttaaaagcaatctatactgaaggagaaatcaagaggaaggaatatattgctgagaaaatgtttgccatcattgaagaggttggcccaaataatgtcgtgcaagttattactgataatgcatctaattgtagggctgctggattgatggttgaacaaaagtacagccacattttctggacaccatgtgttgtccatactttgaacttagccttgaagagtatatgtgctgccaaaaactctagtggggatgcttttctagaattccaatggattagtgaagtggctgcagatgcatctgccataaagaatttcattatgaatcactcaatgaggctctccatgttcaatgattttagtaagctgaaatttcttgccattgctgatactagatttgcatctactattgtgatgcttaagaggtttcgtgctatcaaagagaacttaatcttgatggtggctagtgaaaaatggaatgcctatagggaggacaatcaagttcaagcacaacatgtcaaggagaagattttaaatgatttatggtgggataaagtgaaatatatcattgatttctgtgagcctatctactctatgattcgtgctgctgacactgacaaaccatgcctccatttgatctatgagatgtactactatgagacttggttggaggaggctccaaaccgccaagcccctcatatggatgaggagatttcagatatgagaaataagtgttttagaagatatttctctggggatgacttgagaaagatcaaacaacaatttgcatatttctcattgtttggcagtgggtttaattcctttgactcaattgaggatagagcccatatgaatgcaaagcaatggtggggaatctatggtaactctgcacctgagcttaaaaagttggcactaaaattacggacagccaacatcatcttcttgtgccgaaagaaactggagcacttatgtcttaggcctgcacgtgctgaggatttggtgtttgtgcaccaaaatatgcgtcttctttctaggagatctgaagaatactacagtggcccatcaataatgtgggatgttgcaggagatagatatgagttgtttgatggtggtgctgattttcttcaacaagctgaactgacacttgatgagcctgaccttgagagactactggaagatcttggtgcattggacatacaaggcgataacgggccttcatccacttcggttccaatggatgaaatcaacaatcaatttatctag

SEQ ID NO: 17527 - DNA, 464 bp, Oryza sativa
  Clone ID: PAT_MRT4530_23170C.1
gggggaaattgaaacatagttttaagtataaaggggacctttccaatcggacaaatttttggacaaaatcagatcagagaagggcccaattcgagggggcccacataacctatcacaggcccacgacccatgacgggccactggtattgctccatcgatggcgcacacgccaaaacggaagaaaatatacaggggaccatatatgttggggaaactaccgttagatcgagaaataaatgttcgagaatcatccacgttatcacgcacagtaaaatttttactcacgagtaaatctgggagtaaaatttttactcgggatgacgtgaacaaatctcaagcgtctattatttaatctaacggtagttttcaagtttccatcgtgtacgtggtttccacccccatattttccccaaaacggcgcacaccaaacgcctctccttgcacggttacacacaatgacacgc

SEQ ID NO: 17528 - DNA, 565 bp, Oryza sativa
  Clone ID: PAT_MRT4530_23171C.1
aggaaaaacaaatatgcaactgaaatatgcttaaacagccctttccggtcggccggccggccggccggccaccggttacataaggggggggccatcgcaacatttccgattttttttccgagcggaagcggcccggggaggattataggcttgctagttacatatataccccacaccacaccacaccaaattttagcttggcataaaagctaggggcaaaattggaagaaaagaataccccagggagcacaggagtttgcagcagcaaccagcaagaatggcatcatggaccctctgaaggaaaaaaaaggttaaatttcaggcccacccatgtttatcggaagaatggcatcagggagccccgatgcactggtcatgacttgggataaaatcggaggtgatcctttcgcttgccaagggcttatgcaattggctacccggaccccttgaaaacactttttatattggctatatagggggttataaacaggtccattttccatggttgggggtaccacaccatttggatcggcatttttacacttgggatccccatattcgaaaa

SEQ ID NO: 17529 - DNA, 1551 bp, Oryza sativa
  Clone ID: PAT_MRT4530_23172C.1
tttttttttttccccaaatcaatgacaagcaaagctcagctccttcattaactcagattgatttttaatacaaagccaaagagactgacacgaacacataacatatttttgccgctatcgatcgccagctgattataccagcgagagaaagcgtacgtacatacgcacgtaggcgcagggaagagaggaaaaaaaaaagacaaatacgcacgtacgtatagtacacggtacatgtatacacgtatagctagctcaagctctctcttcttcttcaagcagagcgggcccacgtacacacagcaccaccacacgtacacagacaccgtacacattacatttcgacttggtagagtcgtcgatcgtacaaacaatggcttcccgcgctcgtgcacgtgcgtacgtacgtacgcgtgcagtacatacatacatatgtatatacgtatacagtatagcagtacggtgtgggtccatggcgtcagggcgattagacgttgtcgaactcgtcggcggccatggactggctctgcaagcggcggagcttgaaggaggagagcttctggggggcggcgccgccggcggcggcgggggcctcctcgaagcggatgtaggtgtagacccatgcgccggagagggtgccgacgacggggccgaggaagtagatccagaggccggtgtagacgttgctggccaccgccggcgccagcgtcctcgccgggttcatcgatcctcctgacaccggccctgcgaagatcgacgtaatgcaaaccgcggaaccgactgctaaccccgccaactcacccaccgctctggagtcggtggcaacggcgcaggtgacgaacatcatgttgaaggtgacgacgatctcgatgacgagggcgtgccagtgcggccccgtcggcgtcgtcgtccccaacacctcgatcgggtacagcaccgcccgcagcacgaacgccgcgcacatcgcccccgtgaactgcgccgcccagtagaacggcacctgaatccaggggaaatgccggaagaaggcgaaggagagggtgacggccgggttcatgtgggcgccggagatgtggccggtggcgtagatcatgacggtgacgatgaggccaccgaccaccgactgccccagctgcgagatgcgcttcatgtcctcgccgtagatggacgccgccccgcacgtcacgaacacaagcaggaacgtcgccaccacctccgatatcaccttcttgaggaggttaggagggaagatgtcggcgaaggatttctcggggtagtagacgctggggacggcggagacgctctgcacggtggagaggtcatggatctcgttcgagtagttcacccgagagttggtcctcgacggcgctgtcgtcgatgccatggcccccctttagctatctatctaggacaacgaatcaacggaccagcgcgagcgagcgatcgagagtactgtgagcgctagctgccgatcgatcgatggaagaacgatcaagctgtgctgcctctgcctctgcttctgctttgctactgcttccggcgacgcgtggccgc

SEQ ID NO: 17530 - DNA, 597 bp, Oryza sativa
  Clone ID: PAT_MRT4530_23173C.1
atgggcggcggcgggcccatgtggcagcggagcgacgacgggcgagcgcggggggcagagaagcgcaggatgcaagcagagcggcaaagggcggaggtggggcgaaagagggggagaaggggagaaaggggaacaaaaaaaagagagaaaaaggaaaaagaggaagacacacaacacaaaacgacgacggaagggggaaaaggaaaaaacaagaaaatacaggaagaggaaaaagggcgcggcgaagagatgagggcagcgggaatggacgaggaaaagaaagggcaaaaggccccaaggcagcagaaaaaaatcggaacagaaaaagagaaaaggggggataggggacgggggaaacggagaagaagcgggaaagaagaaaagcgaacgaagaaaggaaaagaacagaccgttagcagagaatactggagaagggacaaagagaaacagcagaaccaaagacaggagggaggaaagcgacaaccacggaagaagcacaacgcagcagagagaaaagacaaggaaacaaagaagaagggaaagaaaaaggggaagaaaaagcaggaaataaacagcgaaagaaaaaagcgcagatag

SEQ ID NO: 17531 - DNA, 828 bp, Oryza sativa
  Clone ID: PAT_MRT4530_23174C.1
atggtttgtgtacctcggctgattcctggacgaggatttaatgcacaaataagttcggaaattactagtgaatttctgggtgtgacagatgatgaggaggaggctgctgagatagagaagcactacaaggagactaagagaaaggtgaaggcagggcagctagaggacctagatgattgtttcttgcaaagccagaggtcagaaccgacaatgcaagctagtgatgaagaagggaatggaaccccatatgcagacaatgatgaagaggagttagtagaggaaattggtagtgatggggaggtgagaatgaaaagtagtcaacatccaaggtacaagaagaaggcatgtgttcctacatttgaacctgggatgaagttcaactgcaagaagcaattgaagaaagctatcacaacatatgctcttgctgagaagaaagtcattaactttgttagggatgatgccaagagggttagggcaaattgtgattggggtagctattccccggatgtccctccaccaaaacgaaccacaacttctcacaatctgaggaactgtgtccttgtaataagaggaccaaataagatttacccaagtgacctaaaaattgacactggagctggttgggtcttcatttcagaccaacaagagggtatccttaatgctgtgcagaaatgggcacttgaggctaaacacaggaactgcgctaggcacatgctaatcggaagagacacttccatgacaagcaattccaaaagaagttttggaagtgtgcaaatgctccttgcgggatgttatttaaccttgctagggcaaaacttgttcagctga

SEQ ID NO: 17532 - DNA, 339 bp, Oryza sativa
  Clone ID: PAT_MRT4530_23175C.1
atggagtgcgaggggtacctgcagggtatcgaaaaaatggatgtgagcagcggcacagcaccgccggtgtggagaggaggatggatggaggggagcagcggcagtgcagcactgtcgcgtgggggcggagggacggaggagctcgcggtcctcgtcggcgagcgcggcggcacgagagctcgcacgccgcttcgccgtcgcgcgttcctgagccggcgagagcagctccgcatggcaccgccttccccggcactagcgaaggagagcgggccgagcgccctccacgcccgatgcgccaccccgcacagcaagccgccgccgtcgtctctgtgctcatga

SEQ ID NO: 17533 - DNA, 391 bp, Oryza sativa
  Clone ID: PAT_MRT4530_23176C.1
gaagaattttgtgaagctcaccagtaaaggattccttgagctctcctgagaacacttcctgtagaactggatacgcttctgtcagagcctggtgcatgtgcagcatgtgaaagaacttctctggtgaaccatgcatcttactaactgtagatgcaaagttcctccatcgtgcctcgtcatcgttccttgattgaatgccaagaatccggtccatatcaggaatgaagtggcagtgacaacgatcatcaaatggagcctggtgcaagtcctgtgcatggccagattgtgttgattggtttgctatcttgtcaaggtatatgagggattctttgctgacaattctgaagctgtcattatcgaagcccggatgcaagtactccagcattagatc

SEQ ID NO: 17534 - DNA, 169 bp, Oryza sativa
  Clone ID: PAT_MRT4530_23177C.1
cccaggatagtgtacgccgagggagagggagagagaatataattgaaccgagagatatagataggccctaggcttctcccgattaggagaagacttctataataatactgggggagaacttgggagctataataataacttagcttagtggtgtttactatagtcttat

SEQ ID NO: 17535 - DNA, 1838 bp, Oryza sativa
  Clone ID: PAT_MRT4530_23178C.1
tcatggttgaaggatgaaggaaattgaagggacttttggtcctttcttcagataagacagggtcagagcccatgttgcttctatataattcactttgttctgctcgactctgtgctggtaattttgaatccaatcagctggtagcatcgaccttatatctgcttcttcaattttccgaagtatgaaatgctcattgttcagaaggaataaccattgtaaaccttcagatttagacatgtacaacttagacagcctgtagagcatggatgtaagatcagatatcagcatagatatcaggtgacctgatgtgttcatcatcctctcttctgctaatgcatggtcttcgtaactgtgagcaagaattgcatccagtgaacctgtgttttgtgttagtgacatgatatatctgatgaggtaagttgtgaccaaatgtatgccgcctccctctggcatgtcttctgaactatatgactgaatttggactcttaactgatcaagtgtttcttttgtaccatcttttagggtgtgaagaattttgtgaagctcaccagtaaaggattccttgagctctcctgagaacacttcctgtagaactggatacgcttctgtcagagcctggtgcatgtgcagcatgtgaaagaacttctctggtgaaccatgcatcttactaactgtagatgcaaaggtgagtaattgagtgatgggttcttttactgcttttgatagtttgtcaagtgccaggctatcatggacagcaagatgccactgcatgagttgcttgtgtgcagataacactattgtgcagacataccgcagttcatgaagccactcagtcatcttatgtttgatgcagttcctccatcgtgcctcgtcatcgttccttgattgaatgccaagaatccggtccatatcaggaatgaagtggcagtgacaacgatcatcaaatggagcctggtgcaagtcctgtgcatggccagattgtgttgattggtttgctatcttgtcaaggtatatgagggattctttgctgacaattctgaagctgtcattatcgaagcccggatgcaagtactccagcattagatcaagttgttctgagtcgcatccgtcgtctgtcatgctctgagtttctgagaggagtgacaaagatatgctgctgcgactggcataatcattcggatgccatcctaaaaaatggtagctgctagtggggaaatcagaaacttccacaggagcaaacccatttttcgtggatgtggagatggtgatacgcctttccctgatgaagaataggtttcctctattgagaacaaagatcttgcatgatggatcagccttttccaacacggtgatcgtgcgatctgtgagcatcatatttttcatgcctccttcctggtcattaaaaagtggagtctcatgagtatacctatagaggccacctcccatgatgagtgttgtgatcttgagctctgaaactagctctactagaccaagttcaacattctccttctcagctgttaacacctcagcatggaacttctgagactcgcagacatgcaggtaatctcttagcattttctcaccagttctcgcctcttgcgtataaaaaccagcaggtagtcttgtttgtgctgagcagcaactgtacgtcttccccggtggggtgttgcgcaacgtccacagcagcattggcgggcacaagctttggatggggctaattgccacataaaccttctcgcaatcatcttctatcatcttttgcgccatcattgcatgatctatctgtgtacttatttgcaaatgcgagtatgaaatatatatacaccaagtctggaact

SEQ ID NO: 17536 - DNA, 418 bp, Oryza sativa
  unsure (1)..(418): unsure at all n locations
  Clone ID: PAT_MRT4530_23179C.1
ccgggtcgacctagcgtccgctttcctttaggctccagtttcaggctgaaagggccagcagaagatgggctgctcatctttcttaccgcaggtgatgagtccttgtacaatagagtggcatccctccttgatgttatgggcaagtcaagatttttcctcggtgacgttggcaaaggtgcagacatgaagctcgttggtggagggtnctggggagcatgatggtttcgttttcagaaggactgctcctgagcgaaaaagttggcctagaccccaatactcttgtcgaggttatttcacaaggtgctatcagtgctcccatgttctccctcaagggcccttccatggttaaagctgcataccctactgcttttcctctgaagcatcancanaaggatttgaggctcgcattggccctggc

SEQ ID NO: 17537 - DNA, 2253 bp, Oryza sativa
  Clone ID: PAT_MRT4530_2317C.1
atggccgaacgggcagtggcgcacagcctctctccgagcgctagcggtgacgacggggagcagaacccgcgccgtcgggctcgcaccccaccgtccccctctcgccgaagtcttcggcgagggaaggcgctcgaggaggtcgaaggatccgtgacttcgccacgcgcgggcgacgggggaggacggcgagacggggcgcatcgccgcctcgtctacggcggtggcaacacaccccagggcacgctccaggctgcgggcgcgctcctgcgtcacccgcccgtcgtccccgatccagagactccagcccgacgttggctggatgacgtggccgatttggtcatgacggcacagcagcgcctaggcgccggcaggcggtcctccgccaccggaacctctggcgctgccgccgccggctccacgacgtcgaggcggagggcgcggcgagcggcggccgctacccgccgttcgtccgccattccctcgtcaacgcctccgacccaagaagatgtgcgtggggggccggatgcccggctcgatatcgagcgccggcgcgacgatcgtcgcgccgcccacgcaacggagggcgcttcctcgtccggagcgccacttcggtccgggcacgggggccggccccccgtgtccccggttggcggtgctggctgtcgagcctttgtggcgagccttcggaacgtccgttggcccccaaggttccggcccaccatcaccgaaaaatacgacggaagcgtcaaccccgccgagtttctccagatctacacgaccgggattgaggccgccgggggtgacgacagggtcatggcgaatttcttccccatggccctgaaggcggttctgtcaagtccgcaacaccataccgtgcatccccgcacacgcggtgatctacgcgttcaggggggcgtgcggcacaaccgtatgctcgagaagatcgcctccaaagagccccagaccaccgcgcagctttttgagctcgcggaccgtgtggctcgcaaggaggaggcctggacctggaactcctccggttctggtgtggcagctccggccgcccccgggtccgccgctcggtcagggcggcgggacaggaggaggaagaaggagttggcccgttccgacgatgagggtcatgtcctcgccgtcgagggcgcttcgcgggccccccgaaaggggaggcctgcgagcgacaaaaagaaggaggccggcgctcccagcagggagcgcccgaccggcaagtggtgtaccgtgcacaacacctccctccacgacctcgcggactgccgcgcggtcaaaagtttggctgagcggacgaggaagtgggaggaggagaagaggcaggagcgccgtgagggcaagaccccggcggctcccaccggtaactggcgaggtgaggccaagcagaaggccaccgccgaggacatcgacgatggcgacgatgacctggggttccaggagcctgaggccaccgtcgccaccgtcgatgggggagcgtgcgctcacgcttctcgccggagcctcaaggccatgaagcgagagcttctggccgcggcccctacccatgaggcgacgcggcgggcgcggtggtcggaggttgccctcaccttcgaccagaccgaccacccgccgtgcgttgcccggggaggacagatcgcaatggtggtttcccccaccgtttgcaatgtgaagttggggcgtgtcctcaaagacgggggtgcagccctcaacatcctttcccccgcagcctttgacgccatcaaggccccggggatggtgctccggccgtcccagccgatcatcggtgtgacgccggggcacacctggccgctgggtcatatcgacctcccggtcaccttcggtggttccgccaacttccgcacggagcgggtggatttcgatgtggcggaccttagtctgccctacaacgcggtcctagggaggcccgcgttggtgaagttcatggcggcggtccactacgcctatctccagatgaagatgccgggccccggtggccccatcaccgtccatggcgacctcaaagtcgcgcttgcttgtatggagcagcacgcggaccaccttgccgcggcgtccaagcccgcgggtggcgacgagagactcagcacctccgtcccggccgccccaaggcagcggatggtcacgtgcgacgaggtcccggtcaaggaggttgccctgggcgacggcccgtccaagaccacacgaattggtggtcttctggacgacaaatag

SEQ ID NO: 17538 - DNA, 342 bp, Oryza sativa
  unsure (1)..(342): unsure at all n locations
  Clone ID: PAT_MRT4530_23180C.1
ctaggagtntaggtaggattttnggtcttctgatggggaatcagcacatatcggttctctcccaagccttggttttgtatcatccctgccaactcaacctaggagttaggtaggatttttggtgtaatgctatcagatataccgagagaaccgatatgtgctgattccccatcagaagaccatgggaaagctctatgttagtatatattgtccatttgtcctatgtatgagctgccaggtgacttgttctgttcttgtcgtatggataaacattttgtcacaacattctcttgtcctagtatgagctaccattggaaagtagcagcattttattctcccgtg

SEQ ID NO: 17539 - DNA, 723 bp, Oryza sativa
  unsure (1)..(723): unsure at all n locations
  Clone ID: PAT_MRT4530_23181C.1
tccggggcgcccccccggtttcctctgggtggtncctgctcttccggtagtcccacaaagctcccccccggcccactgccgccgccgccgccgccgcccaacgggatggtggtcttctgggtgtcccgcagctggcaggtgctggcccacccccccccgtgggctgcttcctgacgcactgcgggtggaactcgacggcggaggcgctgtgtcggccggcgtgccgatggtggcctcccgcagtggacggaccacgccgatgaacgccgagtacgtggagcccgtgtgggggcccggcagtgcgcagtgcaggccaggccagccagccaggcgggctcgcggcgagggcggaggtggcgcgcgggatcgaggaggtgatgccggcgagaggacggcgagtaccggaggaacgccgcagcgtggatggagaaggccagggcggcgagccgggagggcgggagctcggaccggaacatcgccgagttcgtggccatgtacggatgatatgattttgttgttgcgcacgtgtgcgtgtgtatgttcgcacgtgcgagaaccattaatgataggtatcacatggaatcatatggatggattaaataagggatttattattactggagtaataataagtaaataaatatggcatgattttgtaaaaaaaaaaaaaaaatttgtgggtataattcgatcagtttgtggatgctaaaaaaaaaaaaaaaa

SEQ ID NO: 17540 - DNA, 1542 bp, Oryza sativa
  Clone ID: PAT_MRT4530_23182C.1
atggattgtatcgtgcgcgcgttaattacgctcgccgaccgaagcggcgttaccgtatctccgggcgagataaatctgctcacccagattcgcgcgctgctcaagagtctggtcaagcgtgtcacgctgcatgcaacgcagtacagcgcgttcctttacccggtctgtgaccagtcacagaccggtcagatcacgggcttcatcctaaccattacaggcaagccacgatcccgcgtcatctccgtctccgccgggagtggaggggccacaccgaccctccacgtcatcgtccacgtcaccctcatcccggcccatccagccaatcccagcccagcaaaaaatcttcccaagtggccaccagataagcctctccacagcgaggtagacatggccgcgccaccatggccctctcgtccccggcgctggccggcaaggccgccgcgaaggtgttcggcgaggggcgcatcaccatgcgcaagtcggcggcgaagcccaagcccgccgcgtcggggagcccgtggtacggcgccgaccgcgtgctctacctcggcccgctctccggcgagccgccgagctacctgaccggcgagttccccggcgactacgggtgggacaccgcggggctctccgccgacccggagacgttcgccaagaaccgggagctggaggtgatccactccaggtgggcgatgctcggcgcgctgggctgcgtgttcccggagctcctcgcccgcaacggcgtcaagttcggcgaggcggtgtggttcaaggcggggtcgcagatcttcagcgagggcgggctcgactaccctcggcaacccgagcctgatccacgcgcagagcatcctcgccatctgggcggtccaggtggtgctcatgggcgccgtcgaggggtaccgcatcgccggcgggccgctcggcgaggtcgtcgacccgctctaccccggcggcagcttcgacccgctcggcctcgccgacgacccggaggccttcgcggagctcaaggtgaaggagatcaagaacggccgcctcgccatgttctccatgttcggcttcttcgtccaggccatcgtcaccggcaagggccccctcgagaacctcgccgaccacctcgccgaccccgtcaacaacaacgcctgggcctacgccaccaacttcgtccccggcaagtgagcgccgccgccgccgtgctgccatggcgacgcatcgccttcagctaagctagctaggttgacgacgatgcgcgtctctgcaggagagtgtgcgtgtgtgtacgcggtgcagtagatgtacgtacgtgtaccgtatagatgtacgtattcgtgtggaccgcgtggatggatgtacgagtattggagagagggtgagatctgtaccggtagtgtgtatttctgtgcaggttctgaacctgatcaatgaaatatggtgttgtgaattaattataaaattagcttgtttaatcctgcgtgctacttaatgatataataattcttctgataaaaaaaaaaaaataaaaaaaaaacctgcagcccgggggatcca

SEQ ID NO: 17541 - DNA, 455 bp, Oryza sativa
  Clone ID: PAT_MRT4530_23183C.1
atgcgagcaagagcagatagagacaacgcaagacaagacttttaatctctcctgtagacaggaagaggaaaagcatgggggactcggggatggcgtccatgaggatacagaagagcctcaaagatctgctgatgatccccctacatcatgcattccatgtcctgtcggtcaccacatgctccactggcaggcctcgatgatgggttcatctgatagcccatatactggcggagtgttcatagtcaccatacacttccctaatgactatccattctaaccacccaaggtcccatttctcaccacggttttccactcaaacatgaacagcatcggaagcatctatctgacatccttcatgaccaatggagcccaacactaaccatcgccaacgtgctgctctcaatctgtaccatgctgactgatcacgaccctgatgatcctctggcccctgagat

SEQ ID NO: 17542 - DNA, 1295 bp, Oryza sativa
  Clone ID: PAT_MRT4530_23184C.1
gctcgctcatcgccatctctctcagctctcacagctcactgcatcaatggccgcggccaccatggcgctctcctccccggtgatggcccgcgcggcgccgtcgacctcctccgcgctcttcggcgaggcgcggatcaccatgcgcaagaccgccgcgaagcccaagccggcggcgtcgtcggggagcccgtggtacggcgccgaccgcgtcctctacctcggcccgctctccggcgagccgccgagctacctcaccggcgagttcccgggcgactacgggtgggacaccgcggggctctccgccgacccggagacgttcgccaagaaccgggagctggagctgatccactcccgatgggcgatgctgggcgcgctcggctgcgtcttcccggagctcctcgcccggaacggcgtcaagttcggcgaggccgtgtggttcaaggcgggctcgcagatcttcagcgagggcgggctcgactacctcggcaacccgagcctgatccacgcgcagagcatcctcgccatctgggcggtgcaggtggtgctcatgggcgccgtcgaggggtaccgcatcgccggcggggccgctcggcgaggtcgtcgacccgctctaccccggcggcgccttcgacccgctcggcctcgccgatgaccccgaggcgttcgcggagctcaaggtgaaggagatcaagaacggccgcctcgccatgttctccatgttcggcttcttcgtccaggccatcgtcaccggcaagggccccctcgagaacctcgccgaccacctcgccgaccccgtcaacaacaacgcctgggcgtacgccaccaacttcgtccccggcaagtgaagtgggggaccgtagcttagcagtggttaattgtggttggatggatttgtggccagcgagttcgttgtctttgggttggggaagatgggtttagtgcgacgagatgatgatcgagttggtgttgtgtacactaagaagatgaagaagaagatgatgtttttgcaataatgattttattcgtttcccaactaatggtctaggtacttatccgtggtgttattctgattagcggatttctcatctctattagatcggaaacaaatactccctcgatcccaaaatataaccatttctggctatgtatagtgtaaatatgtagtctaaattgtttatattgtggcatggaaggattaattagtgctttaaatttacgtatacaatagattgggtcgaatctacgaagataatggatcctctgatttagtgggttaaaaaaaaaaaaaaaaaaaa

SEQ ID NO: 17543 - DNA, 2544 bp, Oryza sativa
  Clone ID: PAT_MRT4530_23185C.1
atggcgggcggtggatccgacagcgccgtcctcgaggggcaacgacgagctcaaagaggatgggaagctagagttttggccgaaattgtttttgtggaacttttatttgttttctccaaaatcattttcgcagcggttggcatagggaaaattccacaatcgttgttcgctcttccgaggctggaaaatgtttaccttcaagaaaaccagctttctggttcactagaagacattccttaccctttaacttcatctctgttatgtattgacttagccaacaatcaactatcaggcccgatacccaactcactttttcatcttacaaatcttaattatctcattcttgaatcaaataaattcacaggcacagttgaacttagctctgtctggaagcagaagaatctatttatcctaagcctgtcaaacaatttgatatcactcatagatgatgaaggcacattaaaatatcttgatgcggtttcccttcttgacctttcgagtaatcaaataacgggggctataccaaattggatatgggagaattggaagggccaccttaatattttgaacctctcgtgcaacatgttaactactttggaacaatctccttctcttgttaatatgtccaatttagcttatcttgatctcagtttcaatagacttcaaggaagcataccaataccagtaaccacatccagtgagatcgcattggactactcaaacaaccacttctcttcaatagtaccgaactttggcatatatcttgaaaacgccagctatattaatttctccaataataaactaagtggcaatgtaccatcttcgatttgtaatgcaagcaaagccattatcacggacttatctggcaacaactacagtggatcagtaccagcatgtcttacaggaagtgtaaacttaagcgtattgaaattgagagacaaccaattccatggggtgttacctaacaatagtagagaggggtgcaatcttcagtcaatagatgtgaatggaaaccaaattgaaggtaaactacctagatcactatcatactgccaatatttggagctcctggatgctggaaataatcagattgttgattcttttccattttggttgggtaaacttccaaatctccgagtccttgtcttaagatccaacaaactcaatggcacaataaggggtcttaaaggttgtcaccaaaattgtaatcacttcaaaaggttgcaaataattgatttggcctccaaccatttctctggcaacatacatccagaatggtttgagcattttcaatcaatgatggaaaatgacaacgatgagggacacatattagagcataccacaaacacaaaaataccattgctctatcaggatattacggttgtcaattacaaagggggcactcttatgttcactaaaatcctaaccaccttcaaagtaattgatctctcagataactcatttggtggtcctattccaaagtcattggggaagcttgtttcactacgtggacttaacctgtcacacaatgccttcacaggacacattccatcgcagcttaattctctgactcagctggagtcattggatctctcttggaacaaactctcaggggaaatccctcctgagttagcttctctaacttctcttgcttggttgaatctttcgtacaacaacttgaccagaagaataccgcagggtaaccagttcgggtcatttagcaacagctcctttgaaggtaatgtcaacctctgtggaaagccactctctaaacaatgtgatactccaggctcaacatctccaagtgcatcagctccttcaggtaccaacagtttctggcaggacagacttggcgtgatccttttgttcatcttttctggcctggggttcacagtgggcttcatattggcagtctggtctagtggcgccatctataagcaatgtgctctttgcgctaacctgtgcggtgggccggtggcgcattctcttgaacacctggtggccctcgtggtgtggtggtggaagaagagggcgatgacgaagcagacggacaggacgggacatcccagtagcgatccattgattgccgactgcaatatctgcttgaaaagtgcaacatctggaaccttggataccatctcaccttcctctccgcccccctcatcctcacccccttacaacctcatgccccattccggcgaggtccaagtggtggcggttatcacggattgggatgtgcgggaccgcctgaggtgggggagaaggacagcgaggggtggaagtctcgccgcagctggtggcggcgccgccgcaggccctccagggcggcatgcgcttcagccttcaggcagggcgtgcaccatgcaggagagggagatcgttccgagctcgccaggaggatggccgggagagatccccgcccttgtgcagacgctgccgcctctgacccgccgctgcacatcttcaatcgccggccgggtcgccgggaaagcagccggaggcgggacatggccgcggccccgtctggtgttcgccgcaacataa

SEQ ID NO: 17544 - DNA, 583 bp, Oryza sativa
  Clone ID: PAT_MRT4530_23186C.1
taccttcgaagatctcgttggtcaaggttcatcagccaaaagctccatttatttcaggtatatacaatgttctaggtaaattcttggacggtagaactacgggattagtggagaactggacatattacagattggtagatacgaacactacatcggttacttctaataggtgacaaaaagtgatggtaagtggtactagtaacgactaatgacagaagataacgaggaacagcacggttaatgcttttagatgcgtcgaatgcctcattttttcttcacattttttcacagctatcttgttctgcaggatcctagattggagactttcgattgggttagtgccagtgtggagtagaagccttgggcttccttccaccaacagacaagttatttgtgtttgtcttgctggatatctgagaaggtcgccgcggtgggggaggagtgcggaggtgggttgggagcccttgtctttatacttctcagtctgggcaggagttgcactctttgatgaggatattgagatctcgctgtctcctgaatgccttgtttggctttctgaagctttctgggactcgattggctc

SEQ ID NO: 17545 - DNA, 1563 bp, Oryza sativa
  Clone ID: PAT_MRT4530_23187C.1
atgggcggggtggcgaccggcacgggggcagtggccaggggcctcgccgggggagcggacgacgacgatgcaggcgtagcccggctagccagctccgagacgaggcgctcaacgaatggaaaaattccacaattgttgttcactctttcggggctgaaatatgttgaagttattggaaaccagctatctggttctctagaagacatcccttctcctttaacttcatctttgtcatcaattgacttaagcgacaatcaactatcgggcccgatacccaaatcatttttccagcttacaaatcttaattatctcaatcttggatcgaataaattcataggctcggttgaacttagctctgtctggaagctgaagaatcttgatttcttaagcctgtcaaacaatttgatatcactcatagatgatgaaggtgaaacagtgtccccttctcttccaaacattagatacttacacctggcatcttgcaaacttacaaaaattccaggcacactaagatatcttgatgcgatttcggaccttgacctttcaagtaaccaaattaccggggcaataccaaggtggatatgggagaatcgaacgtaccagctcaatagtctgaatctctcgcacaacatgtttactactgtggagcagtctccttctcttgttaatatcgcatatttaacttatcttgacctcagtttcaatagacttcaaggaatcataccaataccagtaaccacatccagtgagatcgcattggactactcaaacaaccacttctcttcaatagtaccgaactttggcatatatcttgaaaacgccagctatattaatttctccaataataaactaagtggcaatgtaccatcttcgatttgtaatgcaagcaaagccattatcacggacttatctggcaacaactacagtggatcagtaccagcatgtcttacaggaagtgtaaacttaagcgtattgaaattgagagacaaccaattccatggggtgttacctaacaatagtagagaggggtgcaatcttcagtcaatagatgtgaatggaaaccaaattgaaggtaaactacctagatcactatcatactgccaagatttggagctcctggatgctggaaataatcagattgttgattcttttccattttggttgggtaaacttccaaatctccgagtccttgtcttaagatccaacaaaataaatggtacaataaggggtcttaaaagtggttaccaaaatagtgattatttcacaaggttgcaaataattgatttggcctccaatcatttatctggcaacatacattcagaatggtttgaacatttgcaatcaatgatgaatgtaactgatgacgaccaaatattagagtatcgtacgaaagcaagtataaaatcgctctatcaggataatacggctgtcacttacaaagggaacactcttatgttcactaaaatcctgaccaccttcaaagcaattgatctctcagacaactcatttggtggtcctattccaaagtcaatgggggaagcttgcttcactacatggatttaa

SEQ ID NO: 17546 - DNA, 2168 bp, Oryza sativa
  Clone ID: PAT_MRT4530_23188C.1
ttaaatccatgtagtgaagcaagcttcccccattgactttggaataggaccaccaaatgagttgtctgagagatcaattgctttgaaggtggtcaggattttagtgaacataagagtgttccctttgtaagtgacagccgtattatcctgatagagcgattttatacttgctttcgtacgatactctaatatttggtcgtcatcagttacattcatcattgattgcaaatgttcaaaccattctgaatgtatgttgccagataaatgattggaggccaaatcaattatttgcaaccttgtgaaataatcactattttggtaaccacttttaagaccccttattgtaccatttattttgttggatcttaagacaaggactcggagatttggaagtttacccaaccaaaatggaaaagaatcaacaatctgattatttccagcatccaggagctccaaatcttggcagtatgatagtgatctaggtagtttaccttcaatttggtttccattcacatctattgactgaagattgcacccctctctactattgttaggtaacaccccatggaattggttgtctctcaatttcaatacgcttaagtttacacttcctgtaagacatgctggtactgatccactgtagttgttgccagataagtccgtgataatggctttgcttgcattacaaatcgaagatggtacattgccacttagtttattattggagaaattaatatagctggcgttttcaagatatatgccaaagttcggtactattgaagagaagtggttgtttgagtagtccaatgcgatctcactggatgtggttactggtattggtatgattccttgaagtctattgaaactgaggtcaagataagttaaatatgcgatattaacaagagaaggagactgctccacagtagtaaacatgttgtgcgagagattcagactattgagctggtacgttcgattctcccatatccaccttggtattgcccccgttatttggttacttgaaaggtcaagaagggaaatcgcatcaagatattttaatgtgcctggaatttttgtaagtttgcaagatgccaggtgtaagtatctaatgttaggaagataaggggacactgtttaaccttcatcatctatgagtgatatcaaattgtttgacaggcttaggataaatagattcttcagcttccagacagagctaagttcaactgtgcctgtgaatttattcgattcaagattgagataattaagatttgtaagctggaaaaatgatttgggtatcgggcccgatagttgattgtcgcttaagtcaattgatgacaaagatgaagttaaaggagaagggatgtcttctagagaaccagatagctggtttccaataacttcaacatatttcagccccgaaagagtgaacaacaattgtggaatttttccaccatagatgcggcaagaggtgtcattgccatcatctcgtcgatctcgcggcgatgggtgacatggccgcgctggcggtggcggcgtgggcagtgaggccgacgagcccatcgtgcctgcgcaaggtgattcgcagcaccaagccacgggggctcgatgaggagactgtcgtagcaccattcgttgagcgcctcgtctcggagctggctagccgggctacgcctgcatcgtcgtcgtccgctcccccggcgaggcccctggccactgcccccgtgccggtcgccaccccgcccatcgccgcgtccactggtggagaaaccatctttgaggcagccgacggcggcaggatgggggatgggcgcgggctggcagcggccggccggcggtggcgggatggaggtggccgggcgcgggctggcggcagccaggggggttacgaaccgggactaaaaagcacttctccaccagtggtcgtcgtccctaacacgctcgcttccatctccttcctccgtgccgctcgtcccaccgcgcttcgcactcggttccccggccgccgattcccctcagccgttgccctcctaggctcgccggcgtccatggtagagaagctccccggcggcgagggtgccgcgtccgccggcggggacaacgaggaacagatgggtcgcagcggctgctggcggaggagcagcgagagatggagaggggggatcgctggctag

SEQ ID NO: 17547 - DNA, 1914 bp, Oryza sativa
  Clone ID: PAT_MRT4530_23189C.1
atggacgagtgggtcatcctcagcgacggcgagagcaacacggcggcggtggtcctcgacggcagctacgacagcgacggcaccgcctcctccgacgatatcgacaccgccgcctccgatgtctacaactacatggccaggtcacgccccctcgtctcccacttcggcggcggcggcggcgtcgatggcggcgcgccgccaccgccgctattctatgacgggcctctaggagccgtcgtggcggcggcggcggcggcggcgccaccagcgcctccgaagttcgtgaaggaggttaggtactcctatggcgaggcgctctcgatcggaggaggggatgagatcaagcagaggccggcagcttcggagatcgaggcaacaactgagcgctccatcgacgccgcgagccaagaggacaccagctgcgagatcggtaacgccggcgttgtgatctgcgacggcgacgtggtcgagcacacggcggacgtcgacggcggcggcgcgactaccgatgacatctccgtcgttgatgtcaccgacgtggccgagcaatcggcggatgtagacgatggcggcgcgaccactgatgacaactccgtcgttgaagtcacagacgtggtcgacaacacggacatggcgcatgttgacgacggcggcgcgactactgatgacgactccgtcgttgatgtcaccgacgtgggcgagcacacggcggatgtcgatggcggcggcgcgaccactgatgacatctccgtcgttgaagtcaccgacgtggtcgacaacgcggacatggcgcatgtcgacgacggcggcgcggctactgatgacaactccgtcgttgaagtcaccgacgtggccgagcacacggccgatgtcgacgacggcagcgcgagcactgacgatggcatcgccgtcgttgaagtcactgacgtggtcgaccacacggccacggcgcacgtcgacgacggcagcacgagcaccgacgatggcatcgccgtcgttgatgtcaccgacgtggtcgaccacacggccaggtcgcatgtcgacgacggcggcgcggccgctgatgtcatctccgtcgttgaagtgccaccattgacgacagtatcagccgctccgccgccgccgccgactacgagcgaagtcgacggcgagcatgagagcagcatcagatcgcctcctactcctgcagttgtggctgcatcgagggctactaatccgccgccgccgcgacgaaggacctcccgggcgccgagactgccctggaggtacagaccggtcatcgacgagcacaagagcaaatctggcgacgcgccaccgactccccccgcagtgatggtttcaccggcggcgacttctccgccgccgctcgatgcaagaacgtccggcgaagtcgacaagtccgtggtggtgatcaacgacgagcctgtccatgtgcttactgcagcagctgctgcagcagcagcagcagcagcagcagcagcagcgatgaaagcaacggcgagcgactccggcgggaagaaggacacggcgcacggcggcggtagcaggtgcatggtgattcgggaggtcggggaggaggaagaagcatcacaccatgccgcctacgaagctcgcaggcgcgccgaggcgttccacgccaccatcaaagccgccaccgccgcagaagctccatcccagccgccgccggccgatcgccgccatggctcggggcagtccgccgccctcgaggctcgcacccagccgccgcctgctaccaccaacgccgccgcagaagctcgaaccaaggtggccacggagcgacggcgtggctcggagccgagcgcggcggacatggcggacttcgccatagcctacctgttctcctcctcgtgcatgatcctctactcgtttcttcttgcttcgtatttctactag

SEQ ID NO: 17548 - DNA, 364 bp, Oryza sativa
  unsure (1)..(364): unsure at all n locations
  Clone ID: PAT_MRT4530_2318C.1
ggggaccgggaagcaattgaccccacaaaaaaacgggcccagaaacccaggtgaaccccgggaacaaaatccccccccatttgacttggccaaaggggggaaatgggctaacccccatttacaaaatgagggggggaaccgggcccaaaattgggaaaagggccaggaaccagggttttctttcccggggccaaaaaaaaccccccccaaagcccccacaaaagggcagggcacccaaaatttttcccggggggccacccgggggggggcttcgggggcgggggccccgggaaccaaaacccaaaccggtaaaaggcccccagggggggccccccgggggggggggaancccctaaaccaaaac

SEQ ID NO: 17549 - DNA, 240 bp, Oryza sativa
  Clone ID: PAT_MRT4530_23190C.1
atgtggttgtacggaatatgctttgcaagagaggccccgaagaccgttccttatgacggccaagccatggcgcarcggcgcgacacgggagaggtgagggcggcggcagggctcaccagagtagcggggacggtgacaacagtgagggcgacgaggaagaagaagtggccggctcgggttgacgtcgcggatggagctccagggcttgccgagcttggagacgacgtggcagtggcgtag

SEQ ID NO: 17550 - DNA, 258 bp, Oryza sativa
  Clone ID: PAT_MRT4530_23191C.1
atggcggcggcggcggcggcggcggcggccgaggtggtgagatgggagatgggagagggggatccagggccggcgggctcctgtgccctcccgccgaggatgggaggaggtcgacgagcgacggtgctggctcccgaggcctcccatcgtggatgggaggaggtcaaagacggtggcgtcgacgacggtggctcccaaggtctctggcgtggatgggaggaagtcgaagacggcagcgacgatggcggaggacagtag

SEQ ID NO: 17551 - DNA, 277 bp, Oryza sativa
  unsure (1)..(277): unsure at all n locations
  Clone ID: PAT_MRT4530_23192C.1
ataaattggttatacaattcaaataatttttttttttttaaactctattaactaaacataaatattaaaccactccaatactcccattctattacataaaacnacnacnacnaaccaaccaaaagatccataacttatctaaaaaaatctacactactaataacatataacttatcacccgctgtataaaaacaaataagggaggaatagcaaaacgcatcattttatgaaacataatttaacaccgcaagcaaccccaaaaacaacttgctaaaaa

SEQ ID NO: 17552 - DNA, 171 bp, Oryza sativa
  Clone ID: PAT_MRT4530_23193C.1
ggcaaggaaacgccattaaattgcccaaaaccaaagaagggcaactcaacaagcagtccaaggaaaaaaaaagttcgccagaaattttacaaaagggcccctttggacaacaggacggtcagtcagtcacccacgggcaccaattaaacaccgaccgcgtgggcgaaccct

SEQ ID NO: 17553 - DNA, 548 bp, Oryza sativa
  Clone ID: PAT_MRT4530_23194C.1
ccccaggctttacactttagtgcttccggctcgtatgttgtgtggaattgtgagcggataacaatttcacacaggaaacagctatgaccatgattacgccaagctctaatacgactcactatagggaaagctggtacgcctgcaggtaccggtccggaattcccgggtcgacccacgcgtccgaactaaccaatattctaaatgatttacaatatctctgaaactggtagtactagctcgtactctacaatcgtacaccgcaggaatcataaccctggtactatactagtacacgatttaactataacaagttcttaaaataaaacgacatgccgaatgggtcaatccagcacggcgaaggacaggcccacgggccagccacgccacagttcttggaaaggactctttacacgtccaatttattgtttctctattttccatttttccttttcctttttatatacatacacacatgctctcattggcacaccaacaacacatgtcacacgacatctattaaaaaaaaaaaaaaaaaaaaaaaaaaaaaa

SEQ ID NO: 17554 - DNA, 539 bp, Oryza sativa
  Clone ID: PAT_MRT4530_23195C.1
ggccgccccttttttttttttttttttgaaaatacgaaaagtaatcgcgttagatgatggacagaacactacaccaagtacaaaatcacaccgagtacaaaaatcacgatcatgcaccgctaataaataaatgcctgaactgtacaaactggtccaaaaatgaagaatggatgaatacacaaagcagtattgcgatgctagtactaaagagagagagagttttgcctctgcctcatgatctcatctcatattctcatcccagtagctgctgctataggcataaatcagtgcacgaggtaggtgatggcgagcgcggcggccatgagcgtgtacgccaccgcctggtccaccacgccgcggtcgacggcgatccgccgccgcagccgccgcggcgccgcctccgccgccgccgccgaagtcctcatgctcccttggctgctttttgctggtgtgtgcgatcgagattggggaattaagagcaggtagagctcgtggcaataataatctcagtaaattgctgctgcctgcgtgtcggccgg

SEQ ID NO: 17555 - DNA, 494 bp, Oryza sativa
  Clone ID: PAT_MRT4530_23196C.1
ggtgctaacagagagaatattggcgccacagcctgcaagattcagatagttggtatgcacttatcagaatgtcgaaaaaaaaaccaagatggtccaattttttaagatttgcacatcaaggacgagattaaatgtagttctcgtaagcattaattttgtacagattgtttttctgccgggcatagtttgtgcagattggaaaattctaaatatataatgcaatcattttaataagcgcatacaggtcatagtatatctgtttttctaacgttgaatagaatacaactgccacagtttctcgcagaaggtttgataagatggcaaatgataagttgcttaaaccaattttgcaagctgttttaattaattgaaatatacctagttcttcaaaggtattcatgatcttcttttagcaagttatgcagatgaatctacttttgctgacctagaggatgcttattccatcaaaacaaacacagtttagaaataaacag

SEQ ID NO: 17556 - DNA, 4779 bp, Oryza sativa
  Clone ID: PAT_MRT4530_23197C.1
atggcttcgccgcttcccttttgctctctctctctcgcccttccctccttttggattttgagtgaatataatgtaaaatcggagaggaggagaggaggagcatttgagattggagagggggagggggaggaggaggaggacgcgagtgaagagacgaccgggagcatggatcgcgccaaggcagcagcgcgcaaggacaaggcggcggcggcggggaaggagaccgccgtgtcccgcgccgtcgcgttggacgacaccgcgctgctgctcgcggcggtgggaagcttcaggaaggagggctccgacgcgtcgcggatgctggaccaggagatgtccacgaggctgctccacctcgcctgcaagcacgacgccgtgcagtgcgccaggctcctcctcgagggcggtcacggtatcaccgcgtcacccgtggatgccagggaccagctcacgcggacgccgctccaggtggccgccgaggcgcactcggccaggtgcatcgagctgctgctctccaagaacgcgcgcaccgacctcaagctggtcgatggccggcctcttctcgcgctcgagatcgctctcttgagcagaagagctcaagttaaatggtcactggacaactccattgaggatcttctgtcttctctgcaggaaaagaaatgccaccttgttccatgtgtaggatctgaatgtagtgaggctctggcagagaaaaccagagaggttggggaggtggcctacagatatgccatggagggtcgtgttactgtgttggcaatgctgcttctggtggctgaagagaagatatcggcaccagtcagtgtagtaatagagggcgtcaggacaaagaaatcaatctactactctattgtggatgaggctctgtccattggggatgctccagcccgggacagcaatgagaggagaaaggccctgctcagtgagattcagctacttaaccaatttggggcagcgttatggagagatcgcaacattgacaagagaagcctgccccctctgcttaaagctgccaagctcccgaagtgggccattaaagatattgaacgctgctgcaggggttttctatggaaagggcaagaagaagttagtgggggtcactgcctcgttgcttggcgagtggtctgcaggccggttgagtgtggcggcctgggcatcagggacatcgatcgcttcggaaaggctttaaggttgaaatgggaattcaacagactagagcaagaagacagaccttggacaatggtgcggtggaaatctgataaggatgttcgcgacatcttcaattcagtggcacagcacattgttggagatggcaatcgcactgatttttggagaggtaagtggctgccccgtggaggaagcattgcaaacaactggcctattcttttctcctttgtgggtcgcacgaagatcaccgttgcacaaggcctgctaaacaacagatgggtgagggatttgcaggggtctctctctaatagagctcttgttgattacctggcgctttgggatgagctgcagctcgtctcgcttcagagtggtgaggcagattcagttttatggcggttctcagctaacggggtcttttcggcttcttcggcttatgagtttctcttctccacctcaatcaaatgcccccacggggagctgatttggaagaccaaagcgccagcaagagtgaggttcttcctctggttggcggtgaaggggcgttgcctcacggccgacaacctcagcaaaagaggttggccacatgatcccacttgtctgctatgtcaatcggcgccggaggactgcaatcacttgctcgtcaaatgccctttcactaacagagtgtggcagcaattgaaggcttgggtgaatgtcacttttcctctccctgctcagcttggcatggaactggcagattggtggcattgtgcccgccgctgttttcagatgaggttcaggactgcttttgattcacttttcatgctggttggagatgtaaatgtcacaaagatgctcctgatgggggatgttgatgtcaatgaagccgatcctgaaggaaacacagcacttcactggtgccttagtggtagttcaagcacacaggagccaaggattgtgtggctcctgctgaagaatggtgccagagttttccaggggaacaaacttggtcttacaccagtacacagtgctgcagctaagggaaattataaagctcttcagtcacttctgcttcacgctcaagattgcgttgatacaccttccaagaccaaagaaaccccattgttcttagcagtgaagaatggttctttggactgtgtaaagcttctcctgcgttctggggctagcaccaaaaaagcaaagaccaatagatgtggcaacgtcccaagatatgcgtttcattcttacctctgcaaatgtggctccatggggggcaagagtaagagccattgtgctcccaagcaaggttccaagtttgtgcctcggcctaatcattggctgaagcacgactacactcggaaaatttttgttgggggcctcccaccttctgtgggcgctgagtacctcactgagttcttcactgctgaatttggacctatggaggaagcagtagtcattgggataaggatgggtgatcgggtgcaatccagaggattcggttttgtaaagttcaaaagagaagaggatgtgataagtgcaaaggaaactcatcatgtgtacatgcttgggaagagagtggaggtaaaggatgctgttgctagaggatccttgccttcagaaatccagaaaacttcttcattcaggcaccacaaccaggaggttccaaaggtaactcatcatctgttgggtggtgagctaaaggaggaacattacattaggaagcggaggcccttgccagagaagtgtcttccatcttggttctttatattcaggaagtggctgccaggatttcttgcagatgctactgaacgacttggagataggtacccattgagctccctgaagggtgatttcagagcaatttgcagaatggagcttgatcatagcacacttggttatcctaagctcagtgatttcatgcgctcccttcctggtatctgcagaatgtgtgtagtccctgtaggaagcggtcctgcaacacacaaggtcctccttccaccggtctcgcgaccgaagtatgtacccttgctagtaccattctcctttgatcatgatgagctcccagaatcagtgtcagatcatcagttcccgatgtctccacttaccactaatatcaccgaggactcccctcgtaacacagacagtcagcacggtgatacttgcagcgagagcaatgcggagagccagcaggatagtgcttccactgacaatggtagccaattgtacacttcaattgagcctgtatctacaagaaagcttgatgtagttgagcctctacctgcaagaacacctgatcgagttgaacctcagaagattggttctgatcctgcgagaaagactatttcccttgaatctggacttggtgtgcagattttcataggcaatggtagtgcaaatttgtcactacaggtcgacgtcaagaaagacgttgaatacatgctgatgttatatcaaaagagaactggaatcagcagtagaaatatctattttgtatacagagggaagaggctcaggttaaaccgcagcttactatcatatggtgtacagaaagacagtactgtgaatgttcgcagtagaattctggggggtgctggtacatcactggaggaatatttacacaagcacaagaatagtcttgtgaaaaaaaccgccttgtatgatggaagattcttcccagagttgacacccagaagcagtattcttttgagaacatgggtcttatgttttacaaaggcattcaaggagcgacattgctgggagcccaaatgtgaactctctcatttcaaggttatcaatggtcatgtcaaggttagcacaccagcaaaagggaacctcacaacgcattttctgcaagaaaatttatcttttctggcaaagacattaaaggatttcttcagaacaattggaacaaatcttgtctcagaatacccaccgtactttgaatattttatgaagtttatattgaaaatagatctaccatgcgtaccacatttgcagaaagttataattgaattgaacctatgctttatggattcatacatgagaggggtgctgacagtgagattgaagcaaaaatttgatagcctacctccaaaacaaagagccactttgatagataagatcaatcatatcacatgggatacatctcgaatgccaaatctttctacaattcctgtctttgataaaatcatcaaaaaagcaaaggatgatggagagccttacttcattgagaattcagtgaacttcgagtttaaggcgttcaatggatttaggttgagccgtgatgctcctatacatgctcctcaacacagatttgacaaaacatcggtaccttggaaggaaaattttccagataatacaatagaattgatgacacctgcttatctgggtgatttgcttcccgaaattatctggtgctttattctaaataaggtggacatcacagaggaattatcacaaagtcagactccatgctgtactatgtgccatcctataaaaacagatgtgggtgaatatcccacgacacagcaaactactgtgcaggataaacagcctacaatggaagatgttggatcctcctcatcaatgcagcaaaatgtatggaagaaaatctggtaa

SEQ ID NO: 17557 - DNA, 3965 bp, Oryza sativa
  unsure (1)..(3965): unsure at all n locations
  Clone ID: PAT_MRT4530_23198C.1
atggatcgcgccaaggcagcggcgcgcgaggacaaggcggcggcggcggcgacggggaaggagaccgccgtgtcccgcgccgtcgcggaggacgacaccgcgctgctgctcgcggcggtgggaagcttcaggaaggaggcgatgggccgtctccggaagggctccgacgcgtcgcggatgctggaccaggagatgtccacgaggctgctccacctcgcctgcaagcacgacgccgtgcagtgcgccaggctcctcctcgagggagggcacggcatcacggcgtcgcccgtggacgccagggaccagctcacgcggacgccgctccaggtcgccgccgaggcgcactcggcccggtgcatcgagctgctgctctccaagaacgcgcgcaccgacctcaagctggtcgatggccgccctcttgtcgcgctcgagatcgctctcttaagcagaagagctcaagttaaatggtcactggacaactccattgaagatcttctgtcatctctgcaagaaaaggatctgaatgcagtgaggctcctggcagagaaaaccagagaggttggggaggtggcctacagatatgccatggaaggtcgtgttactgtgttggcaatgctgcttctggtggctgaagagaagatatcggcaccagtcagtgtagttatagagggcgtcaggacaaagaaatcaatctactactctattgtggatgaggctctgtccattggggatgctccagcccgggacagcaatgagaggagaaaggccctgctcagtgagattcagctacttaaccaatttggggcagcgttatggagagatcgcaacattgacaagagaagcttgccccctctgcttaaagctgccaaggttggagatgtaaatgtcacaaagatgctcctgatgggggatgttgatgtcaatgaagccgatcctgaagggaacacggcacttcactggtgccttagtggtagctcaagcacacaggagccaaggattgtgtggctcctgctgaagaatggtgccagagttttccaggggaacaaacttggtcttacaccagtacacagcgctgcagctaagggaaattataaagctcttcagtcacttctgcttcatgctcaagattgtgttgatactccttccaagaccaaagaaaccccattgttcttagcagtgaagaatggttctttggactgtgtaaagcttctcctgcgttctggggctagcaccaaagtccagaacctaagaaagcaaagaccaatagacgtggcaacgtcccaagatatgcgtttcattcttacctctgcaaatgtggctccatggaaccgtagctcacatccaaaaaaaagtgtgacgaataaggaaagctgcaaagagttcctggaagattttggtgattatgacagtgatgatttaaatgaaagctttactgggcttaaaacatcagcaagccatcgggatttccggtctagtaatggttctgcccaagggggcaagagtaagaaccattgtgctcccaagcaaggttccaagtttgtgcctcggcctaatcattggccgaagcacgactacactcggaaaatttttgttgggggcctcccaccttctgtgggcgctgagtacctcactgagttcttcactgctgaatttggacctgtggaggaagcagtagtcattgggataaggatgggtgatcgggtgcaatctcgaggatttggttttgtaaagttcaaaagagaagaggatgtgataagtgcaaaggaaactcatcatgtgtacatgcttgggaagagagtggaggtaaaggatgctgttgctagaggatccttgcctgcagaaatccagaaaattgctccattcaggcaccacagccaggaggttccaaaggtaactcaccatctgttggatggtgagctaaaggaggaacattacattaggaagcgccggcccttgccagagaagtgtcttccatcttggttctttatattcaggaagtggttgccaggatttcttgcagatgctaccgaacgacttggagataggtacccattgagctccctgaagggtgatttcagagcaatttgcagaatggagcttgatcatggcacacttggttatcctaagctcagtgatttcatgcgttcccttcctggtatctgcagaatgtgtgtagtccctgtaggaagtggtcctgccacacacatggtcctccttccaccggtctcgcgaccgaagtatgtacccttgctggaaccattctcttttgatcatgatgagctcccagaatcagtgtcagatcatcagtccccgaggtctccacttaccactaatatcaccgaggactcccctcataacacagacagtcagcagggtgatacttgcagtgagagcaatgtgcagagccatcagggcgatgagtgctgcgggagcaacactgaaagccagcaggatagtgcttccactgacaatggtagcttactgggtgaagttactgtcagtaccccaaagcctgattccattgagtccatacctacaggaaagtctgatttgattgagcttgtacctacaagaaaacctcatctgattgacacagtcactacaagaaaacctgatttgattgtgactgaacctacaagaaaaccaattgtgattgagcctgtgcctacaagaaaaccaagtgtgattgagcccgtgcctacaagaaaaccaatggcaattgagcctgttgtgcctacaagaaaaccaattgtgattgagcctgttcctacaaggaaaccaattgtgattgagcctgtgcctacaagaaaaccaattgtgactgagcctttgcctacaagaaaaccaactgtcattgagcctgcatctcttactcagaagattgtttctgagcctatgaggaagactgatttgtttgaatctggacttgcaaggaggattggtttgattggttccagaccaacaacatgcttcgttgactgtccagttgaaaggccagcagtaactccaagcaactgtgaggctgatatgagattctctttcttccaatcacaatgggacaggttcctggctccatatcccaagagtgattactgcatcatctgtcgatcctatgatgctgtgatgcagcttgtcccatgccttcataagatttgtgttgcctgcatgatgagatgcaatgtcagggcatgcatgacctgtggcactgctggagtcatggagcgtgcatcagatcaaaggtgccagctgatggtggtctgccgtggagctgaggcgattgtcagatgttccccctgtatgcacagcatcgcatgtcgaggatgcttcctggcttcagtaacattactcaagggctgcaccacttgtggctgcatgattgagcacttcaagttttgttgagtaggcttacttccctgatacagtaataccagaacttacattactaaaaagaataaagcaaacagtcccacaatctgaaggagagatcagttcactctccttcgattttgctgcgctcgtgggatgagctaacaggctactcggttaggtgcgctcactcctgcaagcttgaggagtgctctttttgcttagaaatatgttctctcgaatgcttgatggacatgcttctgtaagcttgtgatgaggagtgtgttccctcccattttggcaagcttacactatatatgccatgtaatgtccactatctatctataatggcactcttttttgtaaattcagtactatttaagtaagatggattctgtttaaaaaaaaaaaatnaaaataaaaaaaaaaaaaaaaaaaaaaaaaaaactaaanaaanaaaaataaataataaaaaaaaaaaaaaaaaaaaaacataaaaanaaataaaaatataaaaaaaaaggggggggcccttttaaaagaaccaaattttacttccccgtgattggaaatttaaattttttttttggggcccctaa

SEQ ID NO: 17558 - DNA, 1087 bp, Oryza sativa
  Clone ID: PAT_MRT4530_23199C.1
tgcaggaattcggcacgaggcccgctcgcggcaaaaccaaacaccctatcttcttcttcctcaactactactcctgttcttgctactgcctagctcagctactctgcttgcccccaacctatccaacctactaacattgtagtacactacacacaagcctagcttagcttaggttgcagctgtgtgaggtggggatccagatcagctttgctgttgaagagatccatccatccatatagctagctgtaactacatacagttgttcattcagattcaggcattcagccactgcctgatttaggtgagggaagaagaagaaggttcaagcaactgcacaccagatggtccatctcttgccatgcacccatgctcacttgcccctgcctctcttcttctccatcctcctcctcatcttctccatggaggtggcacattcagatgcaaggaggttgccactgaagcttctagaagttggcaacatcaaggaggagcctgatgaaaccattggagagaagatggagatggagatggaagggaggaggctgataggatcaaggccaccaaggtgtgagagggtgtgcatgtcctgtggccactgtgaggcagtgcaagtgcccattgtgccacaggtgattcagaagacacaaaccaaagctgctgctgctgctgctgccgagcaagaacagcatgtggtggtgagtgctactgccatcagtgctgcagtgttcacctacagggtgaatggcctctcaaactacaagccattgagctggaaatgcaagtgtggtggcatcatccttgatccataatgttccaactcatggcagatcacttcaacattgtgcaaaaatgtaaacaacttgctcctctgcttgttcatctgaatttttctttctttgttgttctactactagctagtagctacttcctccttttgatttctatctaggccagagattgaaaatgtggggagatggagatgaaaagctgcatgtttgttgtacatttaggcagcaattttgtgaaaatgaatgaatgaatgaatgcctgatttaggcattgaatgcaaaaaaaaaaaaaaaaaaaa

SEQ ID NO: 17559 - DNA, 293 bp, Oryza sativa
  Clone ID: PAT_MRT4530_2319C.1
gcgtccgcggactcgtgggcggactcgtgggcgcctaggaggtgcccggggtactccttccgggatgcgatcctggtgggggcggcggggctgactctcgcctaggtgcgcgcggtcatggcggacctcgccggggacttccccggcgacgcctacagcctcgtctcccgcaactgcaaccacttatgcgacgccgcgtgccggcgtctcgtgcggtcccggattccgggctggggcaaccggcttggcaagatcggggtcggcttcacctggggcatcccggtcatcggggg

SEQ ID NO: 17560 - DNA, 876 bp, Oryza sativa
  Clone ID: PAT_MRT4530_231C.1
atggagcggttccaggaccggcaccacgtgtggctgcggagccgcgagcacggcctgtacctccacgccgacctcgccgacgggagcagcgtctacctgcacccgtaccgcgcgaccgcgcgcgcggcgtgggcggtgcacgtgctccaccacttcgacggccgcatgctcatgctccacagcgccgccaacgggcggtacctggcggccacgacctcgccgtgggcggcgaccgcggcgcggttcggcctcggcggtggcaaccgcgtcaccctgcgcgacctcgaccggctgccgatgttcgccgccggctggtttcccatcgtgtcggcatccggggacgtcctgctgggtcacgctagcgaccgattcctccgagctatcgacagaggggatggcaatggcgtcaccgtcgaggtgtccgacagccgcagaccgaacacgccctgggtggtggaggccatccccccgatagaatccatacctcgccttccacatcttgtgggcataggacacattgcacgggcaatccggttcgtgcgagcagagcgggcatctactgatgggacctttccccatgtcgcctgggcttgtttcgagttcaccgggaggtcattgttcaatctgaggacggagctggcgcgtaggttgaactttgcagtggtctccgatgtcattatgtgtgttcgagcgggcttgtttggacggctgactcctctgatcaccgatctgcctcccaacaatgtgaccatggagatcatcgttgtcacggctgggacgattggtgagatttcgtttttatgtacctgtgtattactggttatcgccttctcttttcatgacagttctatagattacatgctcggtattccatag

SEQ ID NO: 17561 - DNA, 599 bp, Oryza sativa
  Clone ID: PAT_MRT4530_23200C.1
gcgctctaaactagtggatccccgggctgcagtgtgaagaacaggaagagcggagagaggaaaaggagaggagagagatgcctgcgcctgtgtaaaatcctgtgaattccaactcgcctccgaatcctgcgtcctctggtcggcggcgccgccgccccagggccaccacctcgccgccggtaaaccctagccgtcgccgcacgcgggggaggagtcaacaacaggcgggaggaggggaggaggcggaggcagcgactgcccgccgcggctccgttttggtcggtctcattcgctcgttcctccgcccgaggcggcgccgccgcccatcgcctgttcgtcgagcagccgcgggtagatccatccggtggttcgcgtggccgcgttgaggagggtgtgctcggggggagcgggggcgtagtgagagttggcgcgtgcgtgcggcggttggtttgcttgttctggaagcttcgtgggcggccgatccggtttgggtgcaatcagcggcggcaatgtcgggatcgtcggcggcgggggaggatatagtgcagcacctctcgtctaattccaacccgtcctcgtccaagctcgccaagctggag

SEQ ID NO: 17562 - DNA, 659 bp, Oryza sativa
  Clone ID: PAT_MRT4530_23201C.1
atggctattttagtaacaggcggggcaggctatattggcacccataccgtagtagaattattaaatgcaaataaggagattgttatattagataatctgtctaattccaatcaaattgccgttgaacgcatacacaccatcactggcaaacacgccaaatttaacttaggcaatatcttcgatcgagttatttaacgcaagatttttgccgaaaatcaaattaatgcggtcattcattttgcgggttcgaaagccgttggcgaaagcgtgtttgagccattacgctattaccaaaataatgtaaccggttcgattgttttacttgaagaaatgttaactgcgggtattaataccattgtatttagttcttctgcaaccgtttatggcgatccaaaaacaatccctattgtcgaatcttgccccgtggggcaaaccactaatccttacggcacatcaaaatatatggtggaacgtattttagaagataccgtaaacgcaaatccacaattcagtgcggttgtgttacgctattttaacccgataggcgcacatccaagcggtttgattggtgaagatccaaatggcattccaaacaatttattgccttatattagtcaagttgccattggcaaactaccgcaattatccatatttggcaa

SEQ ID NO: 17563 - DNA, 207 bp, Oryza sativa
  Clone ID: PAT_MRT4530_23202C.1
atggagtcagaaaaacacctccatagttcaacctaccaggaaaaaggaacaggggcggattttcaagtagttggaacacattcagaaaactccgaacagaacagcaccttagtttacaagagggcaggagactatctagagatctttgcacctagaaaggggatacacagattcatgctcgagcaatcgacaccaaagatcgaatga

SEQ ID NO: 17564 - DNA, 464 bp, Oryza sativa
  Clone ID: PAT_MRT4530_23203C.1
atggcaggccaggaaataataaaaagagggggattgttttgcctggggaggagatcgcacaagagcagatagttaatggccccgggttctcctccctcatattgttcacgatgcctgtgatcgttgctctcgctcctggcgatcagctacgcacgcccaatttttgcatcgagcacggacatctaccacaaaaacatggagctacgacgcgattaccaagggacaatcggacatcatgttcaaacaattcttaagtcctcttgcgctccttctattacgagcaacgttgtatattccgtgcttgcataataaatcaaagaaatactgacaccaatcgaactgataatcctagaacgcacgatattaccagcgacgtccgcttcacccaggtcgattctcagacatataatactaattgtgaactccaatgaactacaccaaactgagtgactaatcagcccatg

SEQ ID NO: 17565 - DNA, 242 bp, Oryza sativa
  Clone ID: PAT_MRT4530_23204C.1
gataattctgttcaagtatgattgtcaatagaacagctgtggtgaaaaacatcgactgtgcaagctacgacatatagtattgtacattgttggaattttgttaaagacccacatgttctaatgtgagtcccaacatgtaagattttacactgcaatttcatcaaagaaacactatacagtgcaccctgtgaagacctcttgtttggaatacataatggaaacgtgtttaactgttttcaact

SEQ ID NO: 17566 - DNA, 367 bp, Oryza sativa
  Clone ID: PAT_MRT4530_23205C.1
atagtagtttaccagaagccgatcctccctgatgggggaagcttccatcggctacggaggtgaggacccccgacctgccggcggcatgaagaagtaacgctctgctgcttactccaactgaccgaggaaagcctttctgaaaatccacccaggctacgcttgactcacgagcaaagtaactcctgtgaaagctcgatacgggctttctaacatctatctggcaagctgcttgccagtgaccgggaaggttatcagacctgcatgctatattcctcaactccggcatcgttcttcgaaacaaatggcagctctgtcagttgttgactctccaccggtctgggtgatcgggtttgagggatatgagaaa

SEQ ID NO: 17567 - DNA, 210 bp, Oryza sativa
  Clone ID: PAT_MRT4530_23206C.1
ttactttttgtttgacaaaattgctctgaaacgacttggatctgtgggaaacacaaatgctctaacggacaggactctttcagggaattttgcaccccgttttcatggttggacaaaccctcgtatcattatttcacattgcacactttctgggggaatattaggaattttttaaaaacatggaaagcaaaacatgaggccccttgcaga

SEQ ID NO: 17568 - DNA, 177 bp, Oryza sativa
  Clone ID: PAT_MRT4530_23207C.1
atgggacgaaggaggggtgatggatggcggatgtggtggggaaaaacaagaaacaagcggttgatcagggacgacaacagatatccagcaaagcaagttgccaaagttaggggaggagagttgggcataggaatctcgtcggagttggtgaagaggagtgacttcgataacgatgag

SEQ ID NO: 17569 - DNA, 328 bp, Oryza sativa
  Clone ID: PAT_MRT4530_23208C.1
accacaggcgcggcgctgatcttgatcgtcagcgtacgatccgctcagcgttaatgcgttgccactccaatgcatcctcaagaatgagaggagcttctgacatcagggacacattgcttgcgcttcagatgaagtaagcatcacgctctggcatcttgagaacggaggcaatgcaaacgcaagttgttgtagagaagaccgtggcgacaactgaaagttatgatgatttgctggcatctctcccagaaaatgactgcagatgtgccctctatgatactgactttagtacaggggagaatgtgcaaaagagcaagactttcttgatcga

SEQ ID NO: 17570 - DNA, 831 bp, Oryza sativa
  Clone ID: PAT_MRT4530_23209C.1
taggttgttaaggactgaacattttgacatctaatcaagcaccctaccttaaaggctcttgtctttgcgcaagctaaaaccactaatgccttaagcaaaaagctagctgtcaatgacaaggtcttagagaacattaatgtcaagctagatggcttcgcttctgctttccaaaactagctgagctttactaagatgatagaaacccagctagctcaattggcttcataggtacctgcaagtgaatctgggagaattccggggcagtctgactcctccattgaaaatgtcaaggcgatcacaatgaggggaggaactaatggtatcgccaaggaagcaccatctagtaattcggctgatgaagaggttcaaccagagaaggctgtgctgcaggagtactgcgacacacggttgctgccgtttcctcaatggattaggaaaccatcggtggacgagcagttcactcgttttgttgaagtaatccagaagattcacatcaacatgccgttgttggatgctatgcaagtgccaacatgtgcccgttatctcaaggatatcctcaacaacaagagaccgctcccaacaaaggaggtggtcaagctgacggagcaatgcagcaatgccatactccacaagctcccagagaagaagaaatattcgaggtgtccaacgatcacctgttcgatcggggcacaatagttcgaccaagccttgtgtgatcttggagcaagtatcaacgtcatgcccaaacacgtctttgacaaattcaacttcacggtattggcaccaacaccgatgcgcctacaaagaaaatacagaatagtttggacaaaa

SEQ ID NO: 17571 - DNA, 1032 bp, Oryza sativa
  Clone ID: PAT_MRT4530_2320C.1
atgaagcctggaatgtatctggctggggctgatgtgccaactccaggagtccccacgccggctccgactagggacgagtgcctggaggcagtcgaagcggcgtccgtcgagcgaatcaccccgcgggggttccacgccttcacgccggccgcgtcgcccggtgcgccggggctcgtggcggtggcgaccaggcttgcgggctcggactaccgccacatcgaggtgatcgacatgagtgacgacaagaacgcctactttgaggatcgacgggtcgttccctccttctcgcacgacggcaagaagatcgcgttcgtcgggctgccggggatgtacgtggtgaactccgatggctccgatgaggaaaggcgtgatatacacacaagcatcgggccggatttcgcgatcgagagcacggaggtggacgtggtggcgatctccctcggcgacgacgacgacaaaaccatctcgatgaagaagctcaccgtgggagacgagaacaacgcattcccgtcgccgccaccggacgggaagtggttggtgttccggtcggggaggtcgggggcacaagaacctgtacatcatggacgccaaggacggcgaggccggtggcatccggcggctgacggagggcccatggtcggacacgatgtgcaattggtcccccgacgacgagtggatcgccttcgcctccgaccgccatgccccggggagcggcagcttcgccatcatgactccaagagcctcgtcttcacctccgactacgccgccgtctccgccgagccggtctccaaccctcaccattaccagccatacggcgagatctacaccgtcgacatcgacgggtccaacatccggcggctcacgcacaactcgttcgaggacggcacgccgtcgtggacgccatacttcctggacccccgggacgtaggtgagacgctgcaagcctcaggcaggtgcgcgttccaggattgccactggctcaacatcgaagatgcccaacctgaagagctcatctatggcaagagctgctaa

SEQ ID NO: 17572 - DNA, 2190 bp, Oryza sativa
  Clone ID: PAT_MRT4530_23210C.1
cccgggcggctccccgcgctccaggccccctccaaaaatctcctcctccgcttcactcgctccccttccctccgttccattcccttcctcttcgcccgccgcgagatcggtagaccaaattaaccacactcgcgccgccattctcttcttcttcttcttcagttgagctgcttgtcccgagctctgctcgtttcttggcgtcttctttcttcttcttcctcctcggtgcggttgcggtttcgttttcgttttctttcccctttttctgtcggttaattcggcgacgtctgatccgccatgagagcgagcagtttgttcactcagttccccttcgtctgatactgatccctcctcactctctgctcgatttctcatcgtctctgtaagcaagatccgatccccggaggccaaaacccctcccgaatcgcgtggttcttgtttgttctaatcatccttcgattgggttgggttgagcaatcgattgcgttgttgttcttgctgatccgaagatccaaaggaggaggaggagcttgaggttgaaatttctcgccggagatgagcgctgccgcacgcacgcctcgccgtacgggctgtcgctgctgctgctgctctccatcccggcggtgttcctcctcgcgccgcgcctcctcccgcccaagacgctcccctccatccccgacgccgacgagaccgacgacctcgccctcttccgccgcgccgtcctcctctccgccgccccggactcctcctccgcctccgccggcgccgcctccctcttcgggcggcggccgcagcccaaggtggcgttcctcttcctgaccaactccgacctcgtcttctccccgctctgggagaagtacttcgccgggaaccaccacctcctcaacctctacatccacgccgaccccagcgccgccgtcgacctccccgccaccgcctccttccgcggccacgtcatccgcggcaccaaggcgacggcgcgcgcctcggccacgctcatctccgccgcgcgccgcctcctcgccaccgccctcctcgacgacccatcgaaccacttcttcgccctcctctcccagtcctgcatccccctccaccctttccccaccttctaccgcaccctcctctccgacagcgacaacaatggcggctcgcctcgccgcccccgccgccgccgcagcttcatcgagatcctcgacaacgagccgacgctccacgaccgctactacgcccgcggcgacgacgtgatgctacccgaggtgccctacgacagcttccgcgtcggctcgcagttcttcgtgctcgtgcgccgccacgccgtcatggtggtgagggatcggaggctgtggaacaagttcaagctgccatgcctgaccaagaggaaggactcgtgctacccggaggagcactacttcccgacgctgctcgacatgcaggatccgcagggatgcaccaagttcacgctcaccagggtcaattggaccgactccgtcgacggccacccgcacacctaccgccccgacgaggtctccggcgagctcatcagggagctcaggaagtccaatgggactcactcctacatgttcgcgcgcaaattcgcgcccgattgcctcaagccactgatggagatcgccgactccgtcatcctgcgagactagatgaatgatgctgtgtttgcaagagatgaatgcaatgagggctgagatgtgatgaacaagcataagctgatccatccatacccttgcagattctccagagagtacaaaccaggaccaagccttggtttgctttgttttcttcaactgcactcgtcaaaaagatggtgcttctcgagagagcatgatggttggtgttggtggcaaaagggccccagctgcctcctatgtgagtatttttctctgtatcttttgttttccctttcgaatttgagctcaagtggtggccaaaatgaggaggggagaaggttgttggcacgtaattagagtagtagttagcatgatcatcctatgtattacatggaggaaaatctgtcgatacatgcagtgatggtttgtagtgtatgtttatatacaatatgtcaatatcaagccctttttttcgtccgaaatgtatcgtttgtatcatggaaaacctatcttgtgtttgaagtcatattctgccattaggtggttactgctaaaaaaaaaaaaaaca

SEQ ID NO: 17573 - DNA, 396 bp, Oryza sativa
  Clone ID: PAT_MRT4530_23211C.1
tcgagctcgagtacggcagctccctgtggagggaagcggaccgagtgctcgctgggcattctgaccagatcattgctgcgcggcctgaactgacgcgcaagcgtttatccattgatacgagacatccatacagcgcccgtaccctgggctcgtacgacaagcagctgggtgaccgataggaatctgtacacacacctaggccaagcgttgcgaacagatcaatatacagcacacaactgcttgtacgactcgccacacgggacatacgatgtatgtatatatcgtatactatgtatgaaacgctgccgatgacgtgaggcacgtacagatggaactgcttcaactgcacgacgagaacgctatattactaatgtcagagacgtcctgctaataaaa

SEQ ID NO: 17574 - DNA, 603 bp, Oryza sativa
  unsure (1)..(603): unsure at all n locations
  Clone ID: PAT_MRT4530_23212C.1
tcgggnacgaagcntgcttggccgccacacnncnatctaggtctccncgtgacnctcccctagatatctctctctgctcnctcgnttctctatnggcntgcncnncnctctgcaancngctcntaatttcnggctctcncacaatnacggatntccactgcaaacatactttctacggtaggtncacgggtagnctccntcgcacatcctattanccnatggctcggcnctcaaccaatncgntgctcncantggaatgcaaaggntngcagggggttnaagcgagcngccnttgcnaccancgnttctgcaattcccgagnncgncnnancgtnaggganncgnccncnggcncancgcncnctttancaccnatntggggnangcccccatcatcttgcatcgggcatntcgaggtntggctatgacttctgtctccncccgacngatgataattctctccctggctaagnaaannnctcctccnataacgnacctggannacctctnnctacacctccttccangggcaccctgccagggggggcctggnttcttcatgccctgaaanannngtcaacagcatatncctgccgnnaaatc

SEQ ID NO: 17575 - DNA, 146 bp, Oryza sativa
  Clone ID: PAT_MRT4530_23213C.1
aaacagaagaacatacgagtgcataatttatttatcatacatgctttcacataaaaggaagcacaaattatttagtggccaactcacacacatgagcagccaataattagcttcatacagaagggttgtaaccattttccggtagt

SEQ ID NO: 17576 - DNA, 342 bp, Oryza sativa
  Clone ID: PAT_MRT4530_23214C.1
atggggatgcagcagcggtcaaggaagccgaggtggcggcagacccgacgaatcgacgacgacgaggacttagaggtgatcaaggggatcatgccatgttttgagtcgacctctgagttgttcacaaactttggaaaatgctctatcatgctgatccggtgcttggaggatgatctggccgtggtctcgcacgtctttccgtacgcgatcgcggagttcccctataaataccttggcatcctattctccatcaagaaattaccaatagcagcctacagccgctcgtcgacgcggtccacaatcgtctgccagcttggaagtgcaaactcctggctatggtag

SEQ ID NO: 17577 - DNA, 298 bp, Oryza sativa
  Clone ID: PAT_MRT4530_23215C.1
tcgtttagatactgtgagacatctattactgggggttcatgttgaccatggaggtgtggataaaacctctacacgctacagaatccgtctgcggcagactgcccgaccatatcacacagacttgactatgtgaagaagaacccacagcagattattttgatgtggactatggcagagcatggtgacaataaggtaaagatggttaaagatacaacctactatacgcaagtgccgcgagatcacgtgattggcaatagaccttgcatattactgtaggacctatagtgtttcaataact

SEQ ID NO: 17578 - DNA, 1572 bp, Oryza sativa
  Clone ID: PAT_MRT4530_23216C.1
atggacgcccacctcctcctcctcgcgcgcccgcgagccctagccctcgccgccgcgcgagcccccggtggcgtcgccggcttcaggcggcccgcctcggcgcgccgggtggccccgcgccgcgtcgtacttcgaccggtggcggcgctggggggtggtggtggatttgcggaggtgggggagctgttcgggcgcgtcgaggcgttcctctacacggtcgcggatgcggccgtctcggcgtccccggaggtggtgcagggaggcggcggggggaccaaggaggcggccggggactggctctccggcatcaccaactccatggagaccgtgctcaaggttttaaaagatggtctgtcagctctccatgttccttatccgtatggatttgcaatcatccttctaacagttctcgtcaaggcagctacatttcctcttacaaagaagcaggttgagtctgcaattgcaatgaggtcactgcaacctcaagttaaggctattcaagaacgttatgctggtgatcaggaaaggatacagcttgaaactgctcgtttatataagttgtcagatgttgacccgctcgcagggtgcttgcctactcttgtgacaataccggtttggattggtctatacagagctctctccaatgtagctaatgagggacttcttaccgaaggctttttctggataccttctttggctggccctacaacaattgctgcacggcaaagtggccagggaatatcatggctatttccctttacggatggtcatccacctcttggctggtcggacactctggcataccttgttttaccagttcttcttgttatttcccaatatgtatcttctcaagtaatgcagccaccacagaacaatgatcctagccaacaaggtgctcaagctgtagtgaagttcctgcctttgctaattggttattttgctctctctgttccttctggactaagtctatattggcttacgaataatatccttagcactgcacaacaagtatggcttcaaaagcttggaggtgccaaaaatcccgtcaaagaatacattgataagctcgctaaagaagaatcaactaatcttggaaagcccgagcctgctattaagagtgatcctctccctaaagttggtaaacccccggccagtcaagagccagaaccaagtggaccacaacgtggtgaaagatttagaaaactaaaggaagaagagtcaaggagaaaagtgtttttggaaaaagcggaacagacagaacaggcaggcacacaagctggcatcgtcgatggaaaacagaattcagatgcatctggagacaacatagatgaacagaaactgaagttctctgtgctgttgacaaactcaaaacaggaatctcatgaaaatgaaccaattatagctaacggcaatggtggacttagccatagtacaaatgaaatgataccaaatggaagcatgaaagaggatataattcaggaatcaactgacagccattcttcagttatcgaccctacgtcacatgacgctcataaatcgagggacgaagagaacgaacaagatgcagtgtag

SEQ ID NO: 17579 - DNA, 2998 bp, Oryza sativa
  Clone ID: PAT_MRT4530_23217C.1
atggcggagacggtgaggctgcccgaacagcagcgtcgcaggcctctcaccattgccagcctccctgaagaaattatgtcggagattctgctcctgctgccgccaaaatccatcctccagtgccgtgccgtctgcaaggcctggcgggacgtcacctccgaccgcgccttcctcctcacccaccaccgccgccagcctccacagcgcctcctcaccttcatccgcgacgtgggcagtcaccacgatgacctggatatcctggactactgtgttgaagccgttgacttccgcacacaccagttccagtctctggcccggttcactggccaagattacgactgctcactcgaagacagcccattcaccgtccacgcttcttgcgatggtctcctgctcatgtcctacaacaactatttgcatctctgcaaccccactacacgtcaatggctttgggtctcccccccggcgcttcaacatgacaaggtcgtggggctctatgcacatggacatccttccgaataccgagtattgtactatcgagaatttggtttgggacgtacattctacatcaccactgttggctccaggaaggagaggcgcatttggccacattcatcatcagaatccctgagaaagtggttgacaaaagggacagaggatactgaattcaacaagcctttcctgtttcatggaaacctgcactggttgccacagtcaggtcgacaaaacaagatagtggtgttcgatacactggatgaggcgtttcggtggttgcatgtacctttcaagatgcacaatgtgtcctcattactcgagattgagggtagccttgccatgtcaaacagccatattggatcatcaaaggtggatctttggcttctgcaagattataagcatatggaaccgaattaccagattgatgttatctacggagtgatggaatccaagtatccaacaggaacagccgatcacgcacgtggagaggacctgggcggctacggcgtgtgcggagaagagaacaccaaccggctgcgcgtgagggaaggagccgcctgccgtggcgcgccccaggtgcacatgggcccagcaaccgcagccgcagccgcagcggaggcagcactcgcccgccgcgccgccgacccgctgcccgcgctccgccgccgcgacgcgctcccgctcccgctcccggcgcgcctcttcgcgcagctccacgctctcgtcctcaccgccggcctcgcgcgccattcccccaacttctccctcctcctccgcctcgcctcccctctcctccccgtctcccaccgcctccgcctcctcctctcctccccgctcccgcccaccaccttcctcgccaactccctcctcctcgcctcctcctcctcccgctgcctcccctccgcgctctccctctacgccctcctcttcctctcctcctcgccgccgctcctccgccccaacgccttcacctacccgccgctgttccgcgccgcgcctccggccctcgccctcgcgctcgccacccattcggtcaaattcctcggcgcccatgctgcctcctgcgaccgcgtcctcggtgccgcgctgctcggcgtcttcgcgcgctgcggcaggatcgcctcatgccgccgggtgttcgaccggatcgcgcaccccgacctgccggcctggaacgcgctgctctccgcctacgcgcgtcttcgtgccagggacgtggcctgcgccacctctgcggcggatgcaatcctcgagctgtttgtgcggatgctatccttagccatcgaacccaacgagatcacgctcgtcgccgtcatcggcgcgtgcggcgagcttggcgctgtcagccacggggtgtgggcgcacacctatgccgtgaagcgccggctcgccgtcaactgcatcgtggccaccgcgcttgtggagatgtacgccgggtgcgggaggctggacctggccgagcaggtctttgcagccgcttcggacagggacacgcgctgctacaatgcgatgctccatggcttggcagtccatggccatggccgtgctgccctctccctgttcgacagaatgcacggtgcgggcgtgccggtggatggcgtcactgtgctgtccgtgatgtgtgcttgtgcccatgctggattggtggatgaaggtctggactacttcgacagaatggagatcgaattcgggattgagccaaggattgagcattacggatgcatggttgacatgctgagccgggctggtcgacttaacgatgccgagaagctgatccacggaatgcccatcgtgccaaatgccgcgatatacaggtctctgatccgggcctgtggcattcatggcaagctggagctcggcgagaagatgatcgcagaattgatgcgacttgaaccggatgacagtggaaaccatgtcctgatttccaacttctacgcgacaacgaaccgatgggacgacgccaagaaggcgaggaaggagatgaagtccatgggcattgacaagagccctggatcaagccttgtagacatcaatggagttctccatgagttcttggtgggtgacaagacgcaccctgcctcaaaggagatatacgccatggttgaggagattgagaccaggttaagcgagtgcggacgccggtcgagcacctcgtctgcgttgtttgatgtcgaggaggaggacaaggcggatgcactgtcctaccacagcgagaggctcgccattgcctttgctctgatcgcttccaatccaggagctcccattaggatcatcaagaacctccggcgtaatgtgctgtagcgcggcggcgggcggacgcagagctagtggccgtgccaccggcggtgatgggtggacgcggaggcggactaggcggccggcggcggaggcgaggcgcccgggcggctggtggcggaggcggcggacctggcggccggtggcggaggataaggcggacctggcggccggcggcggaggcgccctagcggagctcgctcgaacg

SEQ ID NO: 17580 - DNA, 1245 bp, Oryza sativa
  Clone ID: PAT_MRT4530_23218C.1
ggtttgggacagcaaaagtaaaggaaatgccacctcatcacatatacaccatccacttgaatctccaggtttccataaagcaaagaagaacagaagtcatattggcaagttgggagcgccaccgccgtcgcggccgctctggtcctggtcgatcccccgggcgcctcctgtccggcacgaggtggtgtgttcttctttattggtgggggatgatttagatatactgaatacatcggcagatgattcaaggacggatggactgtatgatgatactgaggtggaatgtatgtcaaggatgtttagtggtgcgaatgcttcatctttgtcattggcatcaactgactcttcatattcatcaaattattccaccactaatgtgctagaagactcttatttgaagttgaaatgtgaggtggtaggagctagcattgtgaaaagtggatctggcatgtttgctgtatattctgtttctgtgactgatgccaatggtaatagttggtccatcaagaggagatttcgccatttcgaagagctacatcggcgtttgaaagaatattctcagtacaatcttcacttgcccccaaagcactccttttcgtcagggcaaggggtccctgggccccgcgtgtgttcgggggggtctgcaatgtgtttgcccaatttccttaagggggttctgcaggttccccgtgtatagaggtttgggattttctaagtgttgattcacagacatacatcttcactgacactctctcagttatccagacgttgtcagtcaatttagatgaaagatcaaaagagaagaatacaaaatcattcaattcttcccaagctttgaatgcgtatttggtctctgctggccactcttggcctgcccactcagttgtttccccgccgggggcgaaggataaagactttgatgctgttgatggtttgagatcaaggaagaggaacacggaacagaatttaggaattggtgttggcaacacaaatgccaatcttcatgaagacctctctggaagtgaccctgaacagaacgagcattcatttataataaattcgggaaattctaaaaagacactgtcaagtgaaactgactacccgcctcaaagtttggagtctgatggatactcagtagctcctaatgattggatggctccaaatcttagtgtgcccttatttcatttggttgatgtggtttttcagctccaagatggtggctggatcaggaggcaagcattttgg

SEQ ID NO: 17581 - DNA, 344 bp, Oryza sativa
  Clone ID: PAT_MRT4530_23219C.1
cggacgcgtgggcggacgcgtgggaaaaaaaaaaaaaaaaaaaaaaaaaaagacaaacgatgtaaaaaaaaacaagataacaaacacatacatacaaaaaaaataggggcggccttttttgaggctccatgctttcctccgcccgcttgcttacaacttggtgtcttttggtgtcccttaaattaccttccttggccgccttttaacaccttcgtgtttgggaaacccctggcattaccaaacttaaccgcctggtagcacatccccattttggcagatgctgtattaccaatgaggcccgccctgttggccctttccaacttttgcgcatgctgtatgtacaa

SEQ ID NO: 17582 - DNA, 442 bp, Oryza sativa
  Clone ID: PAT_MRT4530_2321C.1
tttgatgtcgcgattccagtatttgcatagtatggggatcattggtaccaggatatatgcgagactgtacaatatttggggtagcctatctaactgttgtcgatatggcggtctgaagctctgactcgtagtcgacaacagggtagtcttcctccttgagttcgtgtccggcgagatcagagacaatgctagatccttacggccggcctctgtaggtattgaatagggtcgatccaggcatatctttgatgtcgatatccggcagctcgtcttggcgtatgttggcttgtattggcttctggctttgtggcgtctatgttgattgtccgtctcccctctcctcctatagggccttgtatttatacccataggtgtccccttgtccaagtagaactagggaaaccaatatggatacaatccgagtagtccttgtcgttttcat

SEQ ID NO: 17583 - DNA, 326 bp, Oryza sativa
  Clone ID: PAT_MRT4530_23220C.1
atggctggtgtagaccgggagtggttatacagcatggcacatgcgctcgcactggacacatggacgtggccaagagaggacgttcctggcctagggttgatcgacgggggcgtcgatctctcttatggggccaatctccaaagaactccagggttaagcgtgcttggcctggagcaatttgggatgggtgaccgacccggaaattctttccgggtgcacacgaatgtaagtgggcccggcctgggggaggcgggacgttacagaatcctttggaattacatccgagcatataacaagtgcgaccacatgggtccccaggccgggac

SEQ ID NO: 17584 - DNA, 720 bp, Oryza sativa
  Clone ID: PAT_MRT4530_23221C.1
gtggatccccgggctgcaggtttttatctgaagccgctcgacttcaattgattgaactagaggaactacttcagcattttactcgtactgatgaactggacattcgaaaaaattcgaaaagcctggggacaaacttgacatctaaggagatctatcaagccaggctgcctcctggaacagcttctccgaactggatttggatttgggattgcaaagcgcctatgaaagttaaactgtttgcttggcttcttaccagagatcgcctatccacaaagcacaatctcctgaagaagaagattgttcaatcagacacttgcagcatctgtaatagcgggccagaaacgggttcacatctcttcttctcttgcacatttgcgacaagtttctgctatgtttctgggcaatctggaatcaccgacatgatgttgtattcagagggatggagccgtcgctccaatcatgcctgcaatgctgtgtaagcgaggctgccctttgggcagatattttgaagccagaagacagatttgtaatatctgcttggaaggctattttttctaccccccttcaaactctcaatgctttgtaatagaatcaaactgtgtaaccattcttcaatgcaatgacaaattcaggtggggaatctctccccccggtgagttagtcaaaaaaaaattactcttggaattgagatgtcagctccaatcaaaagtaccacggaag

SEQ ID NO: 17585 - DNA, 1636 bp, Oryza sativa
  Clone ID: PAT_MRT4530_23222C.1
gtgcgccaggccaaacacaatccaacgcgcaatcatccaatcattctctgttcagctctctcaccccagcgagatggccggatcaggagacgagcgtgatgctggctcggcagagtggccaaggcccattcgtcaccagggttgagctcgcgctcggcctcaagggcctcagctacgagtacgtgaagcaggacctcgtcaacaagagcgagctcctcctcgcctccaacccggtgcacaagaagatccccgtgctcatccacaacggcaagccggtctgcgagtcgtcaatcatcgtgcagtacatcgacgaggccttccccggagcgccggcgccggccgccgccctgctcccccgccgacccctacgagccgccgccgtcgctcgcttctcgggctcgcctacgtcgacgacaagttcgttccgggatggggtggcggacgtgcaggaggcaggagggaggagggagaagggggaggggatgaagcaactgatggcggacgtggagacgctgtagggaacccggaaggattgctccaaggggaagcccttcgtcagccggcgatacagcggcgaacgtggacggcgcggttgatgtccccgtctggtggctgaaagcgacctaggggcccgctggcaccccaggtcatcgaccgggacaaggcgctgcacttcgccgcgtgggcgttgccggtcggcgcgctcgacttcgcggagagggtgttgccgggggtcgacggtgcgctggagtccgctaagatgaggccggcaaacggcaactgcggctgccgcggcggcgtcaaaaaagccaacatcggtgcgtgtgtgtccgtctctgttactcccattgtgtgggtgaaattgagttgctgtttggcaagatgattaggtagaaattaatgtgatagttggaaaagactggttgtagttggcttcgtgtttttttaaaatcgttaacttgatttaagtttgaataatgaaaaaaatataaaataaagtcaaaaaaatgaaagtgtatgtaatcggcatcatcgattgcaagcagctatagaggacctacagacggaatgcggaaccacgatgacactataaactatctcaagaaggcgtggatggagcctttcaacgcgctagacccaaacaatgccgccatgccggactacaacaagctggtcgagttcgtcagggtgaagcgggctgccgctgcgaacaactgaagccgaaacaatactgtattggtcagttcccagttggtacgagatttgctctgctccaacaaagagtatcttaaggtattgatacctcacggtaccaaatcgtttctaaccgttgaatctaacaatgtccatcgatgggaaacgatttagtactgtaaggtaccggtacctcaattactttttgctgaaccgaaacaaatctcatcgtcactgctttgggcctttggccaattgtcatttttcaagttgcaaaagtgtgatgttcttccgggtcatccgttcgatcggatctccttgttaccgggacatcatttcttccaataaaggaaaatgttgaattttggtatttaaattgtttagtagtatgtgatataaaaactgaattttctatttcaattgcgtgcctagaaaaaaaaaa

SEQ ID NO: 17586 - DNA, 456 bp, Oryza sativa
  Clone ID: PAT_MRT4530_23223C.1
atgtgggccccacgggcagtggctcaagggggagggagtgggcggcggcatgctcggcacggctcaagccggccggccagccatggggcggcggcggcggcacgcgcggtcaccggcggtgaccggcgacgcgggagacggcggcggccggcgcgaaggcggcggcggcagccgaagacaacggcgcacgtgcggagggcggcggcgctcacgggggagaggaaaggaaggaggaaaggggattcctcaccggggcgatggcggcgaccggcgcgggaggggatgagcggcggcagcgcttcggaaaacggcggacgggagcagcgcgacctgggaaaaggcggtgaaggggttagggagaaaagaggagccgcggcacggcgaggagaaatggccggagatggaaacaatggcgagctcaccggcggcgcgagggaatcggagctccggcggtga

SEQ ID NO: 17587 - DNA, 400 bp, Oryza sativa
  Clone ID: PAT_MRT4530_23224C.1
ctcttcaaaaaatgaaagacacctttttttctatttatatcacccaaagtttcacatgtcacatttgatgatatctgagcttatttttaacttccgaaccactatactgttaaaactcattccaagacacccccaagggtggaaatggtcctgggtcccccatactccctaggggagataccatatctatatggcactttaaaagccaccagagcttgagcttgcaccaaattccaatcaaagtaaaaatccccaaactgctggagttgaaccttctcgccctatggcctgaacaaagtaaatgtcctgataagcaaattgttgcgccaccagcgcgagctgttgccaaacttggttgtttctcagttgaaacccaactgattgcaaaaaggggcttgcc

SEQ ID NO: 17588 - DNA, 453 bp, Oryza sativa
  Clone ID: PAT_MRT4530_23225C.1
atgcagtacaagaatgccacacacacaacagtggaacaaagcaacagtactgcaggagggagtgaaactggtggtttgtctctgaccgataatcctgacctggaagaagacatccttccagaaaaaggcaaaaacacagttggaaccgaaagtctgaaggttgagttttctcttgactgtactgtaacacttgtgatcttcctctccacgttgaaccctactaagctgcaggcaactgagatgcttctagtacttctcaagaaggagattaaaggtgacaaagagcaaatctttgttatctcaaagagtctagagaatgggatcacacccgaccatccagaccccaatcagttcactctgctttgcatctgcagtgtgaaggagccgggcaatagagacaaggacagagcattcttggagaatttggatcttgctagtcatgtcgcattctaa

SEQ ID NO: 17589 - DNA, 683 bp, Oryza sativa
  Clone ID: PAT_MRT4530_23226C.1
cttttttttttttttttttttttttttttttttttttttttttttttttttttttttttttttttttttttttttttttttttttttttttttgggggggaaaaaaaccgtttttggtaaaccaattaaaagtcaacccccccttaaaaggtaaacaaataagagggaagggccccaaaaaaaggttacccaaaaaaggaaagggagccattgaaaaaattggccaaaaagcaaagggggggggggaggtcttgggctttgcaaaaaagggtgggtaaaagacatgccgggggggaagtttcgagggtaacaaccgggggcgggaatcttggggggaattgaattaccaaaaagggccttttttttgggtttcaattggggaaaaaggttctccgcaagggggaaaattgggcccggttttttttccttttaaaaaaaactggatggcgctccacactacgaaaaaaagtccttggaggggtttcgaaaaaacgggattaggtttttaaagcggttgaaaaaaacggcccccttttttttaaaagggggaaaagttaagccaacgatttttttggaaaccggaccagggggatgaaggaagttttaaaaaacaaaattggggggaaaaaaaaaaagaaaaggcaccttggtggtgacaaaaatgtcctcctttggaaccttgg

SEQ ID NO: 17590 - DNA, 253 bp, Oryza sativa
  Clone ID: PAT_MRT4530_23227C.1
acggtgtgaaaacacctcattaaagcacgtgctcagatattgggtcatgccaccttgtgcacatactatgcaataagggcgtgattcgtaatgtgtagtgctacaaatccaagcttgtatcatattgctgtatgcaaggttaccgactctgtattgagaagacatcttggccttgatttgacatgttgggaagattgagaaaattttcaattgacgtttcaggagagaatatagaggatcaaaatttaagaac

SEQ ID NO: 17591 - DNA, 654 bp, Oryza sativa
  Clone ID: PAT_MRT4530_23228C.1
atggcggccgacggcggcgcgctgggaagaagcaggagaggggagagaggaggcggccgacgccagagaaggggaaagaggcggccggcgcgaccgcccgtgaggccgcaacggcaggagcggcggccggcgtcgcctctccccatccggaggcgggagctgcaccggctccgggcgcgggcagcgcgcagccggagcaggcggtgtcaacggtcgagcgcggctgtggcggtgggcgagcgccggctccgggcgcggccggagcagtgcggcggcggcaagtggcgggcgagcggccgacgagcggggagaatgggcaaaagtgggagcggcagcgatggcatcggcatgcggtgggagcagcggcggtcgtggcggcgcgtggtgggagcggcggccctgggggggggaggggaacggcggccgtggcaacgtgcggtcggagcagcagtggcctcggcgacgacggggaacatgggtgacggtaggagcggggaggagtcggcccgcggcgggagcagcggtggccgtggcagcgcgtggcgggccgcgacggcgggagcggcagaggcgtcgactcgaggtgggagcggcggtgacggcatcagcgcgcggtgggagcaggggaggccgcggcggcgtgcggcaacgtaa

SEQ ID NO: 17592 - DNA, 147 bp, Oryza sativa
  Clone ID: PAT_MRT4530_23229C.1
atgaaacgccgccaccgtccgtccggaaaccggaacatagttttcacctggagattgatagcgatgaagaaaaatgccataactacgcctccaagaaaggaaacggcgccaaagggcgtcgccgtcgtcatgccagccaagtgctaa

SEQ ID NO: 17593 - DNA, 690 bp, Oryza sativa
  unsure (1)..(690): unsure at all n locations
  Clone ID: PAT_MRT4530_2322C.1
ccggccgggatccgaacgctctagatcttatcaagtggcgtcggcggcgatgtgcgaggaggcgacgcggagcagggtgctggtggtcggcgccaccgggcggctcgggggatgcctcgtgcgcgccagcctcgccgccggccaccccaccttcgcgctcgtccgcccccaccacctcgctgtccccgactccgccccactcacgtcgctcgccggcgccacggtcgtgaagggatcgctcgaagattacccgagcctgctggaagcggtgcggcaggtggatgtcgtcatctgcgccgtgcccacgaagcaagcgctcgagcagaagcttctgattcgggctattaaggatgctgggtgcttgaagagatttattccagcggaatatggacttgatcccacaaaggttcaaatttgtggcatggaccatggcttctatgagaagaaaattgaaatacgccatttaatagagagcgaatgcattcctcacacctacatctgctgcaacttcttgatgcgttatttgcttccgtcacttgttcagccaggactcgatgctcctccaagagatgaagttaagatatttggtgatggaaacactagaggagtttttgttgaagagactgatgttgctaaattcacgatctgcaccatagatgatcccaggacattnaacatacgctgtatctg

SEQ ID NO: 17594 - DNA, 1032 bp, Oryza sativa
  Clone ID: PAT_MRT4530_23230C.1
gaaattcttcttggcctctgcaaactgggatgagaatttctctttaatcggagctatcaaaccctgaaaagctaaatcggctagctgagaatctgttagagccaagctgtagcacctattccttgtttccctaaatctctgaatgtagtctctcagggcgtcaacagccgatgcttcaccacattgagctaagaatcggctcgcatgctcataagtcgaaacattatcttgccctgaaaattttgagaagtttggaaccttgtatcgagcaggcaatggaaccctctcaaaccactcaggatatggatgccgatataagtttccagtatccttcggcttaagcccaaattgctccctcattacatctgcgatcatatcagcccattgtctctgctgaggtgccccttgcgtctgctgctgtatcggctcaaactgattaaactgggagcaaactgaggctggggtgaccccccttggtggaccctgaggtgaaggaggctccagccgccgccgcccgaaaccctagccgagccgcgccgccgtctccttccaaattcggccgatcctttccggtttccggtgaaatcaattgagggaaaatgatcttcgggatctcctctaccttttctctttccgccgccaccctcgccatcgcctctcgtcgccgttagcgccctagcgccgtgtaacctagcgccgccgtcgtcgccgccgctccagccgtgcgccgccgccgttccagtcgtcgccgtcgctcgggaaggtcgccatcgtggtcgccaagtcgtcgccatcctcgtccgctccttcgccgtcgctgaagactgccggaggaccgtcgccgccgtcgacccgatcttctccgccccttcgacctcaacgccgtcaccggtgagttcgccgcgtcgtcctctacccgttggtgccctccgttcgcgccttcgcgccgtcgttcgccggcgagcaagtgctcccgagccgccgagccgccgctggtgctgacgtcatcgctgacgtcatcgctgacgtcat

SEQ ID NO: 17595 - DNA, 198 bp, Oryza sativa
  Clone ID: PAT_MRT4530_23231C.1
atgaagatcaaagaaaggaaaaagaactacagatgggagcggcagccggagggtgttgctcagagccaagaagccgacggcagcgattggaaagtggagcttggagccgagtacccctgtatagctagcggtggagctcggacggtggcgtggactcctcctaaccgggtgttgtcggatccgattcaggtgcagtag

SEQ ID NO: 17596 - DNA, 1961 bp, Oryza sativa
  Clone ID: PAT_MRT4530_23232C.1
agtcacaacagtgatatgcaaagtcaaattgatgtgtatacagtggctagtagcttcaggtgcttcgactgcacccagtttgaagaaattgtataaacatagtgcgagctagatctctcacaacagtgatatgcaaagtcgaattggaggatatacagtggctagtagcttcagtttcgcagcagtgacatgaaccgagtttaaaactataatatactcttagtcataacaacagcattggataattctgccatgttatgagccgtctgatagtgaggcatgaaatatagaattggtaccaggcttgcgattataaccgacaaaaaacaaacctcccacaattaaaccttggcagcctccatgtaggtagggatttccttcataaccttgagagcagttgcaaaggtaccctgagcggctaggtcaacaaccaagtcgagcactagaggaaccccggtgcccttatttcgatactttgaataaagttccatcgatttggcatatgaggtcttgaatttgaaccagttctgctccacgacgaaagcgtagacacacgggacgccggagtagttcacaccgcttatttttaagaatgagggctggaaagccttgagattacctgggatggaagcctggcagcagcccgtgttgccattgcattgcgtgctattatcttcgacaatattgctatcgacatcatcacagaatgatcggcatccgaccgtgtaatcaggctggttctctccctgaccaacgatgatcgctgtgataccacacccgactactgcaaactggttcttggtagagattgtcagatagggatagtcatctgctaagccaccatcgtgcactacccatggaatgccgacggctttaccggtgaggttgacgccgcagcttgttgctatgcgcttctggatgagaacctcgccctgggccagctcgaatcgcaagaccttcaacttcttgtgctcctggagataaaccgcatggtcgtcttcgcagtagacgcggaagggtggtccccggaagcagccatctatggtgccaaaaggatacggcatgctgacattgccgcacttgtctgggcagccgggcaacgccgcgaaagctaggctgctggtgctggcagcggtatgcttcaaggtcagggtggtcgacaccacaactagcagtgatgataataacttctttcctttcctgctattggtgtgaagtgtctccgcctttcctctgccattgttgcctagcaggttgcccttgcccatgtggttgtcttcttgaagcatgagatcgatgtctccttcgatgacctgaactgctgttgtgcttggtggtaccaccagtgctgtttgtctggttgagtggctccgttcctgaggttgaagttgtggtgtcagttgagaagtatttgcacctagcagatcacgaacatgctcaatatccttctcatcaaacactttgcggcaaacttcagtagttgctgctgtactactcttcttcgagtcagtatcatcattctgtagccattcccaccatctcataatgcagtcactgtggaagcagtggtagcacgacatcaacttcataaatggcaaagcagaaccatcattctctttgactaaaggatatagacaaagtgggcaatccccagctggatgattcatatttgagagcatctccacagcttcctcacacagcgtcacaagcatcgggtagcaggaaagttctcttgccttgttctggatgctgctaataagatacacctgtcgattctcatcaaggcccttactttccacggcataaacatgaggaggtgcttttggatactgagaagatgctttaattccaagaaatagctccacgaacgtcctttgaagttgccattccttacaccacattcccaccttcttattcccttcaccaccacacaatgcccactgcctccccgaagtacccat

SEQ ID NO: 17597 - DNA, 1191 bp, Oryza sativa
  Clone ID: PAT_MRT4530_23233C.1
atgccgtctccaacctcgtcggcgtcggcagcggccagggggagcgctggcgccggcgataccctacgcaactcctgccacgacttcgcgcgcagcctggcgcggctgccggccagcatcatggacggcctctccaggtccatggctcgccggagccgccgcccccgcgacacccagcctcaccctcctcttcctccgccgctgctgccggaggagctcttcttcgccgagttcgagcggcggtacggcggccgccacccgttcttctacgggtgccggctagccgaggcgctggggatcgcgcggcgggaggggaggctggtgttcgtctacctccacgacgccggcggcggcggaaacccctacgccgaccagttctgcacggggacgatgtgctccgacgtggtggtggagttcctcgacgccaatttcgtgtcgtggggcgccgtcgccgggagaggggaaggtgcggccatggtggcggcgctgcggcccggcagcttccccttctgcgccgtcgtctctcccgtctccgacgagagcatcgtcatcctgcaacaggtagaaggcccggtttcgccttcagagctggtggacattcttcagagaacaatcgatgagcaacgtgcatcctccagacagtcttggcctgatgagcagctagctgcagcagtgagagcctcaagagctgatgaagaagagaggatgagatcagtagctctaaggctaagacaggagcaagatgcagcttatctcgaatcacttcgaaaggatcaggagaaagaaaggtccaggaagagtgttcaggagggatctgcgaaaccaaaggcgagcaatgtgcttcgtccaagataccctggtcaatctgcaagggagcctaacaaggcagctcaggccagagctcctgctcagaatcagaatggaactgtggcttcacacagagcagaagcaaataccaagataatgataagatttcccaatggagagagaaggcagcaggcgttccatcatacagataccatcagggaaatctacaggtatgttgattccctaggcataccaggcatcggaaattatcagctcgtgagaagctatccaaggaaaacttatggtcgccagcagctggagatgagtctccaagatgcaggcttctatccaagtgtaacactgtacattgaacagcttcagtaa

SEQ ID NO: 17598 - DNA, 1657 bp, Oryza sativa
  Clone ID: PAT_MRT4530_23234C.1
ttttttttttttttggatgctaatagcacaaaaagtttcttataaaccccaggtgcttcaattgcatccagtttgaagaatttggctgaacataagtacgtgctagccagatctctcacgagtctcttctgtgatttgcaaagtcaaattgttctgtttaccgccgcgtgctgcttctgctgcctcgtcggcaccctgggcggagcattagtacgtgcttgctgcgtcttttatctctcacaacagtgatatgcaaagtcaaattgatgtgtatacagtggctagtagcttcagtttcgcagcagtgacatgaaccgagtttaaaactataatatactcttagtcataacaacagcattggataattctgccatgttatgagccgtctgatagtgaggcatgaaacatagaattggtaccaggcttgcgattataaccgacaaaaaacaaacctcccacaacctttcctgctattggtgtgaagtgtctccgcctttcctctgccattgttgcctagcaggttgcccttgcccatgtggttgtcttcttgaagcatgagatcgatgtctccttcgatgacctgaactgctgttgtgcttggtggtaccaccagtgctgtttgtctggttgagtggctccgttcctgaggttgaagttgtggtgtcttcacaagaatcatcaacggtgtctccttcggaagcagtaggcgcgctgggaggacgagggatgtacattccaggctgtatggaaaggtctttctttggttcaatcaggccatttcgttcttgttgtagattgaacagcgatgcgaacttttcttgacggatcttctctgactcagaatgaagtacttctttttcatcttcgtccagatcaatcgataaagatgccagttgagaagtatttgcacctagcagatcacgaacatgctcaatatccttctcatcaaacactttgcggcaaactggacatagtcctttgtgctgacttacattgtgatgcttagctgagctggacaaatccaatccttcagaagcatgaataacttcagtagttgctgctgtactactcttcttcgagtcagtatcatcattctgtagccattcccaccatctcataatgcagtcactgtggaagcagtggtagcacgacatcaacttcataaatggcaaagcagaaccatcattctctttgactaaaggatatagacaaagtgggcaatccccagctggatgattcatatttgagagcatctccacagcttcctcacacagcgtcacaagcatcgggtagcaggaaagttctcttgccttgttctggatgctgctaataagatacacctgtcgattctcatcaaggcccttactttccacggcataaacatgaggaggtgcttttggatactgagaagatgctttaattccaagaaatagctccacgaactgctgcgaggagtcgtcggcggtgcgggggcggacgtggacgacgaggtggggagggaagccgcgcaccacgcggcagtcgtcgccgtacaccgacgccaccgcctccacctcctgccgcacctcctcctccgcctccgccgccgccgccattgcttcggtgaagattttccttttttccctcgccccgttctcctgctgccccggctttttac

SEQ ID NO: 17599 - DNA, 1967 bp, Oryza sativa
  Clone ID: PAT_MRT4530_23235C.1
atgccgtatccttttggcaccatagatggctgcttccggggaccacccttccgcgtctactgcgaagacgaccatgcggtttatctccaggagcacaagaagttgaaggtcttgcgattcgagctggcccagggcgaggttctcatccagaagcgcatagcaacaagctgcggcgtcaacctcaccggtaaagccgtcggcattccatgggtagtgcacgatggtggcttagcagatgactatccctatctgacaatctctaccaagaaccagtttgcagtagtcgggtgtggtatcacagcgatcatcgttggtcagggagagaaccagcctgattacacggtcggatgccgatcattctgtgatgatgtcgatagcaatattgtcgaagataatagcacgcaatgcaatggcaacacgggctgctgccaggcttccatcccaggtaatctcaaggctttccagccctcattcttaaaaataagcggtgtgaactactccggcgtcccgtgtgtctacgctttcgtcgtggagcagaactggttcaaattcaagacctcatatgccaaatcgatggaactttattcaaagtatcgaaataagggcaccggggttcctctagtgctcgacttggttgttggtaacgaaacgtgtgacgaagccaaaaggaacgcattatcctatgcgtgcaaggctacgaacagctcttgcatcgacagacctagccgctcagggtacctttgcaactgctctcaaggttatgaaggaaatccctacctacatggaggctgccaagacatcaatgagtgcgattatccatggttgtatccttgcaaaggtttaagcattggtataggagttggtagcgcaacaggctttatttgcattgttctcattgcaatgttccttaccagacggataaagcacaggaggaaaataaagctaagacaaaagttcttcattctgaatcgtggacaactgcttaaacaattggtatcccaaagggcagatattgctgaaagaatgatcatcacattagatgagcttgaaaaggcaactaacaactttgacaaagctcgtgagcttggaggtggagggcatggcactgtttataaagggattctatcagacctacatgtggtagccatcaagatatcaaatatagtggtcccgaaagaaatagatgatttcataaatgaggttgccatcctctcacaaatcaaccataaaaatgtagtaaaactaattggctgttgtctagagactgaagttccattgttagtttatgaatttatttccaatggaaccctgtatcaccatcttcatggtgagggtccaaggtcgctatcatggagcaataggttgaggatcgcagccgaaattgcaaatgctctttcctatcttcactcatcagttacaatcccaataatccatagagatataaagtccagtaacatacttcccgatgataatctgacatcaaaggtatcggactttggagcttcaaggtatatcccaatcgagaaaacagcactaacaacagcagttcaaggtactgtaggatatttggatcctatgtacttttacacgggtcgtctcaatgataaaagtgatgtctatagctttggtgttatgctagtggaattgctcacctagagaaaactatttccatatttgtcctctgaaggtgatggccttgttgcagattttgtcaacttacacagtgtaggtaatttggtccaaatgctagattctcaagttatagaagaagggggcactgaaatccaagaggtttcccaactagccatatcatgtatagaattaagaggtgaggatcgacctaccatgagacaagtgaactgttcactcgaaggcatcctctcacaaatcaaccaaaaatgaattatgtcatctgagaaggatgcggaggatagttcactgtatgtttcgaagtactataataaaag

SEQ ID NO: 17600 - DNA, 465 bp, Oryza sativa
  Clone ID: PAT_MRT4530_23236C.1
tccccgggctgcaggaatcggcacgagggattatacaccttagagcagcgagctcctagtaattgcagcgtgcaaaataagttgtgcatgtcaatttactgatttatcctctattcccttcgttttcacatatctcccctgcattgataagcagcttaacaacatatcactctggtatctccaaggtgtattcagcagagggaaataatagaaatacccttagacttgaattgtccacccatggatctggaaagtggttacggactagctctttgattaacttatgactattttttggacccagggaatctaccccccccccaccaaaataataataataataataataataataataataataataataataataataataataataataataaaataaaatacaataattgctcaagcaaagaaatctcttcatggctcaacatttgcgcaaggatattcagg

SEQ ID NO: 17601 - DNA, 227 bp, Oryza sativa
  Clone ID: PAT_MRT4530_23237C.1
ggccgccctttttttttttttttttttttttttgtttttgtgtcatttgttctttttttttttgcgtttttgtttattacaaaacattttttttccccccgggttccaatcccagtgcattcgggaggagaacaacaccggggttaaacgccttacccaaagggaactgatttgttgggtacttaacggccgaaaaaaccctacccttggttggggtggtagagggc

SEQ ID NO: 17602 - DNA, 480 bp, Oryza sativa
  Clone ID: PAT_MRT4530_23238C.1
gttaaaacagcagccctagccgccacacgcctgcgttcttgccgccgccgctatctttgcgccgccaccacggccatagccgggggtcgcagccgtcgccatccatcgcaaccggtggttcctttccgttttgcttcttcccggtctgccgttgtgtggtcagggaggagaaggttcaggggcacatgaagaggaggggaatagaagaaaaggggaaaggagaaggaaaatgggggattgaagaggaggggactaatataaatcaagaaagataagcaccaatttggggattttttcgggattccgcaaatttagctcaaatttgttttgattttttgtaagggtacggggggctcatcccttctggagatgattttcacgggtgaaccgctggctatgccggtcgggtgtatgtagatgttgtttatgggctgacaatagtatgttcgcatctggtattaaaccgtcgggattcaggtt

SEQ ID NO: 17603 - DNA, 341 bp, Oryza sativa
  Clone ID: PAT_MRT4530_23239C.1
attcgacaaaacatatgtatatatatatggccggcccaaggtgctttattatatgtagcaaactaattagcatatccaaatatatctggatgaagaggccatttactgaccacatctatatgtgcaacacatctatattgatcagatattcgcatgcgtggattatggatataaaatgcctgcctgccgctatctatatataggttacttagcggatttacgttgccgtgatgcttacccatggttggcggagggtccacagatacccgtagtcgcccacctctgccttggcccgaactcatggactgcatggcgcccttccctctccagagtcttatgac

SEQ ID NO: 17604 - DNA, 2203 bp, Oryza sativa
  Clone ID: PAT_MRT4530_2323C.1
atccgaacgctctagatcttatcaagtggcgtcggcggcgatgtgcgaggaggcgacgcggagcagggtgctggtggtcggcgccaccgggcggctcgggggatgcctcgtgcgcgccagcctcgccgccggccaccccaccttcgcgctcgtccgcccccaccacctcgctgtccccgactccgccccactcacgtcgctcgccggcgccacggtcgtgaagggatcgctcgaagattacccgagcctgctggaagcggtgcggcaggtggatgtcgtcatctgcgccgtgcccacgaagcaagcgctcgagcagaagcttctgattcgggctattaaggatgctgggtgcgtgaagagatttattccagcggaatatggacttgatcccacaaaggttcaaatttgtggcatggaccatggcttctatgagaagaaaattgaaatacgccatttaatagagagcgaatgcattcctcacacctacatctgctgcaacttcttgatgcgttatttgcttccgtcacttgttcagccaggactcgatgctcctccaagagatgaagttaagatatttggtgatggaaacactagaggtctttgcatattacttctcagcttctcaccagtctgttgtttggttcctgaaaagaaaaagagaggttctttcacattttgtatttttaacctcaacggagaactattctttgcaggagtttttgttgaagagactgatgttgctaaattcacgatctgcaccatagatgatcccaggacattaaacaatacgctgtatctgagaccctcgggaaatgtctactcaatgaacaaattggttgacctctgggagaaaaaaataaataaattcctgaacaagatatatatcacagaagaacaactcctgaaaaacattgaagttcttgcttttgtcctccctttggccctccaactgtggatgttggaagaacactatactgctctttcagagagaagctcaggacacaatcgacattctcgtaatgattcttccacaaagcacaagagtggctatgaaccttcggacacagaaactgagtggcacgaaagcccttggaatgatgcagtgttgccatcaggtaggaatacccaaattggtgctagaaggcaaaacttgtctcctaaccatacaagagagtatcctaatgagaaaacttcaaacttgagaaacagccgtactcctccaaggttcacggaacaagtgcaccaaaattcttcacacagtggtgggaagaatgaattacgcaagaagagcaaccgaacacctcccagatttcggccttcaatggaaagctttagtcggtcatctatcaaggaaaaattttcccagaaccggtcaatttccacgccaaagctacggcctcatgagaaggagcatcctcctagagctcctgcattccttggcactaatcttatctccaaacagggggaaatggattcagctgacaatatcaaagaggattcacatgcagaaaattgttcccaagagatcaatgagttgattgcgaatggcaagtggcctaattccagatataatgagtatgcatgtacgagtacagagtccatacctacaggtgacatcttctctcgtgactgtagggctccaattcagagaacaccaacaaagcataacaatgacaagtccttgacctcagaaactgcccgtgctgagaattatggtactgaagcaaatagcaataatttagcccaaacaccaaaatctatttcagcccagacaggcctttcacgaacaattaggaattccaactatggtactagtcggcacactcaaataaatagtggcgccactttgagtagccagtttaatagtggcagatatagtggggacagtggaaagttcagtgatttcactgggaaattagttggaggagtcatgaaattcacctccaacatgcaaaaggcgcaaaatgattcttggcttccatgtgtcactggaaagacatgccgaaaaccaaaatcaccgaacagcaaaacaaccgacgaatctgaatcgagtttcattcagaaggctcttgttgtggaaaatattaggcttttctgggctgataaatatcgtccaagaactcttggtggatttacttgtcacagggagcaaattgaacagcttaaacagttggtaacctctttcaggcacttaactacataa

SEQ ID NO: 17605 - DNA, 1345 bp, Oryza sativa
  Clone ID: PAT_MRT4530_23240C.1
atgtcgctcgccgacgacctggccgccgtcgagcgcggcggccacatggtgccatcgaaggcggcgggtgtcgacggcgacggggagccgcggcggacgggcaccatgtggacggcgagcgcgcacatcatcacggcggtgatcgggtccggcgtgctgtcgctggcgtggggcgtcgcgcagctggggtgggtggccggccccgcggtgatgctgctgttcggcgccgtcatctactgctgctccgtgctcctcgtcgagtgctaccgcaccggcgacccgtacaccggccagcgcaaccgcacctacatggacgccgtccgcgccaacctcggcgggaccaaggtcgtgttctcgcagatccccaacctccacaagatgtggtggctctccacgctcgcctccgccatgtcgctgtcctactccgccatcggcatcgccctcggcgtcgcgcagatcgtagtgcttgacatgtttgagatcgagtttgcagcgaacgggggaatcaggggcaccatcacgggcgtcttcgtcggcgccggcgccggcgtcacctcgatgcagaaggacacggtgaagccggtggcgccgccgtcgacggagacgaaggtgatgaggaaagcggtggcggtgagcgtggcgacgacgacggcggtgtacctgatgtgcgggtgcgtcgggtacgcggcgttcgggaacgactcgccggacaacctcctcaccgggttcgggttcttcgagcccttctggctgctcgacctcgccaacgccggcgtcgtggtgcacctcgtaggcacgtaccaggtggtggcgcagccggtgttcgcgttcctcgacgggcgcgccgcggcgggcgcgtggcccgggagcgcggcgctgggcaagaggaggcgggtgctccgcgtgggctccctggccgagatcgaggtgagcccgttccgtctggcgtggcgcacggcgttcgtgtgcgtgaccacggcggcgtccacgctgctcccgttcttcggctccatggtggggctcatcggcgcggcgtcgttctggccgctcaccgtctacttccccgtggagatgtacatcgcgcagcgccgggtgccgcgggggagcgcgcagtggctgtccctccaggcgctcagcgccgggtgcctcgtcgtgtccgtcgccgcctcggcgggatccatcgccggcgtcgtggaggcgttcaaggcgcacaacccgttctgctggacgtgctgaatcatctgaggccttgttcgtttaattctaagaaaaaaagagaggttggaggaactgaaaggaagtaatttcacatcacaatacatatgaaatactccctccgtcccac

SEQ ID NO: 17606 - DNA, 352 bp, Oryza sativa
  Clone ID: PAT_MRT4530_23241C.1
gcatattatgaaattagttttttcattcgtgtctgaaaacccccttccgacatggatatgacacctaaaaattttcttttcgtgaactaaacaggccttatattattttcttagggctgttttggattagtgccaaaaacgtgccctaccaatactttggtagtttgaacagtgtatctggtgattttggtttgaagccaaatcattggcattgccaatgcccaatttgatattttctatattctactcaatgcttggttctaaattggcctcaaaccaaatacaactctaccctaccaaaaaatttggtagtaccaaaaacttgcctaggttttggcactaccaacatttt

SEQ ID NO: 17607 - DNA, 1665 bp, Oryza sativa
  Clone ID: PAT_MRT4530_23242C.1
atggcgacggcggcgaccctcccctcctcctcctcctccgccgccgccgcggtccagaccatatcccgcgtcctctccttcccccgccgcggcggcgggggcttcctccacctccgccgccaccccctcgcggctgcggctgccgccacccggggccggggcccgctcctccgcctcggcccgcgccgcccgttctccgcctccgcctccgccggggataacggggccgctgcgggcggcgatgggggtgggtgcgactacgactacgacctcttcaccatcggcgccgggagcggcgggatgcgggcgtcgcgcgtcgccgcctccctctacggcgcccgcgccgccgtctgcgagatgcccttcgccaccgtcgcgtccgacagcctcggcggcgtcggcggaacatgtgtgcttcgtggctgtgtcccaaagaaactgctggtgtatgcatccaaatactctcatgagtttgaagagagtcatggctttgggtggaggtatggcactgagccaaagcatgactggagcactctgatgaccaacaagaatttagagttgcagcgcttggtgggggttcagacaaacatgctaaagaattctggggtcactataattgaaggccgtggaaaggttgttgatccacatactgtcagtgttgatggaaagctttatactgcaaaaaacatactcattgcagttggtggtcggccatccatgccagacattccagggatagagcatgttattgattcagatgcagcattggacctgccttcaagacctgagaagattgcgatagtaggaggagggtatattgctttggagtttgctggcattttcaatggcttaaaaagtggtgttcatgttttcatccgacagaagaaagtactgagaggctttgatgaggaggtcagggattttgttgccgatcagatgtctttgaggggtatcacatttcataccgaagagactcctcaagcagtaatgaaatcagacgatggcttgctgactctgacgacaaacaaaggaagcataaatgggttctcacataatttgggtctagaagaggttggggtcaaaatggacaagcatggtgctattgtggttgatgagttctctcgaacctcagttgattctatatgggctgtgggtgatgttactaacagggtgaacttgacaccggttgcattaatggaaggtggggcattagcaaggactatttttggcaatgaacctacaaaaccagattacagtgctgtgccatctgcggtgttttcccaacctccaattggacaagttggactcactgaagagaaggcgatcgaaaagtatggagatgttgatgtctacacatcaaacttcagacctctcagggccactctttctggtctacctgatcgtgtatacatgaaggttatcgtgtgtgctaatactaacaaagttctaggagtgcacgtgtgtggtgaagatgcacccgagattattcagggtattgcaattgctgtaaaggctgggttgatgaagcaaaactttgatgccaccataggtgtccacccaaccactgcagaagaacttgtcacaatgagaagcccgactaggaaggtccggagagatgctgtggatgaggccaaaatgaaagatgaggccacaagtcagaagtag

SEQ ID NO: 17608 - DNA, 246 bp, Oryza sativa
  Clone ID: PAT_MRT4530_23243C.1
atcaaaatgaatatagaaaatagttgtatcgtaatttttggtgcatcaggggacttaacattccgtaaacttatcccagcactatataatctttttaaagtaggtcggttaggcgaacatttttctgttttaggtgtttcacgatcagacctaactcacgattcttttagacaaaaaatgcgtgaagcattaatcaaatatgagcaagcaagcgggcagtttttagatgatttttgcaatcacttg

SEQ ID NO: 17609 - DNA, 435 bp, Oryza sativa
  Clone ID: PAT_MRT4530_23244C.1
atggtgcgcgccgacacgcccaccgactgctcctcgtacgccawgaaggcgtgggagatgatccagagttcacatattgagctgcttgacctggaagattcaaaagaaggtgtttacagcactctggatgcttgggttgcctttgaacaggagtttcctgtggcctcgttaaagcaagcacttgtagctcttgaaaaggaggaacagtggcatagaatcgtccagctcttcaagaatcttgaagcatgtggtcgtaaacctccaagcaaagatattgtacggaaagttgaagacacatatgaaatgcttggtctagtagaggagaaaaaggaattgcttgagaaatacaaggaattgtttgacaagccatcaagtaatgatagaaagaaagggcggcagttcaaaaaggctgagaagaacacgaaaaccggctag

SEQ ID NO: 17610 - DNA, 306 bp, Oryza sativa
  Clone ID: PAT_MRT4530_23245C.1
atgaacccatactccatcattattatcgttcttgcacacgatcgtttaggaaatataccattgaaagtaattagggggttattcgatcgcaagaacacggacgacttcgttcatggcagggatggaaaaaaaatcgagaaccgcagaccgaaccgagccgactggactggcggtttcttcggtcttgagcttcggcgtcactttttaggaaaaagtataccgaaggtccctcaacttgtcatcgagttacaaaatcgttccccaactgcaaaaccagatatccggcatctcttaactaatcaaaac

SEQ ID NO: 17611 - DNA, 1160 bp, Oryza sativa
  Clone ID: PAT_MRT4530_23246C.1
atgccgatggatatcttgggccaatcaatcccgaccatcgcctccctctttgggcttactttacatgggctttgtgatgggcctggcccacaaaattacccccatcactatcagtctctccttccccttcctcacacgaatcgaatcggactcgggagcccttccgccgccgccgccgccccgatgttgggacacctccggcgatcctcccaacgactgcccgtagccaacctcgccgtatactcgatccagagttcacatattgaggatgatgttgcaatcatcgaacacatacaaaacagtacaaaggaattgaaacaaggcccagttgggaaaaatctatcatcggcggagaaaaggaaatttcttgtcaacactctacgcgacctggaagattcaaaagaaggtgtttacagcactctggatgcttgggttgcctttgagcaggattttcctgtggcctcaataaagcaagcacttgtagctcttgaaaaggaggaacagtggcatagaatcgtccaggtgataaaatggatgccgagtaaaggacaagggaagactatcagaacatatgagcaattagtgtgtgcacttgagaaggataatagagcggatgaagcttgcagaatctgggagtttaagatagcccatgatctacaatcagttccatggcggttttgccgtcttatgttgggtatttactacagaaataataagctagatacgcttgtcaagctcttcaagaatcttgaagcatgtggccgtaaacctccaagcaaagatatcgtacggaaagttgaagatgcatatgaaatgcttggtttagtggaggagaaaaaggaattgcttgagaaatacaaggatttgtttgacaagccatcgagtaatgacagaaagaaaggccggcagttcaaaaaggttgagaagaacatcaagccggcttagacatgtagtgatgcctgcacctctaaaatctacagcatcgagcttccaggatggcataagcttagagcttcacagtgcaggttggaaacatctgaatatctgccagtctcttgcccttgagtttcacaatgcaagtatgtatcccccggaaaaaaaaaatagagtatgtacggtagtacagttgttggaatataaagctgtgatcattgtttcct

SEQ ID NO: 17612 - DNA, 817 bp, Oryza sativa
  Clone ID: PAT_MRT4530_23247C.1
gtggggtattttttgtgcgtgatacttgtgtgcggtgggaagaaatcggataacgcgggacgaaaaatcgctggtgaaaaggatgtgacgacaggaaaaatccgaatatttatgttagcctcggcgatttccggtggtggcctggtggtcgtcggtagggacgccatcctccgtcccccggaagagaatgattaagtgatgtcgtcggctttctttcctcccacaaccttttttcaaggcagttggggatctgaaattgaatccaatcacttcttcatagccggtgaaggaggggtggcggaagccatccatatgctgcaacatattcagcggtccattcatatgctgggagccacagcgtcgcctgtggtgggagaggacgccacatatcagatccagcacggatatcggcaggcactactggtgagtgtctagatcgtaaatgaaattctactactgcaaagcacatagcaatctagtgaagttgtatcccagttacatcttagacgttcctctgactgaacccgctgcaagcttcacacgagattctgcaccggcaagtggtgatgccgccggcgttgatttggctgtgctatagctaaacaataattattcattgtgattatccatgagagtatggatgtgtaatttttcgtttgtagtcagtgttgctgatgtaacaatcatcagtaaaaagataatctattgattgatattacctatgtaaccttttatctgaggagatattttgaagattgaatgtgtaatatgtatagtaaaaaaattaccatccacgtaaaaaaaaaaaaaaaaaaaa

SEQ ID NO: 17613 - DNA, 316 bp, Oryza sativa
  Clone ID: PAT_MRT4530_23248C.1
atgcagctcaacccgaaagcaataactcgtcgaaataaaacaaaagcaaaaaggactctatccatgtgcggtaatcatctcgaagcacctcaattcaacccgatgtcatacaccaagttgtattgtcggaatcggctgcatcagcccacctagtccgactcagactcagccgatcctaatcgtagtcgatctggactctagccgattcctgctttgttcctgaatcgatctccgccttcaactccacttcgatctaatcttcttttccgatgccaatgttaccaaatttgctttggctgatctctatatattagga

SEQ ID NO: 17614 - DNA, 531 bp, Oryza sativa
  Clone ID: PAT_MRT4530_23249C.1
ggacccggaaaacccagctggcaaaccctagtattggggccattcgggaatgacctgggtttgggggaaaaaaaaaaaaaaacatatggttccctggaaggggcgtgggaactaataataactaggctttctccaaaacacactcagggaatatgggggtctttccggggcccattcaggggcaaaaaatcaacaggattgtttaggggcaaaaacggggccttgttttaaaaaagcggaggaggccccatgcagcccccaaaaaaaggcattattcacagtttcctaataacggaaaaagcctcccaagggaggggggagcactcagcatcccatgaaaaaactttggacatggaatccttaataccccaatcccacggggaagggttgtttttaaggccatcgaaagcttgaaaaagggacatgcccccatatgttgaaataatgtactgaaagagggctgggctagggaagccatgccactcagttggccgggatccattacggggaaagttaatctgtactggggca

SEQ ID NO: 17615 - DNA, 354 bp, Oryza sativa
  Clone ID: PAT_MRT4530_2324C.1
cccacgcgtccgagcgaagcggcagagaatggcagggaaagccggcggcctcaagggcgtcgccctcatcggcggcgccggcggctacagcgcggtcgtcgccgccctgcagttcttccaggaccccttcaccgggtatacccaggagcgggggagggtcaccgcgctcgctccggacctgcatgggtgtcacatccactactttggcgacaccaccaacggctgcaactgtgccggggcctattttaattctcacaatcaggctcatggggcaccatgtgctgatgaaggacatctgagctacttggggaacattagccccggcataaatggggtcgcctatatcttcatcat

SEQ ID NO: 17616 - DNA, 561 bp, Oryza sativa
  Clone ID: PAT_MRT4530_23250C.1
ggaaaaaaaaccgccgaaagccggggggaaaaaatttttgggaaaaaagggcaagggaaaaaaccaagggggcccccttggaatgggggaattaacaggtcccacaaacctgggaaaaaaaaaaccccccccaaataaaccagggaagggccggcccatatccccaacccctaaaagggcccccgaaaaatccccggggaaaaaaaaagaagacgggaaaaatttcccccccccacggttatataacaaggggggggggcatttacaaaaacaactttgggttttttgggggttggggaaaaggccggggcctttttcacccccctgggcttaaaaaaatggggggggccccttgggggcccagggatctgggtcccagggaatggggcagttaatttggcccctggggcaaagggggaaccacaaaaaaaaaaaggggggggcccatccggacccctttgggggtccattctctggggaaccccgcgtttgggacaaaattcgggcccctggcctgggatcgggggggggcaccccccccccccatttaccttccaaaaa

SEQ ID NO: 17617 - DNA, 1392 bp, Oryza sativa
  Clone ID: PAT_MRT4530_23252C.1
atggatgtatctgcctcccgcgccaccgaccgcgacgccggcgacgacatcgcccccatccacggcacaggctctcctacccacggcggcgacacccaccctccagcccgcgccaccgaacacgatgacgcctgcgcctccgacgacttccacatcagcggtcaggactccaccaccgtcgacggcggcgactcccattcccagtacgccgcccgcgcccccgacgacgtctcgtccttcatcaccgacacgcccaccgacggaggcgtctcccccgccgatatggagtctctacgcaaccatacagcctcgggggcatttccacaaacacctcgcgggcgcaggaaacggtgcagcgttctccactggacgaagccgtgcgacggcgtcccccctcgccggcgacgacgtgggcggtcgaccggtgcgggcttggacgctgaactccatcaacgagtcgaggctgccgaaattggaggtgcggcgcgggcggagtgtgttcccaacggccggcaggagcaccgcggcctcctccacgcgccgggctcgggctggggccccgcccgcctgcatcagcgcgccatcagtcctgccggccagccgcctccacgcgcccccggtcgcggcggcagggcagggcggcctagcgcctctccggtcgcggcggcggcactggtgcctccccactcacgtctcaggccgtgtggcctcctgtcgcccccaagtttacgtggccacgatcatggagtcctcgtactactccatccgcgcgcggcggccgtcgatggctgcaattcgtacctccacgccgacgagaacgggcggtccgtctaccacggcaacctgcgcggcgggggcggcgcctcgctgcacaacgcggtgtgggccgtagaggaggtggtcgccggggggcaccccacgcggtacgtgctcctccgcggcgcctacggccgctacctcggcacagcgcgaccgcgacgtgctggatcaggtcggtgtcatcatgtggcgcgcggcccggacattgccggcggctgcgtcgtccttctgcacgacaagtccgggcgctacctgtgcggcaaccagaccttcctggctcgccgccctggcgtctccgtcgacggcgacgtcgacaacgaaacgacgctgaggtgggaggtggtgcgtgtcaccccgagtcaaggcaggcctgagctcccgatcgccactgaggtgagatcctcctacccctcatctctcctgatcccctcctcggctaaggttgtgattggaactagcgctatccgagcccaaaagccaagcatcacaatcagagggtctcttcctgcaattcttgtgtttgtgttgtgtcctttatgcaattatacaacaagaggattcttctggttctag

SEQ ID NO: 17618 - DNA, 675 bp, Oryza sativa
  Clone ID: PAT_MRT4530_23253C.1
atgccggtttaccagtggcggactggacaaagttggccgttgatatcggcggggttggcaaataagttccacatcccgctgcagccgaggcacacgcagcaggctagaggggctcgcggtggcgttccacagctggtcctctccatcgccgccctcttccgcctcccaatcaacgtcgtccgttccacacggcggcaagcagcaacgacggaggaaaccccatgggcgctgacacgaggtcctccaagcggcgagtgggacagtggcggcattcgaggtgtacaatatctactaccacctggccatggtggcctggcgccaccgcctcgtgcagctggttggcataagctctctcagctcgtcctcgatgaccctaatgtcagccgagtcttcggcaaggtcggattccgcaatgaggacatcaagctcgccattctctgcccatgccgctcttcggctgcctacccatgtgtagctgtccgccgcttctcttcctttgcagcttcgccgccgcagacgacgctgttatcccttatcccaccgggaaccttgccggctcggggggagaagaattgtcgccgcatcgccaagatcctctcccgtggtcgcaaccccatgctcgtcatcacggggatgcgatttaaccagggtaaagagatgcaggatgcgaaatag

SEQ ID NO: 17619 - DNA, 267 bp, Oryza sativa
  Clone ID: PAT_MRT4530_23254C.1
gcatgcaaaatgagcacagttattacttgttccataaaatccatcacactggaagacatcaggaatccgtgcaagttaatacacacagaccgcctgagctgtgagaggccttgttggctgttgcatgggaggggcactaggaacctgcacacgaacagagcctccagcccggagacacgttgctgcaccacctaattcctgaccgcatcctagaggccgtcctaactctacatatggtgatgcagagcaaagcttgccgaaacaaat

SEQ ID NO: 17620 - DNA, 1740 bp, Oryza sativa
  Clone ID: PAT_MRT4530_23255C.1
caaaattttcaattggacaagtacaatttagattggaatggcagaataagtaaatcagagcaccacagcttatatctgtctaatttgtaacaattaattagatactaataactggcagctgtctgcaagttgctctcttccgttgctctcattgtcattgtctaatttttcttcaatctctgtgaatttgacaaaaaaaaattcacagattgttacatggttaaagattaatctccgacccaatcaatcatcatcaagacttcttcaactagaaccagaagaatcctcctgttgtataattgcataaaggacacaacacaaacacaagaattgcaggaagagacctctgattgtgatgcttggcttttgggctcggatagcgctagttccaatcacaaccttagccgaggaggggatcaggagagatgaggggtaggaggatctcacctcagtggcgatcgggagctcaggcctgccttgactcggggtgacacgcaccacctcccacctcagcgtcgtttcgttgtcgacgtcgccgtcgacggagacgccagggcggcgagccaggaaggtctggttgccgcacaggtagcgcccggacttgtcgtgcagaaggacgacgcagccgccggcaatgtccgggccgcgcgccacatgatgacaccgacctgatccagcacgtcgcggtcgcgctgtgccgaggtagcggccgtaggcgccgcggaggagcacgtaccgcgtggggtgccccccggcgaccacctcctctacggcccacaccgcgttgtgcagcgaggcgccgcccccgccgcgcaggttgccgtggtagacggaccgcccgttctcgtcggcgtggaggtacgaattgcagccatcgacggccgccgcgcgcggatggagtagtacgaggactccatgatcgtggccacgtaaacttgggggcgacaggaggccacacggcctgagacgtgagtggggaggcaccagtgccgccgccgcgaccggagaggcgctaggccgccctgccctgccgccgcgaccgggggcgcgtggaggcggctggccggcaggactgatggcgcgctgatgcaggcgggcggggccccagcccgagcccggcgcgtggaggaggccgcggtgctcctgccggccgttgggaacacactccgcccgcgccgcacctccaatttcggcagcctcgactcgttgatggagttcagcgtccaagcccgcaccggtcgaccgcccacgtcgtcgccggcgaggggggacgccgtcgcacggcttcgtccagtggagaacgctgcaccgtttcctgcgcccgcgaggtgtttgtggaaatgcccccgaggctgtatggttctgtattgtgaaatgcccctgcccctgctctgtggttctgtattgtgtggttctgtgttgtggaaatgccccagtcctgccgcgtagagactccatatcggcgggggagacgcctccgtcggtgggcgtgtcggtgatgaaggacgagacgtcgtcgggggcgcgggcggcgtactgggaatgggagtcgccgccgtcgacggtggtggagtcctgaccgctgatgtggaagtcgtcggaggcgcaggcgtcatcgtgttcggtggcgcgggctggagggtgggtgtcgccgccgtgggtaggagagcctgtgccgtggatgggggcgatgtcgtcgccggcgtcgcggtcggtggcgcgggaggcagatacatccat

SEQ ID NO: 17621 - DNA, 1560 bp, Oryza sativa
  Clone ID: PAT_MRT4530_23256C.1
agaacaggtaaccgatcgagcagtttatcgtacctttacccaaaagaatagatgtccaaatgaaactagaacaccaataagaccgaacactccttcccatgtcaaccccaatgacggcagcgctagagctggaactgaagctgaatgggtcggatcagcatgtacagccagtagatatatgccataaatcaccagcgctgagaatgtcatgtagagaatatgacccacatgccgactcaagctcttgcaaatcctctcaccgaacatgccacagggaaggcatacattacccagaccccaaacagatgcaaatgcggcgagcatccagccgtcataaccagccggcagaaaaggtcgggcaagaaacagaactgccaaagaggtgctgaggatgtagacgtagccgatttgccttttgttccaaatctcgtcgtccgcatgcatgtgtggctcggtgcgttcttcatgcatgtgtgatggttcggtgggcttcggtggcagctggctggaggccgaaccggtccaggagcagcagcacgttggcccacgtgcgataggcccaagcaggagcaagcgcaggagatcgagtccgatgcggttgattgcggcttttttatcgcttttcagagcgtggagctgatagtttagttagggtttcgagtttagtcgagatttttgtaaggagtgttgttagtgcactttgtaaacacagagagaagcaataaagttgtcatctactttgagaatgcatatcgagctagtctgcttaccttcactgttgggcctgacaaggacgatgtgcagggtctcccggctgcgaggcaggtcgatgagcagaggagttagccgcccatggatgccggcgcggacgcagagtgtaaactcgtcgtagcccagaatgcctgcgagcttctctctcaggagctggaccgacttcccggtgaacacgtcgatgttgccggcggcgcctgcgccggccgtcacgaactggatctgccgcctcagcgggggaaagcacgccgcctcagtggcgatcgggagctcaggtctgacttgactcggggtgacacgcaccacctcccacctcagcgacgtttcgttgtcgacgtcgctgtggacggagacgccagggcggcgagccaggaaggtctggttgccgcgcaggtagcgcccggacttgtcgtgcagaaggacgacgcagccgcgggcaaggtccgggccggagcacccgacggcgcgccacatgatggcaccgacatccagcacgtcgcggtcgcgctgcgctgcctcgagcgagcagcagccctcgcgctcgcggtcgggggcgtcgggggacccgaggtagcggccgtaggctccgcggaggagcacataccgcgtgggaggcaccccggcgaccacctcctctacggcccacaccgcgttgtgcagcgagccgccgccgctgccgccgcgcaggttgccgtggtagacggaccgcccgttctcgtcggcgtggaggtaggagttgcagcaccacacccgcagcgccacgaactccactccctggaaaacctccat

SEQ ID NO: 17622 - DNA, 338 bp, Oryza sativa
  Clone ID: PAT_MRT4530_23257C.1
acaactttatcgctgggcgccttcatcttcattgctggctgacctgactgctgccgactggtttctttgccttttactcaactttttaggagttggtacaatgcattttaaaaggtgccaaacagtaatgctttatatagctgcccgctgaatttttttatataagtcaaggcgttgtttggattcataaagcaattgattggatacaatatcattgctttttgccacccctccacagtcttcatatttggtaaaagtactcgggagaccatggcgaagatgattgaagcactcggttttggggtaatctagttcgagagaagattatcttttcgact

SEQ ID NO: 17623 - DNA, 686 bp, Oryza sativa
  Clone ID: PAT_MRT4530_23258C.1
gaactagtggatcccccgggctgcaggctctagctctttcatttggataaaaatatcagcagagtaaccgtccacttaggactattgcatagcccgtttaagtattttggtgaatcaggcttaccagtgatccacgtaacccattttgccacatcatcttgcgattttccgtgctttgattcacggtctttagcttattcagtctggttaaagtggattttttttatgtgcaatatgtgtgcgtgcctgagtgtttgtcatacactcatttacagagactgttactaggatatctaccagtatatccttgtgataagtctaggtttcttttgctaatgttcagtcaggcgccatgtgtaatgtatttcaactcaatggttatatcacaaatattttcaaagtaagaggaaagcttatgagtattgagtcaacattatgttgcctattgtgcttgaatgagctggtgctgtattggtgttatagataacctgaattcaaatggaggcatatcattgcctttggtgctataaatgttcaaggagtgatttttatgtcaacttatcttatgtaggagtatgccatgtgtttctataagtgaaaacataagccatatttttgcccctctctacgaggcacatgtagttggtctaaatctcagttgctaatacgctctaccattctggctg

SEQ ID NO: 17624 - DNA, 219 bp, Oryza sativa
  Clone ID: PAT_MRT4530_23259C.1
atgaagagcaatttctcccatcttgttcttttcttcttctgtgtggcatctctgcttacctcgccatcactagctatacgtcaaggggcctttcaagctggtggttacagaaatctgttccgccagttgatttccctggactatgaccctactattggtgccccacctcaaatacattctgttcccagccagcatgaacgtacaggaaaccatttctaa

SEQ ID NO: 17625 - DNA, 1455 bp, Oryza sativa
  Clone ID: PAT_MRT4530_2325C.1
atggtgggttgtgagcacatggttttgagagtcgtgctcatgacaattaaggaccgactgagaagtggcgagaagtccacgggggtcgctggggagtccatgcctctggtttttgagggggtgattatgatccaggaaaggcagcagatccaagctgctattgagggaggcaaaatcaagtttgatgactacaagaggccgatgaaaattgatggcaatccttttcctattaatatgaagaagtacgacaagcagcaggagaagcattatgaagaagatgacggtggctttgatcctcattggggttctgatgaagccgcagccgatgaggcgaaaaggttggctaaagggaaaagtgttgtaactgctttggttaacatggttttcacattgtctgccgagtttggggtcaagcacgatgaagttgaagaagaatcggctaaattgattttgtcaccggagcaggcaatttttgagaagccagaggggacagagaatcggcatcttaaaccattgtatataaatggttatgtcaatgggaagccgatgtccaagatgatggtcgatggtggggctgcagtgaatttgatgccttatgctactttcagaaagttgggcaggaacgctgaggatctcatcaagacaaacatggtactcaaggacttcagtggcaatccatcaaagaccaagggagttttgaatgtggagctgacggtcggcaacaaaaccatccctacaacattctttgtcatcgatgggaaggccgatgagtattataaccttatggctgatgaaagggaagacttggttcagtctaaattaagagcccttgcaaaggagcagctggttgttattcttccacaatatgatgactccccacagccgatggagttcggtcactcgatgattgttgtacaggggaagaaggaggaggaggaggctgtaaaagagacaagtgttagacaaaatcggctggaatcaactagtagaattgagagtgtcttactagtgaagctggatcaaatcaactggcacgctaacacacccgaaggcgagctttggacctgcactggagttaagcagatctcccaggcctcagctctagcgccgtgtgacctagcgtcgccgtcgtcgccgtcgctccagccgtgcttcgccgtcgctccagccgtcgccgtcgctcggggaggtcgccatcgtggtcgccaagtcgtcgccgtccttgtccgccccttcgtcgtcgccgaagaccgccggagcaccatcgccgccgtcgacccgatcttctccgccgcttcgacctcgtcgccgtcgccgtccgttgatcttccgccgccgttttggtcaccgcatcatcgttcgccggcgagcgtgcgccgtctgagccgccgagccgtcgccggaggtgacgtcgccgctgacgtcatcggggccgttggccgtgagccgccgtag

SEQ ID NO: 17626 - DNA, 426 bp, Oryza sativa
  Clone ID: PAT_MRT4530_23260C.1
atggagggagaaggaaacttgccacataggagcattgtgaagggcctaagtgcatgggttttctaccgcctgagcctgtggaggtcccgcgcctcgagcggcctgagccgctcgccgtggaccacaggagtcaggacgtacgagtatgcaaagccgtacgacaacgggtatttgacactccgtgaaaggcaggatgccaccatccttgctcctaaccaatattgcacccatgtcggcacgtcggaggatctcatgcctttggtctatgcaatctcgaagaagaaaggaaagtccctgcttcaagtaaaggaaaacgatgcttggatcgacaacttataccttgaagccaacccctcaatctcagtggaccttattggtcagctagtcgccttatggactactgtgcgggacatccaactaaactag

SEQ ID NO: 17627 - DNA, 435 bp, Oryza sativa
  Clone ID: PAT_MRT4530_23261C.1
ccttccctttttttttttttttttttttttttttttttttatttttggcttggtttttttttttatcagttctccctacttctaatgttccatcctattcaatacataaatttttctttatctatcaaacttacaatcttatttaatttttttttttttttttacccgttcccaaaaaaacaagcagcctaaccattttcaaccccccttttttcctatcttcctcccccccaaaaaaaaacccttttttttttttcccccccctgtttccccccccacccctcttaatttgaaaccaaatagcccctgattttggcatctttatttccccaacctgtttgaaacccacaaacaccccccacgttgtattctcaccattttccaaccctaaaattataacccgctccccggccatgggacaccatttcaataaaa

SEQ ID NO: 17628 - DNA, 632 bp, Oryza sativa
  Clone ID: PAT_MRT4530_23262C.1
tccccccggcggccaccgccgccccccacctcgccgtcgccccccggcggccgccactacttcaatgtcaccaacgggcacattctgtcttcaccacagtaaatgcttgccatttgctgctcagatatagatatatatgaacgtgctcagatatatagatatatatatatatatatatatatatatatatatatatatattctcctggatctacccctacaccattttttttatttgcatgtacctgtttgttgcatatatatatatatatatatatatatatatatatatatatatatatatatatatatatatatatatatacgtacgtatatatacgtatatatactctatatatatatatatatgtatatatacgtatatatatatatatgtgtatatacgtatatatatatatctatatatacatatatatgtatatatacatatatatatatatgtatatatacatatatatgtatatatatatacatacatatgtaacaatacatatgtataattacacacacatatgtataatttaaagcacttaacattttatgtgcatatatgttaccaaaatatatattaacactaaagtaaatgtgtacatatataaatatatatataca

SEQ ID NO: 17629 - DNA, 537 bp, Oryza sativa
  Clone ID: PAT_MRT4530_23263C.1
attttcctagtcctcacaccacaacaggtttccaagcaagagcatattcttccatattggtcaagctggcggaaatttcttagaattaaactgccacatgagcatgtacatttaggtgctaaagcctcaaggcttacacaccctgatttgtaagtactaagttttgagttatgcttttatgtgtttatcactctatgggggaagaaacatttactctgtttgtcaaatttgataggctgcagattgcaaaaacaaggccctactatagaaatgagaactatttcttgctggataaggaaggcagtgttcacattttcatccacaagcaggcagcggcaacagatattttgatgtccttcatacatggactcgtgttagcacatttgatgcagaagagcaaatctgggcatgcggaggctcgccaatggattgatgagaaatataacacttttatctcaaagttgcaagttgaaggttactcaacagagcgacttctttcacactcgatcgtgtggagggcacattgggttcatggtc

SEQ ID NO: 17630 - DNA, 287 bp, Oryza sativa
  Clone ID: PAT_MRT4530_23264C.1
attcgaaactgttagtactatcatatacctggctttcaattgaataacggggaactacatgctacagacttcagtggaccactcatgtaaatggcagtagttgcccgtagttgcacacgcataaatgcgaatttccagctccacgtacgtcagtacgtagtactcctcatagtagcactacagtgctatcaaatactactagctaataaatcgatacctaaatagttaattgaatatgctagtaccagtagcatggtcaacttagccaatattatcaagactctgaa

SEQ ID NO: 17631 - DNA, 420 bp, Oryza sativa
  Clone ID: PAT_MRT4530_23265C.1
ctctgtgcaccccccgcggctgtcttgacacctctttatattggtgttgactccgcgtcgtcgttttgggtgtggagattttggggtagacgcggagtgacccacaattgctcgatccctcggctaaccacaggctatttgtgcctcctaggtgtgcttatcatcattcaatgctttcttagtaatttatcgatcttcactcgttttagtagggagataagcgctgtgtagctctcgcgctctcaaccgagtatccatcgggctcccgagggaatatgctagacggcggctcgagcgcacacccgcgccgcaccgggtgctagctccacactgcttgcactagttgggtctgttttctctcaatagacaaaataaatataaatagaataagagaaataaaaaaaaaaaaaaaaaaaaaaa

SEQ ID NO: 17632 - DNA, 338 bp, Oryza sativa
  Clone ID: PAT_MRT4530_23266C.1
gcgcacgactatagtagtcatagaacgcaagagaatacctcaggagttacaagatgtgcccaaccccttggcagagatgaatcacattgccagagcacatgcatacggaacttatcagatggacatacagatacacgaggtggccatccattgcacagaaatgaaatggtagtgctactcgtcaacacaacgcatagccgatttacaggactcaaatcagttagtgagtacatagctgcaacttgtattcagacaaagcagatggacaacgatgagcgtcccagtggacgtaacaggaggcatatgactttgtgatgacgactttcgcagcaggggca

SEQ ID NO: 17633 - DNA, 428 bp, Oryza sativa
  Clone ID: PAT_MRT4530_23267C.1
atggacaggtggctagggactgggcgtcactgccgccaccgccgcggatgcgcctccctggccgccgccaccacggatgtgccctccctagccgccgccgccgccgtggatgcgatgctagcccttgccgtcgccgtcgcggatgcgtcgctgacgccgacgcagatggctgcgcccctggtcgtcgacgccgccgcccgcaagaggccgccgacgccgcccgcgcatggctgctgcttccgctgtccacgcgtggccgccgtcgccgcccgcgcggggccgccgtcaccggctcgctgcccgcgtgtggctggtgccgctgccgtcttccgcgggcccccggaccgctcgccccgcgggttaaaatccacacccgcccccgcccccgcccccgtaggggcaggtcccctgcgggtccccggccccat

SEQ ID NO: 17634 - DNA, 417 bp, Oryza sativa
  Clone ID: PAT_MRT4530_23268C.1
gaactaggagagcatggagctcccccatttccattaatagaaacgtagaggttacagagtagcatcaagtttcaggacatcaatcacatagtaagaattaagatagaaagattcagattgttcattcagtcatcgtctccgacatggaagctcaatctggagtggcttgctgtcttggtagctgctgcttcttcttcattttattcacaacaatcttgattctcgccgtccacaacccataaacaaataatccagctgcctcaagggcgaaagaggtgaaagcaatggtgcgccggatgacacgggcggtggcgtggcacctcttgatgcttgctttgacagcagcttcctcatccacaaggcgccacttctcatcagcatcatcaccaaacttccaccacacacccaaaaaagacc

SEQ ID NO: 17635 - DNA, 3850 bp, Oryza sativa
  Clone ID: PAT_MRT4530_23269C.1
gattcgccttctcccccccgaatccaaaccctctcaaatgcagatgctgctccacgccaattccctcctcctcctcgcgccgacgacctcgcggctctccgcctccgcctcgccggggagatcggggacggcccggccgctgcctccgccgcagggcacgcgcattccgcccgccccgccgctcgcgggacacggaggccgcccgccgtcgccgcagcctcgccgcggacgcgatggggtgggggaggagtgcgccgccgccgtggcttcccaggggttcgtgacggatgcgagggcatactgggtgacaaggtctctgattgcctggaatgtaaacgatcaagacacctccctcttcaatgtctgtccacatgaagtgtctatagaaatccatgatctcgcttcgttggggcttgaattacatcctattcaggtgaattcatcggatgctctagtcaggcagtcagcatacgaggcgtccaaaggtcgattcaccgtgccaagaagaacaactgcagtgtttgttcaacctagatgttgatgcccttgggaaaacgttcatattatgtcgaaaaatatgaatgaagaataagagaagaaaaatcctcaagttgaatatttctgaagaaataaatggaagaatatggagagactggctagtatactaatagagtaatagtatagttttagagaaaaaaaaaagcatacttgtagcatcgcataaagtgcccaggtttcggcatgctttgtcatctttgtaagggtattgtattgtactgttgtgattatcacaaacaaccaaaaaaagacatacttatgtttacatggaaatatggcatgctaagtaaataaaaatgctccctttgtttcaaaaaaaaaaaaaaaaaaaaaaactgtgcaactcaaggagttaaatggtgtttggagtgttactgtaccaagatacccggagaaccagtactatttgtatgaagttaaggtttatcatcctagtacatcacaagttgagaaatgtttagctgatgatccctatgccagagggctttctgcaaatggcacacggacttggttggttgacattaatagtgaaactttaaagccagcttcctgggatgaattgtcagatgaggagccaaaccttgagtccttctctgacataagcatctatgagttgcatatccgtgatttcagtgctcatgatagcacagtggactgtaactctcgtggaggattcgtgcatttacatttcaggttgttcagacttaatttactgaacgatttctgttcaccacctataacaaaacatcctggtcgcattatggaaactgtgatgcaggattcagcaggaatacgtcacctgagaaaattgtctgctgctggcttgactcatgttcatttgttaccaagctttcattttgctagtgttgatgacaacaaaagcaattggaaatttgttgatgaggctcagctggcaaaactccctccaggttcagatgagcaacaagctgcaatagtatctattcagcaagaggatccttacaattgggggtatgaccctgtactctggggggttccaaaaggaagctatgcaagtaacccagatggtcctagtcgtattattgaataccgacagatggttcaggccctgaatcgcataggtcttcgtgttgtcatggatgttgtatacaatcatttagactcaagtggcccctttggtgtctcctcagtgcttgacaagattgttcctggatattaccttaggcggaacgttaatggtcagatcgaaaatagtgcggctatgaacaatacagcaagtgagcatttcatggttgataggttaaccgtggatgaccttttaaattgggcaataaattacaaagttgatgggttcagatttgatcttatggggcatatcatgaaaagtaccatgataagagcaaaatctgctattcgaagccttacgagggatgtacatggagtgtatggttcaaagatatacttgtatggtgaaggatgggactttggtgaggttgcacaaaataagcgtggaataaatgcatcccagattaatatgagtggcacaggaattggtagtttcaacgataggatccgcgattctgttaatgggggtaatccatttggtaatcctctacagcaaggcttttctaccggtctgttcttggagcctaatggatattatcagggtaatgaagcagataccaggcgtgaacttgctacatatgctgatcacatacagatcggactagctggtaacctgaaggattatgtactaagaactcatactggagaagctaagaagggatcagacatttacacttttgatggatcaccagttggctatacttcatcccctgtagaaactataaactatgtttctgctcatgataatgagactctgtttgatattgtcagtataaagaccccaattggcctatcgattgatggagaatgcaggataaatcatttggcttctagcatgatcgcattatcccagggaatacctttcttccatgctggtgatgagatacttagatctaagtcacttgatcgagattcatataactctggtgattggtttaaaaagcttgatttacatatgaaccaaccaattgggtgtagactcctccaagagataagaatgaagaaaattggcatttgataaaaccaagattggaaaacccatctttcagacctttgaaaaatcacattctttcctgcttcgacaattttgttgacatcttgaagatcagatactcctcaccgctctttcgtttaagtacagcaagtgacattgagcaaagggttcgctttcacaacacaggtccctcgatggtaccaggagttattgtcatgagcattaaagatgctcaaaatgaaaaatgtaaaatggctcagttagataaaaacttctcttatgtcgtgacgatcttcaatgtctgtccacacgaagtgtctattgaaatccatgatctcgcttcgttggggcttgaattgcatcctattcaggtgaattcatcggatgctctagtcaggcagtcagcatacgaggcgtccaaaggtcgattcaccgtgccaagaagaacaactgcagtgttcgttcaacctagatgttgatgcctttgggaaaacgttcatattatgtcgaaaaatatgaatgaagataagagaataaaagtcctcaagttgaatattcctgaagaaataaatggaagaatatgaagagactgggctagtatactaatagtatagttttagagaaaaaaaatacatacttgtagtatcgaataaagtgcccaagtttcgacatgctttgtcatctccgtaagggtattgtattgtactgttgtgattatcacaaacaaacaaaaaagacatacttatagttacatggaaatatggcatgctaagtaaataaaaatgctccctttgtttcaaaaaaaaaaaaaaaaaaaaaaaaaaaaaaaaaaaaaaaaaaaaaaaaaaaaaaaaaaaaaaaaaaaaaaaaaaaaaaaaaaaaaaaaaaaaaaaaaggcgaagaaaaaaaaaaaaatataacttaaaactaaattaaatgcactgaactttttttttataaaaaactagaataaaatgaactgtgccgtaacttaatttaatttgtcttgcataaaaacactcctttcctttacctaatttaaaatggagtgaaaaccagccccccctgcccttcccttcctttaaagcgaacagccccggaaacgctcccccccctgtattgtaacattaaatgacgaacgaaggggcccctcctctaaacgtttcctttaggctggccggtggggtacccccc

SEQ ID NO: 17636 - DNA, 156 bp, Oryza sativa
  Clone ID: PAT_MRT4530_2326C.1
atggagaaatggactcaacaacacagccgaggacatgaagcagaagcagcaagtcgggcgggacaaagcaccggctgccggcattggagaaatgcgcaccgccaatgcccaatggtggtgatggaggctggtgtctggtcgtgtggcagccggtaa

SEQ ID NO: 17637 - DNA, 2934 bp, Oryza sativa
  Clone ID: PAT_MRT4530_23270C.1
atggcggtgggggaggagtgcgccgccgccgtggcttcccaggtgcgccatcgctggctcgcggctgcttttttctcttccgttgatgtcgcaatcgtcgctggactcccacgcgttccgacaaattaccgagatgcccccacctgtgggatgtggggcccacatgtcagccgctgtttcattgctacgttttttaacaagccccttggggttcttctggggttcgtgacggatgcgagggcatactgggtgacaaggtctctgattgcctggaatgtaaacgatcaagacacctccctcttcctgtatgcaagcagagatgccacgatgcacgtatctgatggggccattcatggttatgattcaaaaattgaactcgaaccagaacatgccagccttccagacaatgtggctgagaagttcccgtttatcagaagttacagaaccttcagagtccctagctctgttgatgtcgcgagccttgtgaaatgccaactagctgtcgcttcttatgatgctcatgggaggcatcaagatgttactggattgcaactacctggtgtattggatgacatgtttgcttatactggaccacttggtgcagttttcagtgataaagatgtcgacctctacctttgggctcctacagctcaggatgttagagtatgcttctatgatggtccagcaggacctttactgcaaactgtgcaactcaaggagttaaatggtgtttggagtgttactgtaccaagataccgggagaaccagtactatttgtatgaagttaaggtttatcatcctagtacatcacaagttgagaaatgtttagctgatgatccctatgccagagggctttctgcaaatggcacacggacttggttggttgacattaatagtgaaactttaaagccagcttcctgggatgaattgtcagatgagaagccaaaccttgagtccttctctgacataagcatctatgagttgcatattcgtgatttcagtgctcatgatagcacagtggactgtaactctcgtggaggatttcgtgcatttacatttcaggattcagcaggaatacgtcacctgagaaaattgtctgctgctggcttgactcatgttcatttgttaccaagctttcattttgctagtgttgatgacaacaaaagcaattggaaatttgttgatgaggctcagctggcaaaactccctccaggttcagatgagcaacaagctgcaatagtatctattcagcaagaggatccttacaattgggggtatgaccctgtactctggggggttccaaaaggaagctatgcaagtaacccagatggtcctagtcgtattattgaataccgacagatggttcaggccctgaatcgcataggtcttcgtgttgtcatggatgttgtatacaatcatttagactcaagtggcccctttggtgtctcctcagtgcttgacaagattgttcctggatattaccttaggcggaacgttaatggtcagatcgaaaatagtgcggctatgaacaatacagcaagtgagcatttcatggttgataggttaatcgtggatgaccttttaaattgggcaataaattacaaagttgatgggttcagatttgatcttatggggcatatcatgaaaagtaccatgttcaccgtgatgtctatctgcacaatctctactattataaaaattaaagatgtttttgctgatactttgataagagcaaaatctgctattcgaagccttacgagggatgtacatggagtggatggttcaaagatatacttgtatggtgaaggatgggactttggtgaggttgcacaaaataagcgtggaataaatgcatcccagattaatatgagtggcacaggaattggtagtttcaacgataggatccgcgattctgttaatgggggtaatccatttggtaatcctctacagcaaggcttttctaccggtctgttcttggagcctaatggatattatcagggtaatgaagcagataccaggcgtgaacttgctacatatgctgatcacatacagatcggactagctggtaacctgaaggattatgtactaagaactcatactggagaagctaagaagggatcagacatttacacttttgatggatcaccagttggctatacttcatcccctgtagaaactataaactatgtttctgctcatgataatgagactctgtttgatattgtcagtataaagaccccaattggcctatcgattgatgagaaatgcaggataaatcatttggcttctagcatgatcgcattatcccagggaatacctttcttccatgctggtgatgagatactgagatctaagtcacttgatcgagattcatataactctggtgattggtttaacaagcttgattttacatatgaaacaaacaattggggtgtaggacttcctccaagagataagaatgaagaaaattggcatttgataaaaccaagattggaaaacccatctttcagacctttgaaaaatcacattctttctgtcttcgacaattttgttgacatcttgaagatcagatactcctcaccgctctttcgtttaagtacagcaagtgacattgagcaaagggttcgctttcacaacacaggtccctcgatggtaccaggagttattgtcatgagcattaaagatgctcaaaatgaaaaatgtaaaatggctcagttagataaaaacttctcttatgtcgtgacgatcttcaatgtctgtccacacgaagtgtctattgaaatccatgatctcgcttcgttggggcttgaattgcatcctattcaggtgaattcatcggatgctctagtcaggcagtcagcatacgaggcgtccaaaggtcgattcaccgtgccaagaagaacaactgcagtgttcgttcaacctagatgttga

SEQ ID NO: 17638 - DNA, 1358 bp, Oryza sativa
  Clone ID: PAT_MRT4530_23271C.1
gggcatcccccgcctggcgtgaaaccgcactgaagcgaacgggagggggacgtgacgttgtgcggtgcgcgcatgtgaccacagcgacggcagcctatccatggcgaccaggccgggccctttgaccgaatggccgtggcataggctggggaacttcaagtacgtggtgatggcccccgtggtggcgcacggcgcgcgccgggtgatgcgcaacgggtggggcgacctcgacatcgccttctccctcatcctgccgtcgctgctgctgcggatgatccacaaccagatctggatcagcctctcccgctaccagaccgcccgcagcaagcaccgcatcgtcgaccgcggcatcgagttcgaccaggtcgaccgcgagcgaggctgggatgaccagatcctgttgaatcaggcaaaacagctcaatggaaacggtgaactatttagacagaagtatccaaaattaggagttcgaatggtggacggaagtggcttagcgactgcactggtgctaaaaagtattccttcagctgcaaagacagttcttcttcgtaccggcacttctaagatagctcgtgccattgccattgcactatgtgacagaggtgtccaggtgatcatgaatgaaaaggaggtataccacatgctcaagtcacaaataccagagaacagggcaagctatttgaaactctcgagcgacaacgtacctcagctttggatagtacacaatattgacgacaacgagcaaaagatggcgccaaaaggaacaatttttattcccatatcacagttcccccttaagaaacttcgcaaggactgcacttacatgagcaccccagcaatgaggatcccggaggaaatgaagaatatccactcctgcgagaattggcttccaagaagggtgatgagtgcttggcacattgctggaatacttcatgctctggaaggatggaacatgcacgagtgtggggatgagatgatggatattgagaaatcatggtcagctgccattcggcatggattccttcctctcactaaagcttgacacctctggaagcatggatggtgtattccatgctagtagatgatgctatgatttccagcaacggcataatccattcattatctagcttgggaaccagatggattattcacttattatcttactatgtttgtaatactgagcttgggtactgataagtcatgaggaggcacagtgcaaacgaacttaattccaatagctcagtattttataatctatagtctatgtcagttctgtaacattacgtttatctcttatttgaatcttgtgggggaataattaaaataaaaaaaaaaaaaaaaaaaaaaaaaaaaaaaaa

SEQ ID NO: 17639 - DNA, 399 bp, Oryza sativa
  Clone ID: PAT_MRT4530_23272C.1
atgctagatgggtcctacggcgtcagagggacgactttgcaataccagaagaaccccaaggggcttgttaaaaaacgtagcaatgaaacagcggctgacatgtgggccccacatcccacagagaaaaaagcagccgcgagccagcgatggcgcacctgggaagccacggcggcggcgcactcctcccccaccgccatcggcgtccgcggcgaggctgcggcgacggcgggcggcctccgtgtcccgcgagcggcggcgcgggcggaatgcgcgtgcccctgcggcggaggcagcggccgggccgtccccgatctccccggcgaggcggaggcggagagccgcgaggtcgtcggcgcgaggaggaggagggaattggcgtggagcagcatctgcatttga

SEQ ID NO: 17640 - DNA, 421 bp, Oryza sativa
  unsure (1)..(421): unsure at all n locations
  Clone ID: PAT_MRT4530_23273C.1
cccacgcgtccgcccacgcgtccgcccacgcgtccgcccacgcgtccgcccacgcgtccgaaagtcctgaagttgaatattcctgaagaaataaatggaagaatatgaagagactgggctagtatactaatagtatagttttagagaaaaaaaatacatacttgtagtatcgaataaagtgcccaagtttcgacatgctttgtcatctccgtaagggtattgtattgtactgttgtgattatcacaaacaaacaaaaaagacatacttatagttacatggaaatatggcatgctaagtaaatnaaacatgggccctaacaaaaaaaattgtaatgggctatttaaaaaacataaaacttgtaattgggaccaagtataaaaaaagaatataagggggggccgttttagagggtccaaattt

SEQ ID NO: 17641 - DNA, 1089 bp, Oryza sativa
  Clone ID: PAT_MRT4530_23274C.1
atggacaaatctgagatggacaagatcaatgggacgaacccggagtctaccgatcaagccccttcattggctagtagacccgacgagttcgaggaggaggaatctcttgttacaccagatgcattgtctgctagaattggtggtttccaaatatatgcaggatctgtgaattggggggttttcggcagcatgaagattgtgtttctcaagtccaagctcaatgtgttgataccatgtggatttttagcaatttttctcaattacatgacccaaagatatggttgggtatttcctctaagcatgctgggtattattcctttggctgagcgattgggttttgccaccgagcaactggcacttttcactgggccaaaaggatcaatcctgtcaaacttgcttcttgttcttggttcagcattcttcagtggtggacttgcttgcggcaaaaccatgcagacctttagcaaggcagatgcagtagtgaactccggattgcttttgatggcagtgatggggttgctcattcccgctgcgctgcattatactcattcagaagctcaattcggcaagtcagaactagcgttgtcgaggttcagcagctgcattatgctcgttgcttatgcatcctacctttactttcagttgtcaaacaatcggcgtcgcaatgaagctaatgtgggggcttccaaagcttggaacataccagttgcattcatcagtgttgttttgctcccagtggtggggaattcagcaggacatgctaatgctgtcatgtttgcagtgaaagacaaattagacatttctcttggagtggcaataggatcatcgatacagatatccatgtttgggataccattttgtgtagtgatgggatggatgatgggcaagccaatggacctaaacttccatctctttgagacggcaagcctcttaacaactgtactggttgttgcatttttgttgcaggatgggacttcaaattgtgtgaaaggattgatgctatttctctgttatctgatagtagctgccagtttttatgtacatgctgatccaaattccaaggcaagtgagaagcctccacaaaactaa

SEQ ID NO: 17642 - DNA, 489 bp, Oryza sativa
  Clone ID: PAT_MRT4530_23275C.1
atgccgcggttaatccggaagccgatcaatcggacaccccggccgacccaactctatcacgcccaccctcgcctgggtacgtcggctagaggaaagctacactacaagcccagccggctgacgtcacccaaggggggcggcgccgataggcgggacccacgggtcagtgactcaaggggagagaggggggcggccggtaggcgggccccaccggcagcggctccaaaagggggggtggcgtctgccgggcttggctcggctccaagctggcgggccggctacggcgagcggcggcggtgcactgtcaccggcgacggcaaccggcggcggcgaacggcgcggaaggcggtggcgtcggccgaaggcaacagcgtgcgcgcggtggatggcagcggacacgggagggagagaaagagggaggagagggagttctcaccgtggggttggccggcacgggaagaggcgacgacgaacggcgacggcgattga

SEQ ID NO: 17643 - DNA, 3741 bp, Oryza sativa
  Clone ID: PAT_MRT4530_23276C.1
atggggagaggagtcggcttcccttgttttccttcgccttctcgtcaggtggatgttattgagggggatcgggattgggatgcttggaacgggtggatgtcgaggagggagaaagagattgggagaaagagagaggtcaggatagcgcgcgagttggagagacaacgagatgccagaatggcggcagccgcgaaggaggagatggagggagtactaagggcgatggatcgtcttcccggtaggatatccgatctgctccggtcggagcgtgggcacgccggcctctccgtcctcgcccgccgtggcttcgtcttcacggagacggagctgagcagccttgttgcagcactgcggcagctgctggcatcggccgagcgaattggtccggggcatgtcgactcccagaccgtgaaccactgcgcctacttgatagatctggctagatggatcgatgacctcatcgatggctacgcaccagataaggccgagacagagctccgggagctgaaccttgcctggatcgagcagcttctgcttgtgaccgacgcgccgccggcagcgcccgacgtcgtcgtcgacgttggccctcccagtattcttgtcggcatcgacgtcccaaggaagaagctggccagatggctcacggcctccgacgatggggaggcgcagctgaaggtgctctctgttgtcggaccagctgggatgggcaagacgacactggccatggatgtcttccgccagatcgaagggcagttccagtgccgcgcggtggccaggctctccgcaaggccgcctcacaacgacaagctcctccggcacatcatgtcgcagatcaccgggtcgcaggcggacgcggccaccttggacggcgatgactgcgcgctggcttacgacatcaaacaatacctgcaaactaagaggaggactgcgcccattaaggaagcagcgccgattcctgagggcgcccgctattactcggggctccaagagccctggcttcctccggggcctttgaccagccccagaagccttgatagagtctggaagcctcaaatggttccagagcgtacggagagcttcggaggccttggtcggctccggagccctcgaatagttccggagcttatggatggctcggaggccttggtcggctccagagaccttgaacgaccccggagcccttggcttccttcggagcctgtgaattgctccggaggccttggcaggccttggatgactccggagcccctaggtggctccgaaggcccaggtgctgcatcacacgatggaggctggctccgctacccggagccatccccccaacatggactaaattatattgtgaatgcattatatgacttatttttaaggtacctcatcgtaatcgatgatatgtggagaacatcggactgggagcacatctgggatgctttcccgagcaacagatgccacagccgcataataatcactacgcgcatcagaagcgtcgctcgctcctgctgctcgcacccatggcctaacggcctcgtgcacgaggtcaagcctctcggcgcgacagattccgagaggctgttctcggcagtggctcacggttggccgcggccagccaattctggacgagtctccaatgagattctgagggaagaagactacgatgacgaagaaggagatcagagtggggtgacgatggatatctccagaccttgtgttgcagcatatttgccaagcggaatcagagaactgaagcaagtcgaggacacgctgtctcctagctacgacaatctcccctgcgagctgcggctactgtcgctgtacatgagcacgttcccgcagggttacgtgatcgacaagcacctcctcatcaggaaatggaaggccgaggggctgatcgcggtgcacacgttgcagagcgggttcgaggaaagagcagaggaatgcttctcgcagctcgtccagcggtgtatcatccgtccggcgaggacgaggaggagggcgtgcgattgtgaatgcaacccttgcagctaccaggtcaatcatttcatgttccagctcctcgcgtcgaaatccgcggacaagaatttcgtcaccaccagttgctgcgacaccggcacgctccgcggctcatccggcctgcagatacggcgggtgttcctccaccatggccagcagcagcagcagcctgcagatcaggaggtcccggcgcagatggaagagatgttctccttcactcgctcgctcacggtctctggagaagtggacggtatttctcttgaaatgttcccgcatctggttgtgctggatctgcaaggctgggagaagctgaaagacgatgacctgccacggatattcagcagcggcaaactgttcctgctcaggtatctcagcctgaggaacacgcgtatcagcgagctcccgccggagatcgggatgctgagctcgctcgagacgttggacgccagccacacccggatcgccaagctcccaccggaggtgtgcaccctgcgctcgctggaggagctcgacctgagaagcacccggatacagcggctgccggagcgaatcgacgacctagtggcgctgcggcatctgcgcgctggcgacggcgcggcgagcacgaggatccccaaggggatcgattgggggatgctccgggatacgttggagacactagcagctgtcgatctacgcgaatgctcagccgacgtcgtcaggaaactttcccttcttcgttgcctggaggtgctttccgtgtcgctatcccttcgccagtgcaccgacaaggagtaccaggacaacctgagcttcctcgtccagaggttgaagtgcctcaggtcgctgacgatccgctgcgagctcggctgctccatggagttcctcgatttctcgccggaagacgcgcctcagaacctgcgacacgtcgcgatgcacgcccggttcctcaccgtcccgcggtggatcgcagggctcaaccacctctcctcgcttcatatcagggtctgcaagctagccccagaaggcgtcaagattcttggacgtttgcacaggttggagtgcctcgagctggggctggatttcctcccaagagaagccattgtgatccaaggtcaggggttcatgtccagctctcaaaacagaagcaacagagctcccctgaactcaaaaatccatgaagaagaagaagacggcgacgacgagaagaatgggatcatcatctacccgttccgtgagctcctgagattgtccgtcgattgccgggtgccatggctggtgttcaaggaaggggccatgccgaagctaactgacctcgagctgaagctctccacgggcccggcgagccatgagagcccgccgtcgggcatcgccaacctcctgagcctcgagcaggtcgccgtgcagtacgacgcgtggtacatcaacagccggagcgtcagggcgacggtggacgccatccggaggcaggtcgccgagctccggtacacggtcaagctcgtcaacaatggcgtcgaggaggatgtggaggcagtaattaatcctcgccgagacagctgagcgcggtaagaacggagacgcgcgtgtatactgtcaacttgtcaattgtcatgtacgcttaccatgttgctccaccttccctccttcctgacattctgcaagctctggcccatgcaccagcaagtcaataaagtcgtttgcacttctgttaaaaaaaaaaaaaaaaaaaaaaaaaaaaaaaaaaaaaggacg

SEQ ID NO: 17644 - DNA, 477 bp, Oryza sativa
  Clone ID: PAT_MRT4530_23277C.1
atggcaacgggcgacgcgacggcgacggtggagtgtcgacgggacggcgacgcgtcgatgggacggcgcggcgcggcgcggggcttggcgcgcggatgggtggggctcgaggcgatgcgaccggagacggcgacggcgcgcggcagcggcgaagtgacggcgcgcggtggctcaaggcgcgaggcggtgcggcacggggcgcgacgcgggagcgacggcgacagcgcgcgcggaggggaggggctcgagacgagcggtgacacaacgacgatgcgcggtgacgcgatgcaacggcgacaagacgcgacgcgtggggctcgagagggagcgcggggctcgagagcgacgcgacggcgtggtgacacgacggcgcggcggcgcgaggctacgcgcggcgggcgagcggcgcgcggtgacggcgcgggcgacgacgatggcgacacgagcggcatcgggcaggagaaggaggagggctag

SEQ ID NO: 17645 - DNA, 542 bp, Oryza sativa
  Clone ID: PAT_MRT4530_23278C.1
caactatacaagatcttcagcagctggctccctccatttaggttgcaactgacatgcaactacctgagttctacgtacggtgaccaccttctcccatggcatcaaattcacagatgaataacagaggggccggaggagggagaggccaaggcgacgacgaggagccgacgccgacgccgccacctgcgccgccgccggagacagcgccatccactgtcggcggcggcggcgacggcgttcagctagtgatgcccgaggacgggtacgagtggaagaagtacgggcagaagttcatcaaaaacatccagaaaaacaggagctacttccggtgccgggaccagcggtgcggcgccaagaagaaggtggagtggcacccgcacgaccccggcctcaacctccgcgtcgtctacgacggcgcccaccaccacggctccccctcgtcggccgccggcgaaggaggcacctccgctgccgccgccgccaaccagtacgacctcagcacgcagtacttcggcggcgccggcgggccccgctcgcagtga

SEQ ID NO: 17646 - DNA, 542 bp, Oryza sativa
  unsure (1)..(542): unsure at all n locations
  Clone ID: PAT_MRT4530_23279C.1
ccggccgggagtgtacacgacgcctccgaattcattttcgattcctctcctctcctctccttccaccgcctaacgaaccactcgccggcggcggcgccggggccagcggggccggtgctggaccaggcgtgcctgacggcgctgctgaacatgtcggactgcctgacgtacgtgcagaacgggagcagggcgcggcggccggacaagccgtgctgcccggagctggccgggctggtggagtccaacccggtgtgcctctgcgagctcctctccggcgccggcgactcctacggcatcgccgtcgactactcccgcgccctcgccctccccgccatctgccgcgtctccacccctcccgtctccacctgcgcagcctttggattcaatgttccaatgggcccaacgccgtcgccttcgccggcagccgtctcgccctccggtgagggcccacagttccctgggacctcaccgttcgcctcgccgccgtcgacggcgacgccgtccaccaacgccggcgccgncggncgctccggcgaccacct

SEQ ID NO: 17647 - DNA, 537 bp, Oryza sativa
  Clone ID: PAT_MRT4530_2327C.1
aagagctctagcgccgtgtgacctagcgccgccgtcgtcgccgtcgctccagccgtgcttcgccctcgctccagccgtcaccgtcgctcggggaggtcgccatcgtggtcgccaagtcgtcgtcgtccttgtccgccccttcgtcatcgccgacgaccgccggagcaccgtcgccgccgtcgacccgatcttctccgccgcttcgacctcgtcgccgtcgccgtccgttgatcttccgccgccgttttggtcaccggtgagttcgccgcgtcgcgctctacgtcctggtgcctttcgttcgtgccgaagcatcatcattcgccggcgagcgtgcgccgtccgagccgccgagccgccgccggaggtgacgtcgccgctgacgtcatcggggccgtttgccgtgagccgccgtagacccgattgatctcggccgtccgttttggatggatcgatctcggccgttcattcccgtgaaccgctgccgtgcacccggtccaccgcaaaccctagccgctgacgcaataattctcttttcct

SEQ ID NO: 17648 - DNA, 1238 bp, Oryza sativa
  Clone ID: PAT_MRT4530_23280C.1
cccgggctgcaggaatcggcacgatggcgtcgtcgtcgtcgtcttcttcgtcgtcgccgccgccgcctccgccgcgccgctccgtgttcgacgccgcctacatccgcgcggagttcgcggcggccggcatctcccctcacttcatccctctcatctggaagtatgtgttgcagaaccccaggtgcggcgacctggacgccgtcccgtcgctcccggcggccgcgtacgcgctccttcggcagaagttccagccgaccacgtcgacgctcaccaccgccgcggagtccaaggaccgcaccactaccaagctccttatccgactcaagctccagtttgacttgaacttggttactcttttgtctgataacaaacataatggggaatctgtagaagcagtgatcatgcggtatgacacgcgattggggaagtatgacgggaagcctcggcctggtggcgtgcgctcaaccctctgtgtctcctcacaggtaggatgcaagatgggctgtagattctgtgctacaggaacgatgggcttcaaaagcaatctgtcttcaggagaaattgtggagcagttggttcatgcatcccgttattctcagattcggaatgttgttttcatgggaatgggggagccattaaacaactatactgctttggttgaagctatccaagtcttgataggctctccattccagctttcacctaagagaattactgtatctactgttgggattatccattccatcaataagttcaataatgatcttcccaatataaatctagctgtgtccttgcacgctcctgaccaagacatacgctgtcatataatgcctgctgcccgggcctttcctttagtaaagctaatgaatgcactgcaatcatatcaaaatgagagcaagcagaccatctttattgagtacatcatgcttgatggagttaacgatcaggagcagcatgcccaccagcttggtaaattacttgaaatgtttaaagcggttgttaatctgataccattcaatcccattggctcatcaaacaatttcaagactagcagcgaacataatgtgaagaagttccagaagatcctaagaggaatttacaacatcagaaccactattcgccagcaaatgggtcaagacatagctggcgcctgtggccagctagtggttagcctccccgatgaaagatcagcgggtggtgccacccttctctcagacattgaagacatcaggatctga

SEQ ID NO: 17649 - DNA, 410 bp, Oryza sativa
  Clone ID: PAT_MRT4530_23281C.1
tgtaatggatgagctgctaaaagcatttcagtggtagctcatgagagagaagagagagaaatagaaactgcccaaacatgggggtttctccatggattatcatcttcttgttgagtgttattgtgctggtttttgtcgcttcggccgacacgaacgcaagacactgctggcctcaatgggattgcagaagactgtcaagttttggattgtccgggacgctttccggggacattcagtccttatcagaattgcagtacctggacttatcctacaacaagaacttgcgtggaccccttccttcaaccattggaaccttgagcaagctccaaaacttaattcttgttggctgcagctttactggtgaaataccaaaagagataggccagctctcaaacctgatatttctgtag

SEQ ID NO: 17650 - DNA, 2445 bp, Oryza sativa
  Clone ID: PAT_MRT4530_23282C.1
atggctgatcaaggattccgccccttctcagccttgatgtccgcgccatctactgcgcagcagcatgtgggttcttcattcagcacagcagtagttcaggtggccgcagcacagcagtcacacacagatcatggtaacatttgcctagctgatgatgatggctactattggaggatgaccggacagagtacaactcagggtgagtcgtctccaacgatattatcccactatcaatgtgcccaagcaaactgtgtggtccagaaaacagtggcatacactgcagatgttgaaacattttacaggggcagacacaatcatctacgacagtcagatagactggagccaatgtctcaagttggtgtgctagttgaggcatcagatgcagcaggggctgcggctggaccttcggtgcctgagacagaaaatggagatgatcaatcgtctggttcaagtgataggaatgaagacgatgctggtgatgtagaaatggacgaggatgcagctgctggtgatcccaatgcaatgcaaaggagaaaacttaagtccaaggtgtggaaggaatttaaacttgtgtttaaggatggaaagctccatactgccatatgtaatcattgtaaactcaggctcgttgcagagactagaaatggaaccagccacctacgccgacatctgaagatctgtcctgaaaaggctggaaccagcagggtgcagaaaaagcgaaggagttcaacttcgcagtcacagcctgatttacctgtttcagagaacttggaaaatggtcaagaaaatccttcacagaacttggaaaatggtcaagaaaatcctcttgaagagtttatgagggctacggtcctgaaactttgtcccttccctgccatgtaccgtgcaagctttgcgtcatttctggcgggtagaaatccagctccgaatatggttccacaaactacagttgaggacaagtttattagtgtttacgagaaggaaaaattgaagctgaaggagaaaataatagctacacctggcggagttttcctgtcagtgaataagtggtactctgggagttatgaaacaggaattgtttgtttaacagtgcactttattgatgaagagtggaagattaatagaaaaacaataagatgttgtctttcagaatcggatggtttagacttgaacttgttcccacactggcaatccgaaattgctaattatgaggatgatgacaagatggtgttgaagaaggtagttcgagattggtgtcttgagccgaagcttttaggagtgacattggagggatcagtggataagaaagccacaatatccttggaggatgaccttacgactggaaagaactaccttgttgccaaatgcaagctattaactatcccttgtatggtagatggcctcgatgatcttatgcaatacaccgttgggagagaggtgcgatcgatgtggtctcgttacatgacaaacactcccgagcgtaagctgaaatgtcaggaagttgtatcacagctgcagctagaccgtccctcttttggatcaaaataccggtacttaacattctattggtgtgaggctgctttgcagttcatcaaatcatttccactttcaaatggcagtgaacgtccatcattagatgatctggaagcaacagagaacttttgcaagattgcaagggcaatctatcatgcaacgaaagctttttatgaaccttataacttgacttttaattcatattttcatgtgatatggagcttaagagcaaccctacaagaattacctagaataaaaaacatagagagggttattaaagtgaagaatatgcaggagaaatttgataaccattggaagaagtggtacttgtggttgtcgatagctgtggttctagaccccagatataagctcgctttcattgaacttcgtttcagagaagcttttagtcaagatgctggaacctatatctctgaggtgcgtgcaaagttttatgagctctatattcagtactctcatgttaatgagcaaagtaatgagatactgaatcaaggcaacaatggttcaggtacacaaattagtgctccattacataaacagagaacgaattacaccatagcacaagctgcacttgaggaattcaaagagctttttgagtatcttggaggggggctctgtcctcaaaacgattcttttgatattctgaaatggtggaaggataattcagcagcgtacccatctcttgctaaaatggcacgggatattctagcaatacctggatgtgcagtttccgctgaatctgcattcaatgacgatagtgatcatcgggcagagctatttaacggaaaattgggccctgagacaactgaagcacttatctgtgctcaaagttggattattaaatcatctggaacagctgatgcagataatggaaataatatcacattatcttaa

SEQ ID NO: 17651 - DNA, 327 bp, Oryza sativa
  Clone ID: PAT_MRT4530_23283C.1
atgaaggagaaactgaaggcgaggtttcagatcatcgccgtcttgctcgccttcgccatggtagctcaagctatggcgattcgcggcacgggtacgacggcggagcaggataacaccggagggagcacgagtgcgaaacataccctgcctcaggctgttggaagtggcacctctgtggacaaccaccatgccatccctcgtgatcagtacagcaaccatgggggtgatgatggaggtggcagtactggtactggtgatacaaacaactatagccctaatcctgagaataagctgcttctcttcatggggatagaggagagcttctaa

SEQ ID NO: 17652 - DNA, 601 bp, Oryza sativa
  Clone ID: PAT_MRT4530_23284C.1
cccacgcgtccgcgaattcttcctctcctacagtagtagagatttttccaggcagctataggtttgatcaccatgaaggagaaactgaaggcgaggtttcagatcatcgccgtcttgctcgccttcgccatggtagctcaagctatggcgattcgcggcacgggtacgacggcggagcaggataacaccggagggagcacgagtgcgaaacataccctgcctcaggctgttggaagtggcacctctgtggacaaccaccatgccatccctcgtgatcagtacagcaaccatgggggtgatgatggaggtggcagtactggtactggtgatacaaacaactagtgagttgatgatcatggatgtgtggagattaatttctgagcttgatgtgaggggagatttaaatatatatgttgtgttaattaaggtactaagtactggttgtgatgttgttttgatatcagtagccctaatcctgagaataagctgcttctcttcatggggatagaggagagcttctaaatatcaatgtatgcaatatttctgttgtgtgccataagctgtttactcttatgacaaattaattaaatctattgtccag

SEQ ID NO: 17653 - DNA, 2713 bp, Oryza sativa
  unsure (1)..(2713): unsure at all n locations
  Clone ID: PAT_MRT4530_23286C.1
tgatccccgtgtgctgcagtgaatcggcacgaggccccacgctggtgccactgccactgcccctcgccgccgtagtcgcggcctgcatcctgccgccgacgacctgccgccgcacggacattccgcacacgcccgcgggttgtgtgctgtggcggcgccgcgtcgctgatccaacgcgagcacgttcgtcgtccatccatcctcccgctcggatttggagtcggcaaccgctcgggctcgcgtcgccgccacgggggcggcgaaattgcaacaggcacaggcaggtgaggtatcaagtttctagtgcactaaacaacctttgagatgggtactgtagagaatatggaagggagagaagagcgttcgactgatgtggaacgggatggtaaacaaggaaaagaagttgaatcggactatgaaccagctagagactctgtttcatctcagggtgaggctaacagcaatgaagataccagagccaaaagagtctcaagggttccaaagaagctagtgaagaaagattcaaaggaaaacagcccacgctcaggcagaattaattccaatcgccaagtgcagactaagctgcaatatatatcgtcaaacaatttgcagagcaaatctccaaagccaaacaaaacatctgatggtgctaaaaccattgagataacaaagccagatacagtgacagttccttcttgtccttcatctgaggtgtctgaggagatggatgataaacccattgagaatatagtgacggatgataaatccattgaggatgtagctgatgataaggccactgagggcacggcctcttatgataaggccactgaaggaaaagctgctgatgatacgaccgttgaggacaacaccactgatgaaaggagcattgagagtggcactgatgataggaccattgcgggtatagcagctgatgttaaatctagtgaagaggcaaaggagattgatatattggatgaagccccaaattgtgatcagagtactgctactgacgaggaaatagctgatactgaagaaagcatagcttatgatggtaaatcagctgcatatgaaaagagtgaggaattagaatctaaatgtgaaaggttggagcaggaacttcgagaagttgctgcccttgagatttctctttattcagtagtgccagagcacggttgttcatcgcataaattgcacacaccagctcggcgtctgtccaggctatatgttcatgcatcaaagttttggtcctctgataagaaagcttctgtcacaaagaacttcgtttctgggcttgtccttgttgcaaagtcttgtggaaatgatgtttcaaggttgacattctggctatcaaacaccgttgtcctaagagagatcattgcacaaacatttggcattacacgccaaccaagtcttgctatgaaggctttcagcacaaatgttaatgcaaagatgctcggtaagaactcttcaccaacgcggcggaaaaacaactacagtggcaagcatgctagacctgctatctggccattacctgatgattggcgggaaactggtacactcgtggctgcactggagaagattgaatcatggatcttttctcggattgttgagtcagtgtggtggcaggcattgacaccccacatgcaaacactggtgaaagatatatcaagtccaaaggctgggagtttgttgggacctgctttgggtgatcagcaacaagggaacttctccattcatctttggaaaactgctttccaagatgccttcagcagaatatgtcctcttcgtgctggtggacatgagtgtggatgcttaccagtgttggcaaaactggtgatggagcactgtgtagctcgtttagacgttgctatgtttaatgcagtcctgcgtgaatctgcaaatgaagtaccatctgatcctatatctgacccgattgtcgactcaagagttctaccgattccagctggtgacttcagctttggatcaggtgcacagctgaagaactcgatcggaaattggtcccgatggttgcaagataagtttggcatggttgctgctgcccctgagaagcatggtcaagcaggagatgagagtgatgacagaagtggtgctgctgatttttattctttcaagctgctcaacgagttaagtgatcttctgatgctcccaaaggacatgcttcttgaaaagtccatcaggaaggaggtctgcccttctattggcattccactggtaacaaggatactctgcaacttcactcctgacgagttctgtcctgaacctgttcctggaatggttttagaggagctgaatgccgagagcttgctggagcgcttcacggagaaagatgtgatcaccacattcccctgcgtcgcggctcctgttgtctactgccccccttcaccggaggatgtcgcggagaaagtagcagacgcaggcgggaacgcggagccggacctgagggcctccatggtgcagaggagagggtacaccagcgacgacgacctggacgacctgggcaaccccctggcgtccctgtacgacaggagctctccaccctcaccctgcaacggggcctctcgttcgactacacggcaaggtggctctatgtcgaacgcgagatacgagctcctgagagaagtatatggtcggagaggcctggtttgagtaccagtgaaagtgtggacggaagncgaaaagagagctcttggct

SEQ ID NO: 17654 - DNA, 219 bp, Oryza sativa
  Clone ID: PAT_MRT4530_23287C.1
catgggggtttttttttaactgttttttttttttttttccaaattaaagtttaaagtgttgtttttcttgatgatgcacctccagtctgccataaattaatcacaatgcagttttattaaacagggggctttatcacatctttttcaaagaaaggctttcttaaattacaaataaatttccacacccccactttggttttccatacataaactggtttt

SEQ ID NO: 17655 - DNA, 405 bp, Oryza sativa
  Clone ID: PAT_MRT4530_23288C.1
atgtcgtctttggcttcgcctccccttcagctgaacccgccggcgttcatcgtcgcctcctcgccggttcccatcgtcgtcctcccccccgtcgtcgtcttcgtccttggctccgcgtcgtcaagcgttgtgctggccgcgtctcgccttcgtccaaggatcgccgccgaagtcgttccctcgccgttcgcctccgtcgtccccaagccgtctccgccgcgcccgttcgtcgtcgttgttcccacgcctcgttgcgtggtggtaagggtgcctcctctcgctgcccccgtcctcgtcctttcggtgtcgccccgcgcccgttgtgcggttgtcgaccccggtgcccgtgtaccggtgtcggtagtcgttcgtgggcttgtaactttgcttgtgtacttcgcgtag

SEQ ID NO: 17656 - DNA, 105 bp, Oryza sativa
  Clone ID: PAT_MRT4530_23289C.1
gataatgttaggtgaaagtcccacacacttcagggtattgttatcgcaagagggcgtgtagtccttggtcgacccacggtgaccatggacgcatactttgaggtt

SEQ ID NO: 17657 - DNA, 630 bp, Oryza sativa
  Clone ID: PAT_MRT4530_2328C.1
agcaagagatcgccccctggatccgcacctagtgatcatagaatcctaacaaagttggtcctttttatgctatctctacaactgcgcttttagatttcgaaggattgtcacatgttacctggtgttaaacttccatgtggcatgcttgatttagaggatttggcatagccacaaagttcccaaatcaatggaatcaaggattaggatagaggaacgtggttcgctaaggtttttataatgtgcggacaaaaatgttcccatgtggaagcaaatgagttcgactgaggggtgagaacgtgagagtgtgccgttggtcaccccggccgcgcggccagccacgccggcagccgcttcccctgtctcgctgaagccaacatgttctagtccgaaatttccaacctggtcgtggagcgaggttgttgccaggcagccgacatccgaggaagaggacgtgaatgcaggacggtgttggacggaggttcggcgcaaggtcagaccgcattcatggcggtcgagcgatatcccaaccaccaacaccaggggcgcattcacggcgcaaggacgatcccccgctggctccaaggctgttgcttccagtgtgcttggccctagggcatcagaaaaactcct

SEQ ID NO: 17658 - DNA, 786 bp, Oryza sativa
  Clone ID: PAT_MRT4530_23290C.1
gcacgaggtctctcactcgcttgtggtctcacactactactagctgtggcagtggcgccaatggaggaattagcaccggagctgatcggcccgaggatctccttctctcacgacggcgtcgtggcgaccgccggagcggcgacaccggcggcgcggtcggacacgtcgctcgtcgtcgtcatgtcgtcgtggcggcggctccccgagccggagttcgacttcgccaatgcggccgccgccgacgtcgcgccggccgatcgactcttcgccggcgggaagctgctgcccgtgccgccgttgccgccggttcatcccaagccaagcccgtgcaagcagcagcaggcaacaagcggcggcggcgtgaagccgacgagttaccagaggcggccgggttcttggacgtcgccgttcacgcgcagctgcagcgtgaattccgccacgacggcggcgccgcggtcggggtcggggagcttcagctgcccgtcgttcccgctcatgcggagccgatcggctggctcggcggccgcggcgcagggcggcggcctcggcggcgtcgtctcgggcggcggtcaccaccggccgccgcagcacaagaaagccggtgctacagcagcagcttactactatgggggcagcagaaatggcagctccggccatggcgttagggttagcccggtgatcaacgtgccatccattggcaccagcatggtgaacatgctgagctacttgctctgcgactgtggcaacaagaccaccaagaacaggggtttcggacttaattgctag

SEQ ID NO: 17659 - DNA, 1479 bp, Oryza sativa
  Clone ID: PAT_MRT4530_23291C.1
atcgaatgacgcttcttcttcttcaccgtccaatggcagtgacgttccttctttaagaaaagagaagagaaaaggaagaaaaagactgcaaacatcatgcaatgccagtgccagcccagcaaaatactccctccccaagaagggctatggtactagtacccctaaacaagtgcaagatcaccatcatgcgaggccagcttgttcttctgtctgtgtttgcaagcttcatcggagagaagcagcttaatatgagtccctagttcaagctacttggcacatctaacatcacaggtgctcctttctatatatatatccctattgttggttgtagtacaaatcttctcgcagtcgcggggagcttgcttctgctacttaattggtgggtgggaatgatgatcgatggacgcccaccattgcagtctccgcctctgatcgaccatcaatacaggccgcggcatggtcatctttcacccagcaccgattcaagaagggcctcttcctcctccaccaaagctgtgaattctgtctcttcgtctatggcaccgacaacagcagggtcgtccatgagttcatcttcagcaatgcgtagcacgccatctttatccttcactgcaacgaacagaagaggatcaactggtgtataaatcatataatgtgcgccatccaaattgaaacaacaaatctctacaccttcaaaaggtacactatcaccgccgtcaccagaatcatgaaattcttgaatcgcgtcttcaggaaagcaaaagccaccccgtgctgtataacaaaatccactctctacaaagtgcatatgcactctagcgagggcatatgcaacggatggaatgatttccttaatctggtcatcatcaacagcaatccagccactgaaattggcactcttaaggacctgcacaggcatgtcaactgggcaaaggagcatgcagtcgtggtctagcgtgcttcggaacaccctcctgatgatgcactccaagggccggttgttggtgtcatcaatgatggtgacgatgcgcttggaggcggcggcgatgcaccttccctggtcgtccagcacgaagcccgctggcggcttgggcatggcggcagcccgggtgcccccaccgaagctcccctcctcctcgtcttggtcgtcctcttcctcgtcgtcgtcagtgtaggattgttgggggcgagcgggagggccccgggtgcgggtgcgcctgggaggaggaggaggaggatgacctcgcttcctgggaggctgcgcgtcggcgtcgtggcggaggcggcggtgcttggttgggcctggaggaggccgctgcctcgggggtgcggcgcaggtgaagacggagagcgcgcggcgggagcgcaggggcctcgccgcgactgtgagttgcacggacaccatcgccatggccgccatgactcgctgctggtggtggtggaggataggtacaagcagctgctgctgtgcccggccgg

SEQ ID NO: 17660 - DNA, 182 bp, Oryza sativa
  unsure (1)..(182): unsure at all n locations
  Clone ID: PAT_MRT4530_23292C.1
gccacagattgttccagagtttttgttttcctcttctccccttcgcgttangcnatgtgtcccggagcagatacgcnggcctcgacgtccccncctgcncgcncgnangaacctgaggccggcttcgacgtnctggacgcngaccgacggtgcatcagccgggagacctcaagtcgttctac

SEQ ID NO: 17661 - DNA, 943 bp, Oryza sativa
  Clone ID: PAT_MRT4530_23293C.1
gggaaaaaaaatctgaccatttcttgatttccccttccgtccgccctcgcgtccgcactccatggaccaagagaagcatcaagccatggccggcgctgccgacgccgccgccggcggtggctctgttgcgaaggacacgggcgacgattttgagttctgtgtactgtcgtccggtgggctcgtctctgccggcgccggcgccgcggcggccgacatgtgcgtggccgacgaggtgttctcccaggggaagctgctgcctctaaggctctcgtcggcggcggctggcgatgcggccgggcttggtgttctgccgcggtcggagtcggtggcgtccaccgtggggttcggctcgcggtccgacagccggagcgcgagctccagcggcagcagcagcggctgcgtcagccggagcgagtcgtccaagagcgcctcctccgaccactccgccgcgcatccgccgccgcagcagcagcagcagccgcggcggtctctgtcgagcagcctgttctacgcgcacccgagcccgtcgccgcagctgcgcacccggccgccgcgccgcagcaccgggtcggctcccccgccgccgccggccaccgcgtggggcatcttccgcctcggcgtcgtcggcgccccggacgtgtaccctccacgctccacagattccaagaacgccgccgccgcagcaaaagtcggcagcagcaggagcgcacggttcgagccggcgagcaccgccgccgacaagaagcatccggtggtgggtctcttcggcgacagcttcgggtgcaagtgctcccccgacgtggtggagccagtcaccttgccggcggcggcgaagagggccaaggccaagaacaagaacaaggccggcgacaagaaagctcagagtgttcgtcgcagcaggatcctggactggttcgaggaactaaccatcaccaagaagtag

SEQ ID NO: 17662 - DNA, 285 bp, Oryza sativa
  Clone ID: PAT_MRT4530_23294C.1
atgcggcagcagtgcgggacaccgaggcggcagtggcgtgggaagagccggcggtggcgtagggaaggagaaggaggaggaccgggctgtccagcggatcccgacgccaccaggaggggactgggttgtcccgtgtcccgccccgccgctgcctccgcgtgccgtgtcgccgtcgcgtccgcgtgccgcgccaccatcgcgtccgcgtcccgcgccgccgcggcctccgcataccgcgccacctacatttcccgtctcctacaagcccaccttcgcggcaagaac

SEQ ID NO: 17663 - DNA, 735 bp, Oryza sativa
  Clone ID: PAT_MRT4530_23295C.1
atgaaggtgaagagcgacaaggatgcgccggcgccggcggagatccgcggccacccgttccacccggcgcacaagctgaaactgatcaccgccgacgacgcgggggcggggaggttcgtgtgcgacggctgcaaggagctcggcggcgccggctgcgcgcgcccccgccgacggcgggcgcccgacgacggggacgtcagggtctgcgacgcgtgcggcgacgacgtgcgcggcttcgtctaccactgcttcgaccgcgacctcgacctccacccctgctgcgcgcacctgccgggccgcgtcgctctcggcggggccgcgttcgagctctcctccggcggcacggctccccggcggtgcctcctctgcacggaggaggggagccgcccccacctccgccgcaactactggacgtacagctccgacgacctcgacggcgaggccgtgcacctgcacgtggcgtgcgtgaagaggatggcctacgagagctctagagccggcagcagcagcagccaccgcaccgacggcggcggcggcggccggaacatgccggtgatcagggctccggttcaggcggcggtggctctgcggaagaagaacgggaggcctaggagcaagctcaagaagctcctcaagatcgtcgtgttcgtcctccgcgtcatcgccggcgtgttgttcggtgacccgacggcgatggccgtggcggtggtggggttagtcttccccaacggttag

SEQ ID NO: 17664 - DNA, 191 bp, Oryza sativa
  Clone ID: PAT_MRT4530_23296C.1
ttttgggttttttatttttctacgggttattttttttttattttctttttttttcacggagggggaggaaacccgggcaataccggaccgagacccgaaggcggaccagcttaccctatagggaggccaattagaggttggcggaaccaaagcaaaagcagatgccgagaggaaatagttatccgcctaca

SEQ ID NO: 17665 - DNA, 749 bp, Oryza sativa
  Clone ID: PAT_MRT4530_23297C.1
gcccaagctcccggacttcctcccgctcctcacgccgctcttcaccaagcagctcgccgcggcgcgcgaactccggcggcgccagctcggctgcctggcgccgctggtgcgcgcgcgccgggagttcatcaggggcggcggcgagaggaacgccgacgggaacacggtggtcggcggcgtggagatggtgagcgcgcccgtcgaggcgtacgtggactcgctgttcgacctggagccgccggggcgggggaagaggctcggcgaggacgagctggtgacgctctgctccgaggtgatgagcgccggcacggacaccagcgccaccgcgctggagtgggccatgatgcacctcgtcctcgacgccggcgtccaggacaagctctacggcgaggtcgtctccaaggtcggcaccaccgcgcgcatcaccgaggccgacgtcgaggccatgccctacttgcaggcggtggtgaaggagacattccggcgacacccgccgagccacttcgtgctgtcgcacgcggcgacgagggacacggagctcggcgggtaccgcgtgccggcggacgccagcgtggagttctacacggcgtgggtgacggagaacccggcgacgtggccggacccggaggcgtggcgccccgagcggttcctcgagggcggcgagggcttcgacaccgacatcaccgtcacccgcgccctccgcatgatgcctgtcggcgccggccgccgtatatgccccgccgcaccct

SEQ ID NO: 17666 - DNA, 2100 bp, Oryza sativa
  Clone ID: PAT_MRT4530_23298C.1
ctgcaggaattcggcacgagggctataccaagctacgaggtgaagaagctgagagtgatcgatcgatcgagtgttcgacggcggcggcgaggtcgaagatggtggacatgaacgacgtgctgctggtggtgtcggcggcggtgctggcggcgatgtggtggcggcggtgttccaggaccggcggcgccgacggcctcccgccggggccgccggggtggccggtggtcggcaacctgttccaggtgatcctccagcggcggcccttcatgtacgtggtgcgcgacctccgcgagaagtacgggcccatcttcaccatgcggatggggcagcgcacgctcatcgtcgtcaccgacgccgacctcatccacgacgcgctcgtcaagcagggcgcggcgttcgccagccgccccgaggacagcccgacgcggctgctcttcagcgtcggcaagtgcaccgtcaactcggcgccgtacggcccgctctggcgcgcgctccgccgcaacttcgtcgccgagatcgtgtcgccgccgcgggtgaagggattctcgtggatccgcgagtgggccgtcgggagccacctccggcggctccgcgccgagttcgccgccaccggcgccgtcaggatgatggccaactgccgcctctccatctgcagcatcctcatctgcatctgcttcggcgccaagatccccgacgagctcatccgcgagatcgaggaggtgctcaaggacgtgatgatgatgaccatgcccaagctcccggacttcctcccgctcctcacgccgctcttcaccaagcagctcgccgcggcgcgcgaactccggcggcgccagctcggctgcctggcgccgctggtgcgcgcgcgccgggagttcatcaggggcggcggcgagaggaacgccgacgggaacacggtggtcggcggcgtggagatggtgagcgcgcccggcgaggcgtacgtggactcgctgttcgacctggagccgccggggcgggggaagaggctcggcgaggacgagctggtgacgctctgctccgaggtgatgagcgccggcacggacaccagcgccaccgcgctggagtgggccatgatgcacctcgtcctcgacgccggcgtccaggacaagctctacggcgaggtcgtctccaaggtcggcaccaccgcgcgcatcaccgaggccgacgtcgaggccatgccctacttgcagaagatacgggtgatggggaattggggatatgctgaattgctaaccgaaatggatggattcgcggcgctcgatcgccggcgtgcgcatgtgcaggcggtggtgaaggagacattccggcgacacccgccgagccacttcgtgctgtcgcacgcggcgacgagggacacggagctcggcgggtaccgcgtgccggcggacgccagcgtggagttctacacggcgtgggtgacggagaacccggcgacgtggccggacccggaggcgtggcgccccgagcggttcctcgagggcggcgagggcttcgacaccgacatcaccgccacccgcgccctccgcatgatgccgttcggcgccggccgccgcatctgccccgccgccaccctcggcgtcctccacatccagctcatgctcgccaacatggtccgcgagttccgctgggtcccgcccgccggcgagggcccccccgaccccaccgagaccttcgccttcaccgtcgtcatgaagaacccgctccgcgccgccctcgtcgagcgccgcgtcggcggcgagctcgccaccggcggcggaggcggcgccgccgcgtccgcctaattaagtactacgatataaatacttcggtagctgctgtccgttggatggcggatggacggacggatggatggatatgcagatgatgtcttaaatttttacttaaatagagtgttctcttgatatcttcttcttctttgatttttttttgttttattagtggatctcttttttcttttctctcttgtttttatccaggattaagtgtacctactgctgcttgatctgctcatatatatattggtttccaagtcgagaaaaaaaaaaaaaaaaaactcgagactagttctctctctctctctcc

SEQ ID NO: 17667 - DNA, 435 bp, Oryza sativa
  Clone ID: PAT_MRT4530_23299C.1
atggcgatgccgtgggagctcgccgagtacctgatggccgtcacctgggtgcccctcggccgcttgcagccttcccttctcttgcaggagttacgggagtgccagcacctggattccactaccgttgctgcctccgcctccgccaccggcagcggaagtccggacatcgagggcatggcgcaggccgacttcttcttcggccccgagttggatgacttgatgcagcagctaggtgacggtgacaccgggcagaagggcatgctgccagcctcgtcgtcgttgccatccggcgtgcagcggcgcaaagccggcggggcggggcggagcgggcggatggcggcgccccgcgccgccggccgctggggcgccgccgcgggcagagtcgcagagaggggagacggggagaaagaagaggtggcgcatgttttgagttga

SEQ ID NO: 17668 - DNA, 136 bp, Oryza sativa
  Clone ID: PAT_MRT4530_2329C.1
tgggtttttgtcattttcggggatatgtttgctgcttttataaacgtgaatggaattctcccacagtatacgaggaaactgcaataccgacacactgggagacatgagcacgaggtaactatggaaatggcacaca

SEQ ID NO: 17669 - DNA, 918 bp, Oryza sativa
  unsure (1)..(918): unsure at all n locations
  Clone ID: PAT_MRT4530_232C.1
ctattactcacgttagttngnnnngcgctcgncggctttctctggctgactccccgcgctgggttggccgctctagaactttgtgggctcccccgggctcgcggagttcggtacgaggcgtctgcctgctgatcgggccatggcgccctgcgtggcgccggccgctgcccccttcgcgtctgccgcccgcgggcccggcgtgcctgctctcctgctgcgtgccggggggcgggtcttgtattctttgcgcggtccgtccctgcttttgcagttggcgcgccctctataaaataacgcggcgcttttcgctgtcgccggcgtgggtcctgtctccgtctcgcgtcctctcgccctgttcggcgcgtcctgggcccgctccggccgtcgcccgatctcgcgccgtcggcgcggtgcttgcgcgcgcggccgtctcactgtgctcggggtgggtttgtgtgtctgcccggcgtgtgctgtctgggtgttgctccttccgtcgccgatgcgctgttgcctgccttcctccggtgggtggggggttgctcgtggtgctgtgctggttgtgtctcgggggtcgttgttgcgttgcgtgccgtggggggcggcccgctgctgtggtgcctggtgcgtctcggcgcgctgccgcgctgtttgcttcgtgcgacccgcgctgtggtttgtgcttccgctgttcggtgttttgttggcttcttgtttgtggctttttgcctccgtgctcttgcgatgtgcctgctgttgtggatttggcgtcttcgcgtcgtgttcgtctgtcttggtttcgcgtttgttcgtttcggttgctcccgcgttggttcgtggttgcgtgctggtgccgcccgtgtcgccgcgtccccccgttcgcgcctctccccggggtgtctcggcgcctgctcgccg

SEQ ID NO: 17670 - DNA, 102 bp, Oryza sativa
  Clone ID: PAT_MRT4530_23300C.1
atgggccttccgatcgttggagaaacaatctggagcgtccacctggcctcctactgcctgtcacaatattcgatttctttcttcgttgtcaagaagatggat

SEQ ID NO: 17671 - DNA, 318 bp, Oryza sativa
  Clone ID: PAT_MRT4530_23301C.1
gagagaatgacatgacggaacacgaggaggttgactgggagacggtgtaaggctgaccatggacggttgacgtgacaaacttggacacatcttgcttatcagtattctacactggctacctgagtaagtcataatggtgccacgcccgtatcgaacaacacatgggaactctcatttggctatacgagtgcatgtacacctggatcatacaccactacctgatgtgcaccatcaaatcgtgcaccaagtgcagctacttacaagagcacatgcccgaccttttcttcattttcgtcttaatcaagtgaagaatatgat

SEQ ID NO: 17672 - DNA, 410 bp, Oryza sativa
  Clone ID: PAT_MRT4530_23302C.1
tgaacccattggaagtttaccgaaattttgttccggaaccaagggccttggagccctccacggggaaattccggaaaccgccaccaaggccccggaaaggccaatttaaaaccgccctcctgccccgtttacccccgaaaaaaaacctggggtggaacccaccggccgattccggcgcgtgagttcaccatgattcagtcagcaccgctgatgctgctggctgacctgatgagttcgtgtccgtacaactggcgtaatcatggcccttcggggccattgtttctctgtggaggagtccatgacgaaagatgaactgattgcccgcctccgctcgctgggtgaacaactgaaccgtgatgtcagcctgacggggaccgaaagaagaactgcgctccgtgtgcagagctgaa

SEQ ID NO: 17673 - DNA, 171 bp, Oryza sativa
  Clone ID: PAT_MRT4530_23303C.1
atggagaaagtggtcaccttgatgttatcaccaccatcacggtatgatgacagatgtgcttggccaccgtgggtcttcaagactgatggctcaggccatgttccaaccaatccaactccatatagccaaataccatgccaaatacataaaaatattgggggcgatgtctaa

SEQ ID NO: 17674 - DNA, 742 bp, Oryza sativa
  Clone ID: PAT_MRT4530_23304C.1
acctcaccgccgaggagcggtaccaggtggtgagggcgaacgcggacgagctcaagcccctccagctcggcctcgccgtgcgcaccgccgacggcggccgcttcgcctgggagttcaacctgaacgagttcgacctcgccgccgacggcgacatgtgcgagccgggctccgtcgactacctccgccaccgcggcatggacttcaacgccctcccatggtcgggcgtcggcgccgccagcctcggccgcctgctctggagctccggcctcctcgccgcgcggccgtcgtgggccaccttcgccggggcctaccacgtcgcctacttcgccaggatcttgatgctcgccgtcgccgtcgccggcaccggcggcggcggggcggcgaggcggctccccgccgacgtcgggggattcgaggagatggtccgctcgctgctggggcatcacgtgtacgacgtcaggttgctggccggggagctcaggggcccgctcgccgacgttgcgaggcagctcggcgccgctgtcccagccgacgcggccgccgcggggctcgccggcgccggcgccctcatccggctctacgtgttcatcagggcgtcgctcctgttgtccgtcttcttcctcgccgccaacgccaatggccatggccacgtcctcgtcgcctccgtcgacttgttccactccttcatcacactctggtccgtcgacggcgccaccgtcgccatcgtacgtccttccttcct

SEQ ID NO: 17675 - DNA, 438 bp, Oryza sativa
  Clone ID: PAT_MRT4530_23305C.1
atgggcgacgggaagatgggagtgggccgtggaggtgcgggcgtcgtcgacgtcgacgccaagccactgccgcatgctccgaggcaggagaagccggtgtgccggaactccacgacagtcggagcggcggcagcagcatcgggcggtgggcacaacggtggggatcagcggtgggggacggatgagatgagcggcggcggtggcatctggtgtgggcatcatcaacgccgaagccaagttgctaccacatgctctgaggcggtagaagctggtgcaccgaaactccgcgacggccggagcgatggcagcgacatccaagtggtaggggcgtggctccgcctgcacgacgacgcgccactgcttgttgacacagggcgccatcgcctgtcctctcacctgacgccgcccttcaatggccgagggggaagagtgcgctga

SEQ ID NO: 17676 - DNA, 213 bp, Oryza sativa
  Clone ID: PAT_MRT4530_23306C.1
atgctggcccatatcgggctcaacagtgtcccgagcacctgggctgcagtgcccattctcctactgaatatatgcagaatgcaatgcagcaattgcggccattgccagcctgcaggcaagaacatctccgatttgattcgattcctgtgggcggagaagctgaaagcaaaattcagagatcaggcatggctggggggcaacccggcgatttga

SEQ ID NO: 17677 - DNA, 2336 bp, Oryza sativa
  Clone ID: PAT_MRT4530_23307C.1
cgccgccgccgccactttatgctcgtctgcgtgccggcgacgaggcctctcgctcctccggcagcgcccgccccgccccttcccccctctcccgcgcccgcgcagcagcccaccccgcgtcgcctccctccgccccctctccgccgcggcgatgggggagaactccgccgccgccgccgggaaggggaaggaagcgaaggggaaggcgacgacctcggcctcggcctcggcaccgaacgtcgagcccgacgtggcctaccttgaggcggtgacgcagaagcggatccggcagttcgaggagatccaggccaagcaggccctcgagcgcctcaacatcggaggcgagcccatcaggataactttgccagatggtgcagtcaaggacggaaagaaatggatctcaacccctatggatattgctaaggagatatcaagtggattagcaaatagctgcttgatagctcaagtgaatggaacactgtgggatatgacgaggccactggaaggtgattgtgaattgaagttgttcaagtttgatagcaatgaagggcgtgacaccttctggcactcaagtgctcatattcttggagaatctcttgagagggcatatggctgcaagctgtgtattgggccatgtactacaagaggggagggtttctattatgatgcctactacaatgatctgacattgaatgagacacattttggtatcattgatgcccaagcacagaaagctgttgcggaaaaacaaccatttgaacgaattgaggtctccagggcagaggcccttgaaatgttcgcagaaaataaatttaaggttgaaatcattaatgagttgcctgaagacaagaccattacagtatacagatgtggtcctctagttgacctttgccgtgggccacacatccccaatacttcctttgttaaagcttttgcttgtcttaaggcatcatcgtcgtattggagagggaaagcagatcgagagagcctgcagagagtatatggaatttcttttcctgattctaaacgtctcaaggaatacaaacatctgctagattttgagcccaaatatttacaatatgcaactctgggaaacctctggacatgctgcaaactacaaggagaatatgtttgtttttgagattgagaaacaggaatttggtctcaagccaatgaattgtcctggccattgcctaatgtttgagcacagggttcgttcatacagagaattgcctctccggatggctgattttggagtccttcacaggaatgagcttagtggtgcacttacaggtttgacacgtgttagaagattccagcaggatgatgcccatattttttgcagagaaagccaaatcaaggacgaagttaaggctgttttggacttcatcaattatgtttacgagatatttggatttaaatatgaattggagctatcaacgagaccagaaaagtacttaggtgatattgaaacctggaacaaagcagagcaacagctgacagaagccttaaatgagtttggaaagccatggcagatcaatgaaggtgatggtgccttctatggtccaaaaattgatattggtgtgtttgatgccctcaagaggaaatttcagtgtgcaactctacagctcgattttcagctgcccctacgcttcaagctgacttactctgcagaggatgaagccaaacttgagaggcctgtgatgattcacagggcaatcctaggttctgttgaaaggatgtttgctattcttttggagcattacaatggtaaatggcccttgtggttgagtcctcgccaagccattgtttgctccatatcttccaattcagtggaatacgctaaacaggtccgtgctaggatacatgaagctggttttcatgttgccatcgatgagacagacaggacaatacagaagaaggtacgggaggctcaattagcccaattcaactacattcttgtcgttggtgcacaagaagcagagactggacaggtcagcgtcagggtaagggacaaagctgaactagccacagtgagcattgatgacatcatcacacgttttaaggaggaagtagcagcttacaaatgattttgatttcacacccttttgctaagaatttactccaaatttgtgattttgatggtgtagcgggcagtgtaatcttgctattttatttcttgacaaaagtacatctgattgtcttttcttaataacgaaagtgtgctattcttcatcagcgacataaaaagaaatgggtgtttgatcatctcttgctaaaaaaaaaaaaaaaaaaaaaaaaaaaaagcgagtcccccgcgccccggcctgccgccc

SEQ ID NO: 17678 - DNA, 315 bp, Oryza sativa
  Clone ID: PAT_MRT4530_23308C.1
acgcgaccttgcgctggctctccgccttctacgaggaggtgcgcggggtttatcggaatcgctctgggaactacccatcctttcaggtcgcctggatgggactacgggcgacgaccagatacctgcttcgacatcatgccagcgcaaccccgcggaaggacacctgtgcgtcggctggatcaaccggggcgaccgggacctgtaggggggcaggcgcaacctcctgcacggatacatctccaactaccacggcatcctcacatgagagctaggcaggggcccggtcaagttctagaagactcgaccctacggctg

SEQ ID NO: 17679 - DNA, 1811 bp, Oryza sativa
  Clone ID: PAT_MRT4530_23309C.1
tcgacccacgcgtccgcaatgatctgacattgaatgagacacattttggtatcattgatgcccaagcacagaaagctgttgcggaaaaacaaccatttgaacgaattgaggtctccagggcagaggcccttgaaatgttcgcagaaaataaatttaaggttgaaatcattaatgagttgcctgaagacaagaccattacagtatacagatgtggtcctctagttgacctttgccgtgggccacacatccccaatacttcctttgttaaagcttttgcttgtcttaaggcatcatcgtcgtattggagagggaaagcagatcgagagagcctgcagagagtatatggaatttcttttcctgattctagacgtctcaaggaatataaacatctgctagaagaggctaagaagcgtgatcataggctattaggacagacccaggatctcttctttttccatcaacttagtccaggaagctgcttcttccttccacatggtgctataatatacaacaaattgatggattttttgcgacagcaatacagagatagaggatatcaagaggttttgagcccaaatatttacaatatgcaactctgggaaacctctggacatgctgcaaactacaaggagaatatgtttgtttttgagattgagaaacaggaatttggtctcaagccaatgaattgtcctggccattgcctaatgtttgagcacagggttcgttcatacagagaattgcctctccggatggctgattttggagtccttcacaggaatgagcttagtggtgcacttacaggtttgacacgtgttagaagattccagcaggatgatgcccatattttttgcagagaaagccaaatcaaggacgaagttaaggctgttttggacttcatcaattatgtttacgagatatttggatttaaatatgaattggagctatcaacgagaccagaaaagtacttaggtgatattgaaacctggaacaaagcagagcaacagctgacagaagccttaaatgagtttggaaagccatggcagatcaatgaaggtgatggtgccttctatggtccaaaaattgatattggtgtgtttgatgccctcaagaggaaatttcagtgtgcaactctacagctcgattttcagctgcccctacgcttcaagctgacttactctgcagaggatgaagccaaacttgagaggcctgtgatgattcacagggcaatcctaggttctgttgaaaggatgtttgctattcttttggagcattacaatggtaaatggcccttgtggttgagtcctcgccaagccattgtttgctccatatcttccaattcagtggaatacgctaaacaggtccgtgttaggatacatgaagctggttttcatgtagccatcgatgagacagacaggacaatacagaagaaggtacgggaggctcaattagcccaattcaagtacattcttgtcgttggtgcacaagaagcagagactggacaggtcagcgtcagggtaagggacaaagctgaactagccacagtgagcattgatgacatcatcacacgttttaaggaggaagtagcagcttacaaatgattttgatttcacacccttttgctaagaatttactccaaatttgtgattttgatggtgtagcgggcagtgtaatcttgctattttatttcttgacaaaagtacatctgattgtcttttcttaataacgaaagtgtgctattcttcatcagcgacatatatagggatgggtgtttgatcaactcttgctaacaaaaaaaaaaaaaaagggcggcc

SEQ ID NO: 17680 - DNA, 329 bp, Oryza sativa
  unsure (1)..(329): unsure at all n locations
  Clone ID: PAT_MRT4530_2330C.1
cggacggtgtcagngnacgtgtgggcagcgccacggccggatctggcgctgggggggggggggggggggggnggggngggggaaaanncngggnnccccncnatnaannccgggnncatcgcnaccncnaaccntnccnaaattnccaccnttnccnccccgccncnntnangaggcccatagggngaanagggncntccacnttngaagtttcctntgnttntgaaagccaccgcngcccgcngtttaaatcnaggggnaatttnnttcnaaggggggncccacntggttgccattttccaacngcnttnacaaanccngttttngac

SEQ ID NO: 17681 - DNA, 366 bp, Oryza sativa
  Clone ID: PAT_MRT4530_23310C.1
gagaaaaacaggagcaccgtctgctacaccggacttatatcataggaatccatgggatgaatgggagggatgcattgtatcggggaggcgaaacagatttcaagtaacactaccgaacatacaaccgatcaagggattgtgccacctccacacaaaatccaaagctataaacatgcgataatgattccgctatacggacaccctccgcactgtgaagggacaagcctgtgacgatgagcggaacagacctcattggactatttataggaaagcgggcatgtctagcactttgaagaccttatcctggatgttcatctcggccacctcgatggtgatctgcccatccagagtctggcgcgtgacatg

SEQ ID NO: 17682 - DNA, 274 bp, Oryza sativa
  Clone ID: PAT_MRT4530_23311C.1
gttcaggcctcgcagctgcaccaaggccgtcccgctccgcgcacctcgtcacagccgcgcctcagcgccggccgcactacgcgtgacaggccggccggcgacgacgaggacgacgccgtgtatgtgatcgatcgagttcccgcggcgcggcggcggcggcggcggcagatctgatgttgcggttgtcgtgtacgtaaatatatttttcagtttgttggtttcgaaagcaaaacacattaagacgcccaaatcttgcaaccaaaaaaaaaaaaaa

SEQ ID NO: 17683 - DNA, 336 bp, Oryza sativa
  Clone ID: PAT_MRT4530_23312C.1
atgtcgtactacgtagatcctcgtaccagcgtaccccaataccctctatatctggcctaccggtacccaccgtcgacagtggcgcgccaggtagggggacttggtgctcaaggttctactactatgacatcgagcttcgtcgacaacagagtcaacaccggccccatccaaggaatccctgcttcaacaatgctggtgtcgactcaagtcagcgaaatcgtcttcctggtttacaccacggtgccaatctcggctggtccatcaataactgaaccagaatgatccaagggaaaaactaatggctcaaaaagtttgaaacaatcacctttttggaat

SEQ ID NO: 17684 - DNA, 312 bp, Oryza sativa
  unsure (1)..(312): unsure at all n locations
  Clone ID: PAT_MRT4530_23313C.1
ccccctttntcatccnngcctccgtcgccccaactacgtctacatggactantatccgtctccacccnaantccccaaacnatntnttgtacangatngcgcacctctncnntgcncccctctggganactcaaacagnncncnnantttgggctntttgggcnnctcaangncncacgctcccccggntnggncctccaaaaaangnnggcaaaacaataaaagggccccgggnaccccntncaaaaccccnaactttctcccnggcccntatttccatttgtgcgggagaaatttccccncanactccca

SEQ ID NO: 17685 - DNA, 644 bp, Oryza sativa
  Clone ID: PAT_MRT4530_23314C.1
atggccggagcccgcggcggcggcggcggcggcggggaggatggccagctcggggagttctatgagtacatggagcggctgcgcaactacgagcgctccggggtgccgcgcggcgccgggaccgactccgacgacggcttcgacctcggccgcatgcgccgcctcctccgccgcctcggcgacccccacacccacttcccggctgttcatattgctggcaccaaggggaaaggttcaactgctgcattcctgtccaatatcatgagggaacaaggctacaatgttggatgctatactaggtcctgttcagctgaattgttgagggatctttttggtcatgctaaagaagccattggtcaatcaatagaatcagaagatggagccctgactcactttgaggttttcacagctctctcatatctcctattctcacaagaaaatgttgacattgctattgtcgaagcaggcctcggtggagctagagatgccacaaacgtcatacaaagtactgaattagctgcatctgtcataacaacagtagggaaagaacatttggctgctttgggtggttctttacaaacttatattctgattgagtgagttctttacaaagtatagcagtggcaaagtctggaatcatcaag

SEQ ID NO: 17686 - DNA, 1310 bp, Oryza sativa
  Clone ID: PAT_MRT4530_23315C.1
gggatacaaaaagacagtgcaatattgataaatcaccacttgcttacaggaattacaatgttctgtagctatctaagctactttgacaaatggctaaatgaggatacatctaatcgtaaccgtgaagttaacatggtcaaacaagataatcttattgtaattcaaaatgcgggctattttcttaatctttcatctggttaatctctattggatcaactactctgaactgcttctgtagatcgctaagatcgtttcactcctacgacatatacggtaggtgctcttgcttaacatcttgttcccgctgaagatccggttgagtattgcagcaagcctcacgccaccttgagcaatcctcttctgaacaacaggcagggcagcgaagaaatagtcatcctcgtacgctttgcacgcgagctttgcactctcctcggcgtacttatcggcacaagtctttgtccggctacggcaagtctcccactgcttctcctcggtggaccactcatcagtgatgttcatcttgatggcctttatcatcgtgctcacgtcctcgttgtagaattccttcaaggccgtttcaatgacgttcacatcccacacgtgatgaaggttgctcttccttgtgtaccaatggacgatgatggtgttgccaccaagatctttgacgtggccgcagtggagaggctggtgaacgtcgccgacgaagtgtgccaagaacatcaagctctcggttggatcatatggacttgatgagtcctcgagcgcgttggtgtagttgttgatcgctccgaccacacacatgtccttctcaccgtttgtgttgtggcaatcccgggcgtagttgaactggcagtcgccgggggtgtcggcgaagtggagggggctcgaccaccggtaccggaaccgctcggtgtccgcccacgagcacgtttccgcgagctcgccgccggcccacccggggaggagctccttcaccgccgtcgccgcctccttcgtcaggaaaccctcggcgatcttgcacaccatgtagtggccctccttgccccacgcgtgggccgtgggggctctcgccatggccgcggcgacgacgacgacgaggaggagggggagcacgcgcgcggccatggttgctctgcttcggacgcgtgggcggacgcgtgggatactcaaaacatccgtttctgttatgctggtggtgcccattaaaatatgtatcggggatacttcgctaacagtagtcaaggatcacttctgatgatcggacgcgtggtcgtacgcgtgggcggacgcgtggaaaaacgcaagggcgt

SEQ ID NO: 17687 - DNA, 1053 bp, Oryza sativa
  Clone ID: PAT_MRT4530_23316C.1
atgggcgccatctccaagccattgctccttgccatcctctgctgcatcgtctgcctctacagcagcagcggcggcgccattgtcgcggcggcgcgtgagctcggcggcgacgcagccatggcggcgaggcacgagaggtggatggcgcagcacggccgtgtgtacaaggacgccgcggagaaggcgcggcggctcgaggtgttcaaggccaacgtcgcgttcatcgagtcgttcaacgccggtggcaagaacaggtactggctcggcgtcaaccagttcgccgatctcaccagcgaggagttcaaggcgaccatgaccaacagcaaggggttcagtactcctaataatggtgttagggtatcaactgggttcaagtatgagaatgttagtgccgatgctttgcctgcgtccgtggactggaggaccaaaggtgccgtcactcgcatcaaggaccaaggccaatgtggttgctgctgggcgttctcggccgtggcagcgatggagggcttcgtcaagctgagcaccggcaagctcatctcgctgtcggagcaggagctggtcgactgcgacgtcgacggcaacgaccagggctgcgagggcggcgagattgacggcgcgttccagttcatcctcagcaacggcggcctcacagccgaggcaaactacccgtacacggcggaggacggccggtgcaagaccacggcggcggcggacgtcgccgcgtccatcaggggctacgaggacgtgccggccaacgacgagcccagcctcatgaaggccgtcgccggccagccggtgtcggtggccgtcgacgcgtccaagttccagttctacggcggcggcgtgatggccggcgaatgcggcaccagcctagaccacggcgtcaccgtgatcggctatggcgcggcgagcgatggcaccaagtattggctggtgaagaactcgtggggcacgacgtggggcgaggccgggtacctgaggatggagaaggacattgatgacaagaggggtatgtgtggccttgccatgcagccttcctaccctactgagtag

SEQ ID NO: 17688 - DNA, 178 bp, Oryza sativa
  Clone ID: PAT_MRT4530_23317C.1
gccgacaaaggcgcgaccggcgagatcaaggcgggaggcagacgccgaggacggcgcggctggcgaggtcaaggcggcgcacggggaggtggacgccaaggaaggtgtgaccaacgaggtcaaggcgaggtgcggggaggcggacgatgaggacggcggccagcagcatcaaagatga

SEQ ID NO: 17689 - DNA, 1215 bp, Oryza sativa
  Clone ID: PAT_MRT4530_23318C.1
gattaatgaatagtaatcctcaagttgcatttcatcaagcattcgatgcatctgatctacccgatatagattgactgtttcggctgtagcttaacttcagcctgaaagatgatcaatgatacaaaaagacagtgcaatattgataaatcaccacttgcttacaggaattacaatgttctgtagctatctaagctactttgacaaatggctaaatgaggatacatctaatcgtaaccgtgaagttaacatggtcaaacaagataatcttattgtaattcagaatgcgggctattttcttaatctttcatctgtttaatctctattggatcaactactctgaaccttgttcccgctgaagatccggttgagtattgcagcaagcctcacgccaccttgagcaatcctcttctgaacaacaggcagggcagcgaagaaatagtcatcttctaaggtggattcttgctcaacaccctcgtacgctttgcacgcgagctttgcactctcctcggcgtacttatcggcacaagtctttgtccggctacggcaagtctcccactgcttctcctcggtggaccactcatcagtgatgttcatcttgatggcctttatcatcgtgctcacgtcctcgttgtagaattccttcaaggccgtttcaatgacgttcacatcccacacgtgatgaaggttgctcttccttgtgtaccaatggacgatgatggtgttgccaccaagatctttgaccacgccgcagtggagaggctggtgaacgtcgccgacgaagtgtgccaagaacatcaagctctcggttggatcatatggacttgatgagtcctcgagcgcgttggtgtagttgttgatcgctccgaccacacacatgtccttctcaccgtttgtgttgtggcaatccccatagccatacccatacatgatggttctaagcgttttatcaatcattgcatgaacagataattcaggcaaacggttaccacggaaccgctcggtgtccgcccacgagcacgtttccgcgagctcgccgccggcccacccggggaggagctccttcaccgccgtcgccgcctccttcgtcaggaaaccctcggcgatcttgcacaccatgtagtggccctccttgccccacgcgtggtccgtgggggctctcgccatggccgcggcgacgacgacgacgaggaggagggggagcacgcgcgcggccat

SEQ ID NO: 17690 - DNA, 423 bp, Oryza sativa
  Clone ID: PAT_MRT4530_23319C.1
gtaaacctaatactagtggaatattatttcttatccaagaaggactagtatctacctatgggtacaaatatgtacactcggggtcattgtaaactatatctcgatcaatacaactactatcggctcatcgccaccctctttaccgaggtttttacttatcactggcggaacttgacacttgacgtggggctatatcggctttcgatctttggcgaaggggtaagtcctacgttccgccggccctggcaattgtatcggttacattggtgttgttgaaggctgcatcgcttcgacctcttcgatcgctctagttcggttgatatatttgcctatctagtttcaatatatcgatttagtcatatcggctgattctcgctttagggtttatgtcggtatcggctaaatcactttactagattagat

SEQ ID NO: 17691 - DNA, 441 bp, Oryza sativa
  Clone ID: PAT_MRT4530_2331C.1
cagacgcgcattctcgtcgcacccaaacatactagagaaggaaagaagcgcagctcaataagccgagcggcggagagacccaaccattctcgctgtatacacactctactgcaggtgaccctgccgcacggctaaccctcactaacataaagggtcacaacaacgaagatgtacgccatgcacaggggaagcctcctgactgaagccaacggccacgggagttgaaggtaacgacgatattgctataactcacgctaatgactggactacaatttcttttgctaatgacgaggatgatgtgatcaactttgaaactactatctaacctgcttacacatactacggaggtgccgaatttatctatactttccacagccacctctgcctatgctaatgaagcacccaaagcgcactaccacactaacgtctatcataccacta

SEQ ID NO: 17692 - DNA, 287 bp, Oryza sativa
  unsure (1)..(287): unsure at all n locations
  Clone ID: PAT_MRT4530_23320C.1
ctgatcctctcctctcacctcgcaatcacatgctcttcccttctcttctccatcgcatctaccaccgagcgtgcaaggagggggggggggggggggnnnnnttnaannanggncactnnanctacggcagcggaaaggactgctcagtgtacgagatgccgtgggcgactgcatggttgctactggggagcggatggtgctacccttagttttacggagtggacgagtgggatgaccagatgcaagtcgactccttggattagagtgaagagagattcaaggataac

SEQ ID NO: 17693 - DNA, 1089 bp, Oryza sativa
  Clone ID: PAT_MRT4530_23321C.1
cttggcttacttatctagatcaatcacaatggctaagcttgtggctcttaccttcgttgtcttggtgagcattggactagccaatgctggaagggtggctagatatgctagtgcaggcggtggcggcggtggagggggaggtggcggtgggtcaaacggtggatctggatggggatccggttctggctctgggtatggccaggcaagtggcggtggagcatatgctagtggaggcggaggaggaggaggtggtggagcgtggacagaatggcggatccggcatacggtatccgcgttcatgggtctcggttagtggacaagctggtgggtatggaccatatggtggaggatatgctcaaggagggggtggcggacaaggtggcggtggtggacaaaatggtggatccggatctgggtatggctctggctctgggtatggtcaagctggagggtatgggccgtacggtggtggatatgctcaggccggtggccaaggtggcggtggcggtggtggacagagcggtcctggtggcagcggggagaggcggccaaaggcgagacggcgagccgacgccggccttggtgatgacgacgacgacgacaagtggcggcggcgcgttcttatcctctcctccacgtatccaccacagggagaggcgacgaaaggcgagacggcgccggccctggtgacgacgacaacgaggaatggcggcggtgagtccgggcggtggagctcgagctgcggtcagcggatccggcgccgccaccgccacctccctcatcccgcgccggcgccgcctcagtcgccgccgcccctcagccggcgtggatcttctccctccacgcccctcagccgccgccaccgccgctccctccctccgccccctcagcgccacagccgccgcctccctcatcccgtgccggcgccacctcagccgccgccgctccctccctccctccctccctccgcgcccctcagctgccgcgccggtgccacctcaaccgccaccgctccctccctccgcgcccctcagccgtcgccgccgccgctccctccctccaccccctcagtcaccgccgccgccccct

SEQ ID NO: 17694 - DNA, 549 bp, Oryza sativa
  Clone ID: PAT_MRT4530_23322C.1
ctacggattgaccacagggagaggtggccaaaggcgagacggcgagccgacgccggccttggtgatgacgtcgacgacgacgagtggcgacagcgtgttcttgtcctctcctccacgtatccaccacagggagaggcgacaaaaggcgagacggcgccggccctggtgacgacgatgacgaggagtggcggcggtgagtccgggcggtggagctcgagctgcggtcagcggatctggcgccgccaccgccgcctcctccctccttccgcgcgcctgcgccggaggttccaccaccgcctccctcatcccgcgccggtgccgcctcagccgccgccgcccctcagccggcatggatcttctccctccacgcccctcagccgccaccgccgctccctccctccgccccctcagcgccgcagccgccgcctccctcatcccatgccggcgccgcctcagccgccgccgctccctccctccctctctccctccgcgcccctcaggtacgctttcccgagcaagcatgatgaacaaaacattattagaagccat

SEQ ID NO: 17695 - DNA, 1108 bp, Oryza sativa
  Clone ID: PAT_MRT4530_23323C.1
ctagaacaccgaggtcgacatggcggtgaccctgggagcacgctcctgggcatccatgtgcacagaggcgttccgtcggctgttgctgcttcgatgttccagttgcagcctcttctccgttgttgctgtagtcatcgctgcctgctgttgctgcttcgatgctgccaccacctcctctccctcaccgccgttgtcatcgcctgctactgcttctggaaagttaggggtgagggagggtttctctacagccaccgatgcctcctccgccctcccatggccgcaaacaaccttatcgccgtcggatatccacgtcgggtcatcggccactccgcccttggggcagtgtgtccttgctccggccggcatcgtcggctttagcttgagcatctgctctgccgtcgggccaaccccgctaccggtgcctctttctctgatggccaacaccgctctcttgctacctcccatgccccgagccctcgacaccaaccccgtcggatgtgaagccgacggcccagatggaggccagcggtgccaatgcgtaggccacgcgtgcctctgcgcaaatcttatctcccgggaggctccgctccacttcccttcccgagtcactcaaaccatccaatccctccaccttcccttcccttgcccccattcccatcgctgctgccacggcatggccgttgccgacctcgggcccgacagcgctgccgcttcttgccctactgccgcggttcttcaagaggttgttgtcctgatttgcctcgaacctaaaaaaagtgtatacatgcaagggatcatcaatcctacatataaatacatgcaaataatacacgccctgcttggcagccattgttgcggctgtacctaagctactagctgtggccgcggtgtgcatccacagccacagcaatggctgctcagcaggcccatggtatgcttgcggctcgaggcgcgggaggcggtggatcaggtagtgggtggcgcggcggtggctccgggcacgggctgcagatccagctgccgccggcggctcgacgcatggccagcatttttggcagcagctcccggcggtgttggcaatttcatcatcgccgagcgtcgccgccat

SEQ ID NO: 17696 - DNA, 323 bp, Oryza sativa
  Clone ID: PAT_MRT4530_23324C.1
attacaaaaaattcccgtgttaataaataacttaagaaagatagggtttcatatataaaaaaaaattattccattggtaccaagcaatcctgctaatacacacagttttttaattaatttgaaacaaacgggtttaatttagtaatatttgggagaaacaaaaacctgagttttttgggggtgtttttttgggaaacaaaaaagggggggaacttcccgggggaaagtgtttggtattttaagaatttaatttgccaaattttaaagagggacaaaaaaaacttgttcctaaatttaaaacgcatttttttttgtggggggga

SEQ ID NO: 17697 - DNA, 1389 bp, Oryza sativa
  Clone ID: PAT_MRT4530_23325C.1
agaaaggtggagtactcgagtatctcctccccaggccccaaccccaacacccccaacccgcccgaaagaaaatctcccgtatcgtctcctccgctccttgcgccatctcgcggcagatcaggggaggaggcgccgatctccatctggcgagcagagcggggagggggcgccgtcgtcctgctgcatcctgatgttactcgcgcttcaaaactctgaggtttgttaaatctgttggctaatcatggaagaacagcaagtaaagccctctgattcacatccaccacctgctactccggtggacagccaggattcaactgcacctcctgtcagaactcctgaccctgtttctcaggctacttcaaatgattctgccacccagtttgccagtacagtccatgtagccccttcacctgcacctgttccaaatgctgttccaatacaagatgctgcaggacgcgaggcacaatcctccatattttcaacatctggcttatcctcctgggcaaaaaacctgaaaataccacagccttcttcaggtcaagaatcaccaacggggaagaacacattttctcgcctcacgagtggccttgggttgcgcttgtctccaaaaggtcctcagcaagatgagagtgctgaaggcagcacaaccccaacaacagcacaatctggcgtttttggctcttttactaaaggcatcgtggattcctctaagaatgctgttaaggcagtgcaagtcaaggctcgccacatggtctcacagaataaaagacgatatcaggaaggcggctttgatttagatatgacatatattacagagaacatcattgctatgggtttccctgctggagatttgagcggcttctaccgcaaccacatggaggaagtcatcaggttctttgaaatgcaccacaagggaaagtataaggtgtacaacctttgctcggaaaggctatatgatgcatctctttttgagggaaaggttgcatgcttcccttttgatgatcacaattgccctccgatacaacttgtcatatcgttctgccatagtgcttactcttggttgaaggaagatatagaaaatgtagtggttgttcattgcaaagctggaaaggcgaggacaggattgatgatctccagtctgctactatacctgaagttctttccaactgcggaagagtccattgaatactacaatcagaaaagatgtgtagatggaaaagggcttattctcccaagtcagattcgttacgtaggaaaggaaattcagaaattgctgctgatatccaccgtgggggagcctccacgcaggtgcatgctcaggggatttcgccttcatagatgcccttattggattagaccatcaatcactgtgtctaatcacaatggtgt

SEQ ID NO: 17698 - DNA, 1349 bp, Oryza sativa
  unsure (1)..(1349): unsure at all n locations
  Clone ID: PAT_MRT4530_23326C.1
acctgaagttctttccaactgcggaagagtccattgaatactacaantcagaaaagatgtgtagatggaaaagggcttattctcccaagtcagattagatatgtgaaatattttgagcgcatcttaacttacttcaatggtgaaaatcagcctccacgcaggtgcatgctcaggggatttcgccttcatagatgcccttattggattagaccatcaatcactgtgtctaatcacaatggtgttcttttcacaactaagaagcaccctagaacaaaggagctgatgccagaagatttctggtttagtgcaccaaagaaagggatcatggtttttgcgttgcctggagagcctggattaacagaggtagctggtgacttcaagattcagtttcatgatcgacagggggatttctactgctggttaaatacaacaatgatggagaacagggtgactttgaatccaactgatcttgatgattttgacaagaggaaattaccatcacctggattccaggttgaggttgtcctggtagactatgatggttcacaaccaccaaaaccaaaaccagctgccgcatctactgatcagaagtctgaagctgattcctcgactggaactgttgcaaaaggaaataatgcttcatctgcagaagtgtccaacaaggaatctgcaaggaatgataaggatgacgtcttctctgacagtgaagcagaagatggatcatccaagggcagaagggagaaggtctctaggaacgttgagggtactactaatgctgcaaaagcgtctgaaacaagctctgtgcaaaaggaggcgtctgctgctgcttccagaattgaaaaagtatcaataaccagcgaacaaggaagtgcaaggacacctgatgctgcacctctcaaaagtggagttagcagcaagagcagctccaccacagcaccaccaccacccccagcggctgctgactccagcatgagcgagttcaaggcaattgctgcagacgcttcggtcttctcgttcggagatgaagacgactatgaaagcgaataattcacacccttttgtgggcgcctggttcgccattgtatagtttggtgctttccagatcatgataggataccacctggaagcaacaggtagaaaagatgaaaagaattgctttgttctaccgttttatgtttcattgtagccctttttcaagctgtaatgttgtacaatggtgaactttgtaactccaaaaatgtcagaactttgttgatacttcgcttatttgtttacagagattctatacatggattcttacgaaacggataaaatattgcgaaagggtacttgagctgtgtttagattct

SEQ ID NO: 17699 - DNA, 1194 bp, Oryza sativa
  Clone ID: PAT_MRT4530_23327C.1
atgtccccctccgccacctcgccgccgaatcgcccacaccgcaagcgccgcgccggtgccggtggcggtggcgctgacgacggctcgacccgccgccgcggccgcagcgctgtcctcctcggccccacccacttccccgccgttcgctccttcggcctccgcctcgccctcgtcgtcgccccagccccacgtcaccgccgcaagcagcgcccgctccactacgcctgccgccccacctcccttccctgtcgccgccgccgtcgcctccgcagtatcatctccctcctccacctccccatcctccgcccgttctacctccgctacatcctcgcggcagccgcatcaggcccctgccgctgccgccggaaggaatccctggtaggcatgggaaactacatctcgcgggtgctccggaagagctctagtgaccgtggtaaggcgccgccagccgacgatacagccaagcaggatctatgtgaagtttttacacctctgacaaatgaagaagaaagtgaagtaaacaacattttgtatggcagtgatcaaagtaagaaaataatagtgatgcatggaccttccaatattgatattactaaagagaaaatctggtgcttgagaacttgtaattggttaaatgatgaggtcattaatttgtaccttgaattgttaaaggagagggcgcaaagagaaccaaaaagatttttgaaatgccacttcttcaatacattcttttataagaagcttgcttgtggaaaaactggttatgactatcaatctgtaagaagatggacaaccctcaatagattgggctatgggcttgttgagtgtgagaaaatctttattccaatacatagaaatgtgcattggtgccttgcgataataaacatgaaggataaaacttttcaataccttgattcttttggcggcatggaccatgctgtgctgagaatactggctagatatatcagggatgaattgaatgacaagagtaacatacaggtagacaccagttcatggctgaaaatatcatcagattcttgtcctttgcagcagaatgggtgggattgtggtatgtttatgcttaagttcattgatttccacagtagaggtattggcctatgctttactcaggaacatatggattactttaggaaacgaacagcgaaggagatactgagattgagagctgactga

SEQ ID NO: 17700 - DNA, 377 bp, Oryza sativa
  Clone ID: PAT_MRT4530_23328C.1
ggaaaaaaatgggtttttggggcggggttcaaaacaaaaacaaaaaggccgggggcaactggcaaaactatccgggggaactaaaaggccatttttttttttttgggccccaaaaaaagggacccccggggaaaggggtaaactttttcactcaccacccttttcctgggcatcatcatcagccccaggagagggggggagagcattcaatttttcaacaaaacgggccttcctttgttcgaaggttaccttctggggggggaatctctggggggccgccggtcccttcttggttgattgggcccggggaggaccagcccggagggcaacagggccctttttgaacagggcttccatgccataagcataaatttcct

SEQ ID NO: 17701 - DNA, 279 bp, Oryza sativa
  Clone ID: PAT_MRT4530_23329C.1
ggtagacggttatgataccccgatacgagcccagccccaccgtgatgttcactaactcattccaagggtcacactcaatgtcttacatgcaaaagagcgaacccggcacgccgggacacacctcagaccgaacaagtacagggcctccctcatgaccgagcgtacatgaaactgacatgagatgtgggcctaacagccagacgaatcgcgagggaacatgacacagtgatcgtgacggaggcgaagagacttgaccacagataccatctggagggaggg

SEQ ID NO: 17702 - DNA, 993 bp, Oryza sativa
  Clone ID: PAT_MRT4530_2332C.1
gctgatgccggtggtgatggcgtctttctttccaatagctaaggggtacgaaaaagcttaactattatcgctctaggttctattggctgagtaatggtcaaaaacaaaagtattgcctcgccagatgggacattctttgccgctcaaaagaccatggggtttaggaattcatgatctggaacttaaaaatatagctttgtttagtaagtggctatataggttgcttactatggatggagtttggcaacagctaatacataataagtatttgggttcacaacctctttctcaagttcagtggaaaactaggaacttatgttttttgctagcctaataaaggtgaaaaaagactttttttttccgtttcgaatcctttacaattaaagatggctctcaaattagattctggaaagacaaatggtttggagatgcaactcttcaagaacagtacccgagccttacaatatttttagacataaataaagtactattctagaggtctttcaatctggcgctcgaatctttttatggtgaagggattcaattggttcagaattagtagcttggaataacttattacctcggattgctaattttgaactaagccaggcgcaacatgagttcctatggaatttaacccatagtgggaagtttacagtaaaaactcactacttggcagtggtccatagtgatgtccagaatataaattgacacctctagaaattgaaggtgccactcaaagtcaagatttttgtttggtaccttcatcgtggagttatgctaaccaaggacaatctacctaaacgtaactggcaaagcaatcaaaaatgttattttgtcataacatggagacaattaaacacacatgctttgaatgtcattttgctaacttagtttggtcgatcacttatgttgcgtcaagaattactgcaccacaaatgttgtgccaccgtggatgggaggttgagtcggcgtgccaacgtgcattcagcg

SEQ ID NO: 17703 - DNA, 223 bp, Oryza sativa
  Clone ID: PAT_MRT4530_23330C.1
accaaaggtcatttccatatctttaaaaagtgataaaaacattatagagatgtgcgacatatatatatatagccaacatccatcgaacagaaaattactagattggcaaataacaaacgtagaaaaggacaggttcaggtaaagcttcatctactataattataaaaatacggaaggggcaaaatcaccccctcccatcatacccaaacccgcattttctgaa

SEQ ID NO: 17704 - DNA, 264 bp, Oryza sativa
  unsure (1)..(264): unsure at all n locations
  Clone ID: PAT_MRT4530_23331C.1
tgagacaaatcatatgatgcttattcatcacactggtgacaaatgcccatgtaaattggttcttgatatacatgtgaaataaaatgtaaacttgtaaaccacaatgctaacacactgtgtccccattgctaaatgcagaacaactttgaaaatggcatgtgacaaatgtattgtataatcacacaaagcagagataccaaaactattatattcctgtgtgatccctgtgatattgttgcatntcattcaaccaccatgtcttca

SEQ ID NO: 17705 - DNA, 174 bp, Oryza sativa
  Clone ID: PAT_MRT4530_23332C.1
atgatgcctttcccctttgttaccctcgccctcgcccatggtcaccacccacctaactccatctcccgcgccacatccttggcaggatctggccggaggcaggagaggtggcactacagatgggggagaggcattggagagtttgggcagaaagccaagatgaaccagcagtga

SEQ ID NO: 17706 - DNA, 3072 bp, Oryza sativa
  Clone ID: PAT_MRT4530_23333C.1
atgctgcgcgccgcggccgccaccaccgccgggttcctcccgccgcgtctggccgccgagacggcgcccgcggcaagggttgtggcggcggcgggtgccgaggtgaggtcgtcgccgctcctcagggctctaggggtgccgagaggcggcgccggcattgggagcgccacgccggggaggaggatgtacttcgcctccggctccgactcctccggaagcgccgccgacagcgactcggaggcgtcgtccgccgctggcgctggggaggaggagagcgagggcaacaggtcgtcctccgctgtcgctcccgccattatccgacccgaggactgccacacggtcatagctttgcctttgccacatcagccactatttccaggattttttatggcaatgtctgtaaaggatccgaagttgttgaaagctttagttgaaaaccacaaaagatctttcccatatgctggggcctttcttgtcaagaatgaggaagatactgacagtaacactgtcacacgttcagatccaaagaaaagcattcatggtctgaaagggaaagaattattgaagcatcttcatgaaattggcactcttgctaagataacaagcattcaaggagatcaggtgttgctacttggtcactgccgtttacggataactgaaatggttgaggaggacccacttacagttaaagttgaccatctaaagcatatggttgatttcaactaccaaagactagcagattttggcgctgctatttcagtcaccaacaagttgctatgccagggagttcttgaggaactagatgtgtctaagcgtttgatgttgacccttgaattagtaaagagggaattggagattactaagttgcagcaatccatagcaaaagcaattgaagaaaaagtaactggcgagcagcgccgctacttattgaatgagcaacttaaagcaatcaagaagtacctagggtttcccatactgttggttactgtggcaaccgggcttaccgctgtcggtaacggtaagggccggttaattaggcattatttattcttcctggttacccttatgcactgtggtatgcaggagctaggcttggagactgatgataaaacagcgttgtcagaaaaatttaggaaaaggattgaatcgagaaaagagaaatgcccatctcatatcttacaagtcattgaagaagagctcactaaacttcaattactggaagctagttctagcgagttcagtgttaccagcaattatttagactggctaacagtattgccatggggggattacagtgatgaaaactttgatgttcttcgtgctcaacgcattcttgatgaagatcactatggtctaactgatgtaaaagaaagaatattggagtttatagcagttggaaaattaagaggaagctcacaaggtaaaattatatgtctctgtggaccacctggcgttggtaaaactagtattggacgatcagttgcacgtgcattaaaccggaagttctacagattttctgttgggggtttgtctgatatagcagaaatcaagggtcatcgacggacctatgttggggcaatgccagggaagatggttcagtgtctgaaatcagtcggaacttcaaatcctctggttttgatagatgagatcgacaagctagggagagggtattctggtgatccagccagtgcactgttggaacttcttgatcctgaacagaatgctaactttcttgatcattatcttgatgttcctattgacctctccaaggttctgtttgtttgcactgcaaatgtcatagagatgataccaggccctctactggacaggatggagatcattactattgccggttatataaccgatgagaagatgcatattgcacgggattacctagaaaagaacacaagggaggcttgtggcatcatgcctgaacaggttgaggttacggatagtgctcttcttgctcttattgaaaactattgccgggaagccggtgtgcgtaaccttcaaaaacagattgaaaaagtttaccggaagatagctctgcaacttgttcgtcaaggggtatcaaatgagccagctcgggagatcacattggtggaaccaagtgaacaacctactggtgttagcattgcaacagaagtggaaaacaagagccagagggacagtcttgcagaagatgtttcagtgcatgttattccaactgatttttcttgtgagaagattaatgtagtatccttaacaaccaagtcagaagtagaccactatgagcatccaaaaggagtatctaaagaaacttctgcagatgacaaagctacaccaacgaatacatcaggcaaaatggaggccaatgaacacacagaggaagtaatggaagcacttgtagatgaagcacttgtagacaagactgtggagaaagtagttgttgatgcatcaaatctggataactttgttgggaaggctgtattccaaccagagcgtatatacgatcaaactcctgttggggtagtcatgggtttagcttggaatgctatgggtggttctaccttgtatattgagacagcaaaagttgaggacggcgaaaaaaagggtgcacttgtggtgacaggccagcttggagatgtcatgaaagagagtgctcaaattgcacatacaatttgcagatctatattacatgagaaagaaccaaataacaccttttttacaaagtcaaagcttcacttacatgttcctgcaggggctactccaaaggatggccccagtgctggatgcacgatggttacatcgatgctgtctttagccatgggaaagctggtaaagaaagacctcgcaatgactggggaagtaacattgactggacgaattctcccaattggtggggtgaaggagaaaaccatcgctgccaggagaagtgggataaagacgatcatattcccagcagcgaacagaagagatttcgacgagcttgctcctaatgtaaaagaaggtcttgaagtccactttgttgacaaatacagtgaaatatatgatttagcttttccaagtgatagtcaggcattagcaagctag

SEQ ID NO: 17707 - DNA, 858 bp, Oryza sativa
  Clone ID: PAT_MRT4530_23334C.1
atgaacgccttcctcgagctcgagcccttctccactcctctctttgagatccccgatgatgctgattttgagtacacatccatgctcgccgctgacgacttcctcctcatggacggtgactttcttgctgaccagccgccggtgtcggtggaggtggtggcaggcggaggagatgccagtgggaagcggagtttccatgccgacgacggcgaggccatgggtgtcgtgtcccggtcatctaagaggaggaagaaggcgccaaggaattcgagctcactgtccaactgcgatggcagcggcggcgaggggagtgagccgacggcggaaaggccaggtggccggcgggtgtgggtgcgggagcggagcacggaatggtgggaccgcatgagggacccggtggcgtgcccggaggcggacttccggcgagccttccgcatgccgcgcgcggtgttcgacaagctctgcgacgacctggctgccgctgtcaccaaggaggacaccacgctgcgcaccgccatccctgtgccccagcgcgtcaccgtctgcatctggcgcctcgccaccggcgacccactccgcgaggtgtcccgccgcttcggcctcggcatctctacctgccacaacatcatcgtccaggtctgcgccgccatcaccaccgtcctcctcaccagggttgtccggtggccggactcccacgccgcctccgcgtccatgttcgaggccttgtccgggatccccggagtcgtcggcaccgtgtacaccaagcacttcccactggtggagaaaccgtttgtagtcccggttggtaacccccctttagtcccggttgtccaaccgagactacgaatccgggactaa

SEQ ID NO: 17708 - DNA, 309 bp, Oryza sativa
  Clone ID: PAT_MRT4530_23335C.1
atggcacaacaacgttggtggcgcataatagcggagagctctaagaagaaggggtggggcgaggggaggccgctggtggtgcatcgtcatagcggcagtcgtcagtatggagaggcggagagtgagaggatgatattcagcgttacagccaagaagttaatcagctatgattcttccacctccgacggaaagatgtggaaacactacgatgctttcgctcagggccttataacacttccactatgcattcctggcactgcgttctacaaatgtatgcaggtctacgcttatctggttgaggcaccttga

SEQ ID NO: 17709 - DNA, 1407 bp, Oryza sativa
  Clone ID: PAT_MRT4530_23336C.1
atgagctcgtccttcctcgggccattcaccgattttgactactcatccgtgctcgccgccggcgacttttttgccggtcaccatcctgaccagccgccgtcgccggcggaggtggtggtggccgtaggcggaggtgatgccagtgggaagcggagtttccaggccgacgacgacgatgccatgggcgtcgtgtcccgcttgtccaagaggacgaggaaggcgccgtcgagttcgagctcgccgtctcacagcgatggcggcggcggcggcggcggcgaggggaacgagccggcggcggagaggggaggtggccggcgggtgtgggtgcgggagcggagcacggagtggtgggaccgcatgagggacccggcggcgtgcccggaggcggaattccggcgagccttccgcatgccgcgcgcggtgttcgacaagctctgcgacgacctggccgccgccgtcgccaaggaggacaccacgctccgcgccgccatccccgtgccccagcgcgtcgccgtctgcctctggcgcctcgccaccggcgacccgctccgcgaggtgtcccgccgcttcggcctcggcatctccacctgccacagcatcatcctccaggtctgcgccgccatcaccgccgtcctcaccagggtcgtccggtggccggactcccacgccgcggccgcgtccaggttccaggccttgtccgggatccccggcgtcgtcggcgccgtgcacaccgagcacatccccatcgtcgcgcccagggagaacgccggcgagtactacgaccgccgcctcaccgaccggaacaacaaggccacctactccgtcgccatgcaggccgtcgtggacgccgacggcgccttcaccgacgtctgcatcggccaccccggctcgctctccgacgccgccgtcctcacgaagtcggcgctgtacgcccggtgcgaggccgggctgctgctcggcgacgacccgcagtggctcgtcggcggcgcgagctacccgctgacgagctggatgctggtgccgtacgcgcagccgaacctgacgtgggcgcaggagaggctcaacgcgcgggtggccgacgcgcgcgcggcggcggtgggcgcgttccggcggctcagggcgcggtggcggtgcctgcggcggcgcgccgaggtgaagctgccggagctccccaacatgctgggcgcctgctgcgtgctgcacaacctctgcgagcgcagcggcggggagctcgacgccgacctcctacacgacgagctcgtcgacgacggagtggtcgccggcggcggcaatacagtgcgctccgccgccgccgaacaggttagagacaggatcgctcacggtctcctccatgccggcaacactgcttcgagtagctaccaagattaccattacgggcggttatag

SEQ ID NO: 17710 - DNA, 1208 bp, Oryza sativa
  Clone ID: PAT_MRT4530_23337C.1
ctctctctctcctcttttctctctcgctcgcggcggagaggaggagcagtctcccatctgcggcggccggcggcgtgcgtgcgtgcgggtggctggtgttgtggattccgtttccgatggacgacgcggtggagacggccgccgagattctggtcagcttccagaacaggaggctggtgcggtggccggagtgggttccgcggccggatgagaagggcgccgccgctgaggagaagaagttgccgggatggaaggaccggcggaagcggacttccaagtccaaaccgccgccggccattttggtgtgtggcctggagctgagggattccggcggggagaaggcggcgtcgattccggccccgctcccgccccccgcgaggaagaagatgttgttcaagatgaaggtcaaggacgagccgacggcggcgcgggggccggagacgccgccggagtacggggccggcgcgggatccggcgcgaatttcagccgggatggcgtggcgaggcctctgccgccacgcgcggtggtgaaggccgagccgacgccggcggcgcggatgcccgagtcgccgccgtactacgtcgcggcggccggatccgccccttccacggccggcggcgaccggcgtccgcgtcctcgccccgtcgagagggcgcacgtcaagacggtcctcgcggcggcgaaggaggccatggaggcgtctagcccagagacccctctggactacgccgccaccaccggatccggcgcgtcctccagcggcgacgagtcgtcgcggaagcggaaggcggcgccgggggcgggcggatccggcggcgcctcgtcgagcggcgacgaggggtgcagctcaccggagaagcggccgtgcctggtcgccggcggcggcgctcagaccgccgcagcggctaaagcagagggggaaaagtttgcggattcgatgaaccgtaacgacgatggcgtgcttctcttcgacctcaacgaatgtgtggataattgcgaagattggtcctaatgggagtctttgctagtgttcatcatgcctagatcaatgtgggagtttttgctaacatatccgcgctccgtcgggtaaaaaataaacccaaaattgtgtacataaaaagggcaaagccagtaagtagagcagttgacaagagctggagggctttgccctttttatgtaccctcgtgccgattcctgcagcccggg

SEQ ID NO: 17711 - DNA, 837 bp, Oryza sativa
  Clone ID: PAT_MRT4530_23338C.1
atgcccgttaccctttttaaccggggatctttagtcccggtgtttgttgcaaccgagactattgtggaattagtccgaccgacgaaagatggtttctccaccagtgtccgcatcgtcgtgccgagggagcacgccggcgagtactacgaccaccgccttaccgaccggaacaacaaggccacctactccgtcgccatgcaggccgtcgtggacgacgagggcgccttcaccgacgtctgcatcggccaccccggctcgctctccgacgccgccgtcctcgcgaagtcggcgctgtacgcccggtgcgaggctgggcttctgctcggccacgacaagctcgggtggcaacagccgctgtggctcgtcggcggcgcgagctacccgctgacgagctggatgctggtgccgtacacgcagcccaaccagacgtgggcgcaggacaggctcaatgcgcacgtggccgacgcgcgcgcggcggcggtgggcgcgttccggcggctcagggcgcggtggcagtgcctgcggcgtgccgaggtgaagctgccggagctagccaacatgctggccgtctgctgcgtgctgcacaacctctgcgagcgcattggcgaggagctcgacgccaacctcctacacgacgagctcgaagtcgtagacgacggagtggtcgccggcggcggcaatacagtgcgctccgccgccgccgaagaggtgagagatcaccggatcgcgcacgtacggtcttcatcacatctagccacctccgacctcaccgccatcgatatctctgccatcgatgttgtccttgaaatggccttgaggatgggatacatcgcctag

SEQ ID NO: 17712 - DNA, 403 bp, Oryza sativa
  Clone ID: PAT_MRT4530_23339C.1
aatcatcaactgcagttcaatatagtattctgttatacacacgatcagtacaacgtaggtaacccaatgactggaagaggaaaagaaaaaaaaatcctatttgcaatttgcacatctcttgcaaacctcaaaaaggctctagaactaagtcaataacctagaaacaaatgaatcttcgctgattctgctaaaattttctaaactagtttgatatgaactaatgtctaaccattctggactttaaagaataaataaaaatataggaggggataaaaaaacccaaggcatagaagctgggtctaggcatgccaggtttcatattttgccgcatttgcttacatcgacctgtatcagtaatattgcaaacgaggaatctccgtatctcgctaattgggcaatagta

SEQ ID NO: 17713 - DNA, 411 bp, Oryza sativa
  Clone ID: PAT_MRT4530_2333C.1
gagttccataggatcgggaggacataacttgctcagatataaccatgagtaccttatgtattaataaaataaagcatcaacttcaaatgaacctagccgctgatctagaaggaatttcacggcccatgagtacttgttggaaagcttatggagtctactttcagatggttttggtcccacgtcaaaattcctaccgagctgccgggaaactgcaaaacaaaccacggattagccctctcggcgaggtcaaccggatttcggcacggttgataaccagaggagacgtggtgctgcgattgcggggctcagtagtgtattcattcagaagccggatcgagttgtgtcgcgactccgcccaaattgactgtttatcaatacctatcggaagatcaggacctaacatccctcatc

SEQ ID NO: 17714 - DNA, 724 bp, Oryza sativa
  Clone ID: PAT_MRT4530_23340C.1
gtccggattcccgggtcgacccacgcgtccggaatttgatagatgccattacaactccatggttgttttatccactggtaatttggttactcgatatagttgcttttgagaagacatgtctttacaatccatttacattcttaggcattggttacttctgatgaacatcccaaataagcttcaggttctaaccatatatttctgaatagatttgggtttggtggtaaagagtcaagacaatctgttgcaagaaagtcactttctttttcgttcatccatgttttgtcaaatgcccacacataaagttttacggattgttccatagtcataataatttagaatttactaaggtttcattgacactaaacttcactagattttctcatcaataattgatcttatgcaagtatatggtgatctacagtagcatgggtttatctatgtatggattgtgaacattccgatggtatgcagtacgaatctttgctttatgtccatagaatgtggaaaagtttgtcaaaattgttctatgcatggttgaagccacatttttttaaaaaaataattatgtgttagcattctggtagatcaaaacaggcaaaagaggtgctgtagtactatgaagtgtcaagtaaaaatcattttaagccattttaaacatatttacttgggaagtacatagtgcttactagatttctttgagcagcataactgcataagtatg

SEQ ID NO: 17715 - DNA, 443 bp, Oryza sativa
  Clone ID: PAT_MRT4530_23341C.1
gaaaaacgccaagcaacaaaaggaccccccgaagagcaaagcgggaacgccacgagggaccggcccggaaaccccgggccgacccaggcggccgaataaatcaacaatgaaaaaaaagaaaaaaaaagaaaaaggtgacctggaggggctgtcgctaccctctgtttagtcacggttggtaacaccaacagggactaaatatgtggcttttctcccgggtatttgaaccgggactaaagaccgtcatctttagtcctgaattctccctcccggttcaatacccgagaggaaataaagggggttgcaaaccgggagatgagcccttctccagttgtatagtgcatttccagcacagttttgcacgatctaaagttcatcatattgtcaccaagtaataggttttactgtttgttattgatgattatatatatatatatatatat

SEQ ID NO: 17716 - DNA, 363 bp, Oryza sativa
  unsure (1)..(363): unsure at all n locations
  Clone ID: PAT_MRT4530_23342C.1
ttgcatatggcttgagcagctcaagacgtnctccagatgctctacacccgtatgtatcgattgtcaatttggaaatgctgctttgttgacatataaatatcactttctttcattactgttattttctctgtaccataaatttagtcccatttctgcatggaaaatcagttattttcaccagagtaaaattgtcttgaattgaaggataaaccagggaatcctgttattcaattgtcaatgnccagtataccactaaaatgctactcacaataggaatcagtgggtaaggctaattggtgatatgnccataacctggacaatgcttgcccctgccccatnggcttaaattccnctttccgcagg

SEQ ID NO: 17717 - DNA, 153 bp, Oryza sativa
  Clone ID: PAT_MRT4530_23343C.1
atgaaaggcggactccgcacctaccggggcacaacgaaccctattcaccacatgtttggtggattgaatgggagcatgtggcaagttgtcgtcgtgccccgcatgaagaaggccccgctcaagacggacctgaggccctatgggccccactaa

SEQ ID NO: 17718 - DNA, 557 bp, Oryza sativa
  Clone ID: PAT_MRT4530_23344C.1
tttttgttttgcaggtggaaatgatacttcaagcggtagtttatgagaaaggtattacttttctgtaattttaaatttgtgtacattcaactagctgcttactcattttaacaaactgtgaagtctaccaggcggtagattgggtccttcctctgaaacaatttgctgttacagtaatatgcaggatacatcatgttttttatcgcaccattctgatgcgtgcattgatgcttggttttacaaagcaagaactttgaatagtctgctgccgtgttgacaatcataccaaaccgctttcttcatgccaccatcttcttcttttgtttgttcagggcactgtacaatataattccagctgcctgcctatgttgtcatcctactcaagtagtacatatctgatgtacattgaggattataatccgtttgtaacactaactcttcccatcttattctacagagcatggcaaagtgttagatgagttcttcctctctaccgctggcaagttccagacagagattggaaagaactgggctggtgaagtgaatgcgaggagaga

SEQ ID NO: 17719 - DNA, 504 bp, Oryza sativa
  Clone ID: PAT_MRT4530_23345C.1
atgaacttggatcgcaactcaacgcctcttcgtctcttgcctccgacctcaccgccccaagtcggattcggcaccaccttcctcaagtggctcgccttcttcgccgccgtgatgagggtgctcctcctctctcacagcaacggggagctcgcccacgccttgggcgtcgagctcgacctccccgacaagcctgctgggcacgacgtccggtctcgctgctacgcgttcctggtagaggacggcgtggtcaaggtgctcaacctcaaggaaggcgtcgccttcaccaccagcagcatcgaggagatgctcaaggcgctctgaagtcgcgtcaacactcctcccctgccggctgtgctcctcaagaggactagaggagagggctctcctccggccgcctccgccgccgtcttcaccccggacgtccgacacgggcgcggtggccagcttctgcgtcgcagccaccgccgctacctccacctcgtcgctggccgccgaacctcctcc

SEQ ID NO: 17720 - DNA, 2655 bp, Oryza sativa
  Clone ID: PAT_MRT4530_23346C.1
tcctaccaaatccgacgaaaacccaccgccgtcgcctcgccgccgccgccaccgccatcgcgcgctgccctgctctccctgactccattggtagcctccgcggaggagaaggggaggcggagccggtgggtggcggcgccctagccttcctcgaaacggcggcgcgaagccaccaccacctccacggcggaggcgctgcaggcggagaaggtgatggacgagccggacgctcccgccgctcctgctccagtggagggggagccaaaggggaagaaatccaagtcaaacaaaggaaataagcataagcagcaggattccctttctgctgtatccgatgccagtgctgttgtgacgcatacagatttgcctgatgaatctggaaatggttgcacgagcggggaaggtgccaccacctccacagcgccggcgctagaggcagagaaggtggacaagcgggaggctcctgctgcatctgcttcagtggaggggacgcaaaaggggaagaaatcaaaggacaagaaacgaaagaagcataagcagcagggttccccatctgctgtatccgatgccagtgctgtcgtgacggatacagatttggccaatgaatctggaaacggttgcacgcatggggaaggtgtattacgagatgctgatgttgcgagttccagaagtggcaatgatctaacaccggatgtggatcgaacgctggggaagagcaaggcgtcgaaacggcaatgcgatgccaccacgtccacagcagcagcgccggaggcagaggagatggacgagcgggaggctcctgctgcttctgcttcagtggaggggacacgaaaggggacacgaaaggggacgaaatcaaaggacaagaaacggaagaagcataagcagcaggaatctccttctgctgtatccgatgccagtgctgttgtgacggatacagatttgtctaatgaacctggaaatggttgcacgagtggggaaggcgcattacgagctgatgatgttgttgcgagtagtgggcatgatccaacaccagaaatggatcgaacgccgggaaagagcaagacattgaaacagcggcgtggcggtgccatctccacgcttgcggttccggagggggataaggaggtggatgagcaggaggctcctggcgcctctgcttcagtggagggggcggcaccaaaagggaagaaatcaaagtcaaaaaaacaaaagaagcaatccccttctgctgtatctgatgccagtgctgttgtgatggacacagatttggccaatgaatctggaggtggttgcaggggtggggaaggtgcattacaagatgctgatgttgttgcgattcccagagatgggcaagaaccaaaatgtcctgaggtaaacagtgctgaagatttggtggcaggaaagaaagggaataaggataataactcccagctctgcagctcgttgcatgagagttctatagaaagaaaaaggagaaagaatagagataggcggaggagaaagaaggaaaatgccaatagaaggagcaatgtgcagaatccttctttgctacctggtgctggtgaggttgtctcggtggcaacagctgacatgaataatactcctggctctaaatgcaagaatccttcgcaacctgttgctgacgaggttggattggtgatgacagctgatggaaatatttctctaggctctgaatgcaagaaatcaaacaaaaagatgaagagaaatcaaacaagtgttcctgaggcaccctcggtgcaaaggatggatttgggtgagactgcttcggttggagtgatggatggtgaatgtgaagttcaagctgtcttatccgattgccaaagtgcaaggagcgatagatcaaatatagctcaggcacacaaagagaattttcggcacatctactcaccaagaggatcattgataagatttcgaaggaaaaaacttcttattctagatattaatggtttgcttgcggatatcaatcaggaccaccacaatgctcacctgtcacatgcaaagagcaaatgtggattcggttgtaaatatcattatgaagaaggatatgaaacagtccctattattctgttgggtcctaatgcacacactataatttgccaggacatgtcgaaatgcactggtactgggtttaaaactcttgaaaacaaaaacaaaccattagtactgaaggagctaaagaaactgtggaataaagaggatcctgatcttccatgggagcaagaagagttttcaccttcaaatacattacttgtggatgattccccttacaaggctctgggcaatccgccacacactgccatttttcctcacccctacagctatcttaacaagaaagatgattcattggtgttgatgccaattttccatgagcaggaccaggtggagatcttcgggtgtatctggagaaccttgctactgcagatgatgttcagcgctatgtacaggagcacccattcgctgtttggccttggatggatggagcaagaacccataattgaagacaggaaggttgcagagtcacgaggtgcttgctcaaggtgcagtgtgtctgtgtgtgtggtcacagccgctgtactggcagcagcacatcctgccatcctggagaaaaagctcccacctgattcagcctaa

SEQ ID NO: 17721 - DNA, 390 bp, Oryza sativa
  Clone ID: PAT_MRT4530_23347C.1
atggcggcgtgggccgtgaagacgtcgctgtggcgcggcggtcgccacccgcgccggccgtacctccccgccgcccacgccgttcccgtctccccgtcgacgcccgcgcctccttgtcgcccgcgaccatgcggatgccgcctctctgccaccgcgctcgcctgccgacgccgcctcgccttgccgccgcccaccccttctcccgtgtctccgccaccgcgtcgcctcgcccccatgcggctatcgcttttcggcgtcggcagcttcgagaactccccctcatctcacctccagctcgtgctccccatgctcctccaccgggacctcctcctcctcccgccagaatcctccgcccatgctgacctcttcgaccccgtcctccgcggttga

SEQ ID NO: 17722 - DNA, 419 bp, Oryza sativa
  Clone ID: PAT_MRT4530_23348C.1
tgcttgcggcggagtgagctcgatcaactcgatcttgggtgttttgctgtgtccacctataccacaacgactgcgaaaatcatccatcttcgtactcggggcaacggcctgcctgcgaaaatagaagaaatgaacaaaaaaaaaaaaacgccggcccgcaccgggagccgccggcgccgctccacgccgtcggcgccgccgccggcctcctccctccctcctccggtcagatctgggagggagcgggggaggggagccgccgttgccgcccggcccgcgccgtcgtcgccgccgccggcctcctccctccctcctccggtcagatctgggagggagcgggggaggggagccgccgccgccgcccggcccgcgccatcgtcgccgccgccggcatccccactccctcctccggtcagatc

SEQ ID NO: 17723 - DNA, 159 bp, Oryza sativa
  Clone ID: PAT_MRT4530_23349C.1
tagggcattcaggtgttgtgtgtgtgaggagggagtgaccggagggacgagttcgcagggggcgctaagcgcagggataagaggcacatgcaaaactaggtcagaggggttctgccggcggtgccatactctcactgttaaacaccttacactcctctc

SEQ ID NO: 17724 - DNA, 588 bp, Oryza sativa
  Clone ID: PAT_MRT4530_2334C.1
attctatctttttcttttatattttttttattttcttttttttcttctccactttttagtttggggggggcaaaggaacacccccccctttaaaaggggggaccccacacccagtttaaagagggaccccccccgaaaagaaaaccctttgccaaaaaatctgggccggaccgggggcaaaaccccgggaaaagggaaatttagggaaaggaacccccccccccccccgggggaaggccagcgggggccccccaaaaaaaagggcccccagggaaaaaagggtttaaaaaaggggcccccacccggggggtgttataaaaccaagggggaagggggaaaaaaaaacaagggggccgccccaaagagggggaaagttcgatcttctctgggggggggggggggccccccttttggggaaaggggaaaagcccacccccctaagaggcctggggggctttgggggaaaaaacactcttaaaaaaaagtttgtcttcccccccccaaaaattttgtggagggggggaaaaaaaaggggggggtctttcctttggggggggagaaaaaaaaaaccctggccccccccggggg

SEQ ID NO: 17725 - DNA, 482 bp, Oryza sativa
  Clone ID: PAT_MRT4530_23350C.1
gactggaatagaattaattcattagatgtgatgtacatccttcatccatacgatctgtccatgggaaaagttgcacaaagtgagctatccatgtgggtttctgtagagtacaactgcatgcttcgggaatggtgcattcgatcagggcaaggatgcccaagggaaacatgaggagaacagcgtacacaatgtcaatcaagagatcaaacaaaccatggatggaatcagggtaaaacaaatacagtgcttacatgtagattatatgaatacagaattgatctaactggaaattctttccctactgcatgattttaatttcaagactctgctctccagtgaaaaggttcctcacacaacatatcagaaaatcaagactaggcacaaaacctgcgtaagaaaatggaatactctacaacattaaaccaagtttttcatgtgtagatgactgtggggggcgtggcagaattcttgaaaagtaaatt

SEQ ID NO: 17726 - DNA, 661 bp, Oryza sativa
  unsure (1)..(661): unsure at all n locations
  Clone ID: PAT_MRT4530_23351C.1
gnaattgtaatacgactcactatagggcgaattgggtaccgggccccccctcgagttttttttttttttttttgaanntgggagttcatcanttattcnncanatatncttcataacaaaaggaaaacactaattattttagtagccnnatcacatacatgcacaacgtagctacagtagcctatctagtagccaggatctcgacaaccattagcagacaccgcctccgccgttggggatntcgacgttgcaccaacgncgggaggctcgccgcngcgcgctccaagtctcctctccggcagccgcggaacanctcggacatggggtgcccnacatcaggggcgccganctcctgtagatgccatccaagaatgttggctgatcgcctcgcacctgcaacaactattnatcaacggnngcnancngccggcagcattctccccggaactgctccggcggnggcgggcgatgccaggccnaagcaattggcnttcacttcncccggaacncggaacggttctcgggttanccatccctggtnaaaaaacggccnggttttancnctggtcttgtngtggttancccctggtcccctccccnaagcngaaaaaggnaaaacactnaaaccnncttttgaacaattttttgnaaattttcaatt

SEQ ID NO: 17727 - DNA, 434 bp, Oryza sativa
  Clone ID: PAT_MRT4530_23352C.1
accagtccggcagagctgctgccagcagctcagcacgcacatcgacagcagctggtgcaaggtgcgatgcgctcaaccacatgctgaggatcatctacagggagagcaggcagccagcaggacagctgggccaacacacccatgcgccgaggtgttcacagcggctggccggagagggaacatcgagcgcagcggcggcgagcactcccggcgttctgcaacgtgggacatccaccaaatggcgtagccaggtgtctgctactggctaccagggaactggctactacctttctgtatgtagctagttattgcctgttcatgtgtgtgattgggttactaaataattgtgttccctttaatcgggaagcatgtatgatgaataaatgatgaactcagatgttcttctggtttatatctctaaaaaaaaaaaaaaa

SEQ ID NO: 17728 - DNA, 309 bp, Oryza sativa
  Clone ID: PAT_MRT4530_23353C.1
atggcggcgccgcacaacggaggaggaggacggcggcgggtttcggggcggcgaggtggtcggggcggcggctgcgggcgctgccgccgcagtgctctgatgctgttcttctacttcgtgtccaactgggtggtgcctgagttaatcatgaaggatttgcaggagcccaaaaaggctgaagaatcagaagaagctgcctcttcaccggcagcaaccatgtcggtcgccggcgacggccaacctgaagctaaaatcagactcaaggtgaagaagacaaagaagaacaagaaggctgccatgaaggtgtag

SEQ ID NO: 17729 - DNA, 273 bp, Oryza sativa
  Clone ID: PAT_MRT4530_23354C.1
atgcagaagacctgtttgttgccatggaaaccctcatcgctgagttgctgccctctcgctgctgagtactatgtctaccagaatctggagctacggggctcgctcgcctcttccaccatcgtcaaatccagcagccaatggacgtctactgtcatcatcgggtcccgatcatcccaccactcctccactactgatcacccgatggctaggaaggttggtaggaaggtgcatgaggtcagcaatgacctagatagtgggatggcactggcttag

SEQ ID NO: 17730 - DNA, 330 bp, Oryza sativa
  Clone ID: PAT_MRT4530_23355C.1
atggccggagttgtggggttgttggccatggccgtggtgagggaagcgggcgctaagctaggcactgccattggagagcaagtgatgatgatgtgtggcttcaaggaagacctggaggacatgaaggacatgctggaatccatggcggcggtgctcaaggatgcagagaggcggtcggttacggaggagtcggtgctgctgtggctgaagcggctcaagaatgcggcctacgacatctctgacatgctcgacgggttccaggacaaatcgaagtctgcaactttgctagctttagttgtatcaacttataaaggcacatatacatcttaa

SEQ ID NO: 17731 - DNA, 724 bp, Oryza sativa
  Clone ID: PAT_MRT4530_23356C.1
gagctactccagtccgctaatcccttcccgaaaatatctcgccgtcgttgcgcgcggtagctagctagctagctgcgccatcgacgacgaagtctcatccatggaggcggcggctgcgctgacgacgacgaccggcgcccagtacagctgctgcttcggtctcgcgcatggcggcgccgcacaacggaggaggaggacggcggcgggtttcggggcggcgaggtggtcggggcggcggctgcgggcgctgccgccgcaggtgagcgagttcctcagccccgagcagctggtccccggctcgccggccgacaccggcgacgtctcctccctcatcccaatcagtgctctgatgctgttcttctacttcgtgtccaactgggtggtgcctgagttaatcatgaaggatttgcaggagcccaaaaaggctgaagaatcagaagaagctgcctcttcaccggcagcaaccatgtcggtcgccggcgacggccaacctgaagctaaaatcagactcaaggtgaagaagacaaagaagaacaagaaggctgccatgaaggtgtagtgcacacaaacatgcatcaatataatgcatgctagtatgttattgcccccctcatgatgataatagatagcatcatcagtcaaagatcacactaaagtgctaattataatcaaagagaagattaattctccatcagaaggggggggcttacatatagtatgtcct

SEQ ID NO: 17732 - DNA, 1060 bp, Oryza sativa
  Clone ID: PAT_MRT4530_23357C.1
gcacgcggcgccgccccgcgccggccgtggatcgagcgggcggcggcagcgtctcctcctcctcctcctgcggcggcgtctacgagcgcgtccatggcgtccctctccctttccctccaccacccgtgcaattcaagaacaggcttccttggaaagagacaagggatttgtcttcatgttatccctgctggcagagttggttttgtcagaaaaacagtggagtgcaaggaatctagaataggaaagaagccgatagaagtgccatcaaatgttactctcacgttagaggagcagtttattaaggctaagggtccattaggagagttatcactaaactatccaggtgaagtaaaagtggtgaaagaagaatctggtaagctgagagtttccaagactgtggagaccaaaagggcaaaccagatgcatggccttttcaggaccctgactgacaacatcatcgtaggtgtgtcaaaggggtttgataagaagcttcagctagttggggttggataccgtgcagcggtggagggtaaagatcttgtgatgaacctgggattttcgcacccggttcggatggctgttccagaaggcctgaaagttaaggtggaagagaacaccaggatcattgtgagtggctacgacaagagcgagatcggtcaattcgctgcttccataaagaagtggaggccgcctgaaccgtacaaggggaagggcatccggtatgccgatgagatcgtcagaagaaaggagggcaaagctgggaagaagaaatagaaaccgagtctttgttgtactttgggtttcatacttcattcaattttttttccgatgtaatccctctcttattttgtgaagaagaatccaaaccagtaagaaagaacatgttctttggatcttccgtgccctctcggcttgccgtgatacaggactctgttttctgcagtaaaacggcagagtaacgacagtgccaagcaaccaagaatttgccctaacagagtcacaccgaaatactactgaattaaaaaaaaaaaaaaaaaaaaaaaacaaaaaaaaaaaaaaa

SEQ ID NO: 17733 - DNA, 429 bp, Oryza sativa
  Clone ID: PAT_MRT4530_23358C.1
atggaggcggcggctgcgctgacgacgacgaccggcgcccagtacagctgctgcttcggtctcgcgcatggcggcgccgcacaacggaggaggaggacggcggcgggtttcggggcggcgaggtggtcggggcggcggctgcgggcgctgccgccgcagcattttttatctccaacaattgacaaaaaccaggacttgatagtcactgtatgtgctctgatgctgttcttctacttcgtgtccaactgggtggtgcctgagttaatcatgaaggatttgcaggagcccaaaaaggctgaagaatcagaagaagctgcctcttcaccggcagcaaccatgtcggtcgccggcgacggccaacctgaagctaaaatcagactcaaggtgaagaagacaaagaagaacaagaaggctgccatgaaggtgtag

SEQ ID NO: 17734 - DNA, 285 bp, Oryza sativa
  Clone ID: PAT_MRT4530_23359C.1
atgcagagaatttggaggagaaaaggagaaaggaggagaggtgagattgagataaaggaggaggacgacgatgaggaagcagcgcggttggatagtgctaagaatagggaagagggaagagagaagttttacaaggtctcaaacagacatcttccgattgagaattggaacatcacagagggtggactaaagtcagagattaactacaaagcaatttacaatgcaacctgtggtgcccaattcacaatcacagaatatgtgttgcctgctgatcttggaacataa

SEQ ID NO: 17735 - DNA, 543 bp, Oryza sativa
  Clone ID: PAT_MRT4530_2335C.1
gtcagagccatataatggaactgtacactcgtgtgcagtgcgaatttcagcaagatatcatgatgaggacacaactagctcggatataaccatgactatcttatgtattaatcaaccaaagcatcaacttcaaacggacctagccgctgatctagaaggaatttcggggcccatgagtacttgttggaaagcttatggactctaatggttttggtcccacgtcaaaattcctaccgagatgccgggaatctctaaaacaagccacggattagccttcttggtgaggtcaaccggatttcggcacggttgataaccagaggagacgtggtgctgcgattgcggggctcaatagcgtgttcattcagaagccggatcgagttgtgtcgcgactccgcccaattcgactgtttatcaatacctattgaaaaatcgagacctaacatccctcatcaactaccacctccatcctagttgaagtgcagttgtgagttttcgtgtccaacgtttgaccgttcgtcttatttgaaaaatttatgaaaaaat

SEQ ID NO: 17736 - DNA, 291 bp, Oryza sativa
  Clone ID: PAT_MRT4530_23360C.1
aagctttttttttttgtgaaacaaaagaaggatggtttattctgtaaatgtcacaaattatgttcatcggaaaaggtatgtgcttgtattaaagctaacagagcatgtactgaatattgttcttgccataagaaatgttccaatgtgagatcttcatcaacacccaaattacctacaactacgaatacatgttgtgtttccaagtgttgcaaagtagattcccctccagactttaaatgtcaacaatgtggaaacatgtgccatagctccacctgtactatgcccaagctt

SEQ ID NO: 17737 - DNA, 375 bp, Oryza sativa
  Clone ID: PAT_MRT4530_23361C.1
aggtggtcggggcggcggctgcgggcgctacctccgcaggtgagcgagttcctcagccccgagcagctggtccccggctcgccggctgacaccggcgacgtctcctccctcatcccaatcaggcaaagtagaacctgggttgggcttgggctaaccagtgctctgatgctgttcttctacttcgtgtccaactgggtggtgcctgagttaatcatgaaggatttgcaggagcccaaaaaggctgaagaatcagaagaagctgcctcttcaccggcagcaaccatgtcggtcgccggcgacggccaacctgaagctaaaatcagactcaaggtgaagaagacaaagaagaacaagaaggctgccatgaaggtgtag

SEQ ID NO: 17738 - DNA, 365 bp, Oryza sativa
  Clone ID: PAT_MRT4530_23362C.1
gccgaatacacatgatcttgtgagctatggagggaccaactacaactgctatggcggcgcggtcttggtggacttcgacgtcaccgatggcgccaacgaccgcctaagcttcgagtctgcttacttccccgacaccgctgtggcgtacgagcgccactgcgccaggcactaccccctctcttcggatgaggaggacggctgcgcggacatcgacgaaggctgcagcttctacctccccgacaccgacgacgacgacggcgccatgttctgcgccagccgagttgtgcaccacgaccccgcggacgactaggaggcgcatctcggcagctggaccgactggttctggagctgatcgacggaagcat

SEQ ID NO: 17739 - DNA, 434 bp, Oryza sativa
  Clone ID: PAT_MRT4530_23363C.1
tgtgaaggagtccgatcttttgcctcttctgtatcattatcgtcaggagatatgttattctcagctgcttctgccggattgacaaattaatcggataacaaacacagggtgctaaatggcaaggctagtgtgatctatcctgcccgatttatgacatgggcacgacagattgcatggttcattgtcaagaggaatagtcgctggatcttcctgaaggtgtcacacagttcaataagtgtttatgtgcacatctaggttcgaagcctgggaactgggctagttgtatattcgattgtgctagaaggccttcacccttttcctccaaaagaaggctttcttctccttttgaaaacaaaaagaggctccaggttgtagtgttctaaaagctcccttctttacctacctcgtgtcttcaacctcttttttattttttt

SEQ ID NO: 17740 - DNA, 4911 bp, Oryza sativa
  Clone ID: PAT_MRT4530_23364C.1
ttaggctgaaggagtccgatcttttgcctcttctgtatcattatcgtcaggagatatgttattctcagctgcttctgccggattgtcaccatcagtcgttggttcctgttctggttccttgtcctcgttcaagttcttcatcagtctcttcgatcttttaggcctaggagctgcaatactatcttcatcctccacttcaccgccttcagcctctgcattcttgtccacactaccattatcctgcaactttggaagcttcttttgggagcttttcttctttttgcttgatgtgttatcatgttctgcagcccctgaagtttgatcatccaagtcttcaagcatcaaatctccttctttgtcaaccttgatgccctttgtacgcctcttttttagtcggtcctttgcctgcattgatatttcttttaatttgtgcgatatctgtgtgtcatcaataagtaatgaaacaacatcctcttgtctcatcagatgatcatcctggacatgttttcctttcatgaccaactcttgcactgcatttttctgctttgccctctgcaatatcttctcttctattgtatctttgcatataagtctatacaccgttacctcctttgtctgaccaagtctgtgtgttctatccattgcttgctggtcttgtgttgggttccaatcaatttcataaaaaataactgtatcagcagcagtcaaattaatacctaggcccccagctcttgtgcttagcaagaaaacaaatatatcgttccggttctggaagtcccggaccatgtcacgtcgatcagatattgccgatgacccatcaagtctgaaatacttgaattttctgaagttcatgtagtcctcaagaatgtctaacattttagtcatctgagcaaataagagcacacggtgattctcagctcggaggcgccgcagcagtatatctaaggtttggagcttcccagaatctgtaagcattttagctgggtcaaagttactcataggtggagatgacccaaatatcctatatggcagttgtagcatcggctcggggaatggcaaatcagtatgtaattcttctatcagagaatgagggctggttggttctctagggccattgaactcagaagttcgagcaaatcccagaaccagtttcttggccaatggatcatgcatctcatcagttaacttgtaggcaaaatttcggtctgcgcaccagacatttatcggtggtgctctagcaggtggaataaaagcatatgttgaacgaagaagtcttatgttagacacaagcctttcatggtgagaaagcactagtgcttcatatgggctatcactcgggcctgtctcaatctttgttcttaggaaactggactctgcttttgtaggtgaaagcaacaagcgaacaacagcacgaactgttgttaaatcattatgagtggactcaagatcagtactttctgagtcaaggaatacatccacaagttcatcggtgtacttcttgttccatcgcactgctgagaatgctagtctgttgaataatgagcaagtggccaggaaagaagcttcaactggggagagatttattaaacgtgtaaaaccgaatgcaccagataacagaacagtattatttggtgagatagcttctggaaaagctgattgatggatgtagcttggcgaaaatatattaaacatcctgttgaaagatccatatagaaatccacaaccacgcacaggcatttccatgttcgagacgattcctttgtagactaactttggaatctcaaacattattggattcctcttccctgcataatgcacatcttgcaattccccaaatgcaggagaaagaagtgagttcgggatgtcagcaaagtaaaagtaagagctcccctcattgcgctcaaacagctctggatgattgcagaccttccggagctgcatcacaatattcatcaggctaagtaatttcttatcatttagattgccacgacttccatcaagcaactcgttaagagatattttattctttatggcttgatagaagacttgctggcgagaactcaatctgcagggcacaatttcttctttctttttggtcatttctgcaatgacatcaatcttaactcgacggagcatgaagggctttaaaatagcatgcagtcgactaagctgatgttcattcagagcacctccatgttcggcatgaccctcaattccttttgagaaccactcattaaactgttcatggctgtcaaacaaagtaggcatgatgaaatgaagaagcgcccataactcagccatgttgttctgtataggtgttccagtgagaagcaagcgatttcgacagttaaaactcagtaatgtcttccatcgctggctgcttgaacttttaatagcctgggcctcatccaaaaccatgtattgccacttaacacgtctcaaaagcttctcttcattcacaagtatctcttcagcccaattattcacaacagatgcgggagccacaacaagaaagggaccccatatgtttttgtcctcagccaaatgtgctaagaatgccatagcctggacggttttgccaagacccatctcatcagcaagaataccatttaatccctgctcgtagcaattaaccaaccactgtaaaccttttaactgatattcttttagtgcacctttaaacaattctggtgtctgcacagacgacttctcaggcattgttgaggggtgtaatagatcaatcttgttaggctccatactagctaaatcatcagttggaataccagagtcagatgattgacgaagcctcccagtttcactatcaaacgcatttgtcatccttttctgttgggagacagcatgttgcgcagctctcaaggcctctctctttaattcagcttcctcaggatcttcctcatcctcttcagggacagatgcctcatctgatggtgctgattcaccagccttattctgcataaagtgactataaagctcagtttgggataggagaaagttgagcctctgttgctgtctttttgcttcacgtagctcctcttcacgcttcaaagcttcagccgcctccttttcttctcttttcctcaattcatactgctccttgtcaactcgcttccaaaatatcaacatatccctagccagcctccgtgtacgtatggcggcactcctcatcaatttcagtgacctgcttactttgaactttacctcccgttggcaattctcagaaaaacgcttagcatctacttgccgtttcttcagcaaagccatgaaattcctgtggtgcctaggaatgcctttaacagcaatagcatgccaaagtttaatagtcttttctgactcttctcttgcaatttcagaaggatcctttcttattatttgcttctttggcaaactacgctcgataatctcatatgtatctcctttttccaagactttaacgtaatgaacatgcaaactgccggattccgaaataataaatctccgtatcctcccagctgctccttctggaattgcgaagggatcctcagttacttgaagagaaaatttctgcacctttaccctttcctggagtgattcatattgtggctgaggttcagctaatccaccacgattggttgtctcaaatttttggtccgtactgagcattgccgctagagtgcgtaaatctagtgtgccattcaagaaagtttcctcgacacgtatgtcagaaaaaacaggtagattaagggatagtgccaacttatcatacccttctgggattttgtagcttacattatctcccatatctaaataggaagaatccagtgaagctacaaccttattgaaaccaccatatgcattagtagattttgtcccattatactcagctgtggcttctaccccacccaacattgcaacattccttgtatcacttctgtactttgtaactcttgcactaccatttttgtgtttctgaggaactatcacctgaggaggatcagaactaaaaacatcctccttaaactttgaccttctgtacttctgaacgtgttcactcagcattgtacggtagtgctcctcagttatttggttactgtaggcatctacctcatcatcatcgctagcaccatccagattccttttgcgcttccgatgtagcccatgggaagcatcattaattccattatactggtctgacaaggacccttgaccttggctactcatactcccatttgggctactacgcctatagcgatcaagatcttccggcaaggggaccttaaagttcagcaaaggctcgaggttgaagagggtggagtaggagagcccgccgccgttggcggcggcgcccccgcgcgacggagggctccttcagtctaactgaccaattaatcggataacaaacacagggtgctaaatggcaaggctagtgtgatctatcctgcccgatttatgacatgggcacgacagattgcatggttcattgtcaagaggaatagtcgttggatcttcctgaaggtgtcacacagttcaataagtgtttatgtgcacatctttttcggaagcctgggaactgggttagttgtatattcgattgtgttagaaggcatcagtgcagtggcatcggttgctgttaatcgtgacatgggcgaatcctctagctgttgctgcggatgttggaattgtggagacctgaccgctgatatctgtgatgctggctgtggccattatgtaaataatcatgaaaaatattgcatcacatatagaaataattttgccgtgtaaagagagtaggtgactatattaaccataagttttgtattgatagctgaaagagaacatagcaggaaagctgctgtgcttccaaattggaaacattttcgaccatttatgaacgtctatgctaatccctatgct

SEQ ID NO: 17741 - DNA, 199 bp, Oryza sativa
  Clone ID: PAT_MRT4530_23365C.1
tcacctgtatcgcgccgcggccgacgcctagcgcatggagcatcgtgacccatggccgtaggtgaaaacaagcgcatctacgatgctaagaagggttccaagaagaaaaacgtccaacactttggtaagaaagaatgatatgatatcaagacacccggatgcattgaatgtgcggaacatgcaaccatgccttgtgcat

SEQ ID NO: 17742 - DNA, 231 bp, Oryza sativa
  Clone ID: PAT_MRT4530_23366C.1
atgaggaacaatgctcacttctccaaactcgctgccctcgtgaacaatggccactgccgccaagtaagccaccagacaagggggtcgtccagcaagcaaaccacaaccttgctgaagctgccgcactgggcaagcatcgccacgaggactggacaaggggagaacattttggcgtggagtatgaagaaggggacagggagaccaaagaagtcgattgagccaagactgtaa

SEQ ID NO: 17743 - DNA, 1130 bp, Oryza sativa
  Clone ID: PAT_MRT4530_23367C.1
gtccgatgtgacatctaaaaattttcattccatcatctaaacaggcccttagcagtagtttgcaaaatactactatttactgtttgttgaatttgaaaggacgaaacaagaacaaagcttggcttactggagtagaaatgtcggatgtaccctcagacattcacaaggaacttaagtgaagaatggtgaaatacctgatatgccctcaacaaattcaggagggaggacccttgatgtggaagcaactactctttgccttccttggtctctttggtctttgctagtgagccttcttcatttattcattcgttcctcttctctctctgtcgtcgtcgcctgccgtgctcgaacccccaaggccccaactcagtccccaattaaaaagaagagaaagcacaagaggaggaggaggaggagacgagcatggcgatggggcctccgcgcctcctgcggggcctgattccgcagctcctgtcagtggacgcctggcttccctgcacctgcagcagccggctgcagctgctgctctcccacttccactgccgcctccaccttcgctggccctcctgcgccgacgccttcaagctccttctcgcccttctcctcgtctccgccgccctcgccgaggtccgctacatcgcctcctcctccatggcccccacgctccgccccgccgaccgcgccgtcgccgaaaggatcacctacttttttcggaggccatctattggtgatatagtgtttttcaaagtgcccacgaccttacagaattatggcgtaaataaggatgttgtgttcatcaagaggatattggcaactcctggagatttcattgaggttcggcaaggacagcttattataaatggtgttgcacgaaaagaacattacacagcaagccatgcatcatacactatggaagcaatgcgccttcctgaaggccacgtatttgtcatgggtgataaccgtaataacagctgcgattctcgtgcctggggaccgcttcctatcagcaatataattggaagaacatgatgtcctttacaaggtcctccatccaatacccaaggtaccaagacgaaagaagattgatgacccccaaggactgcaaactacctgatgctgtttgatattat

SEQ ID NO: 17744 - DNA, 1136 bp, Oryza sativa
  Clone ID: PAT_MRT4530_23368C.1
cgttgctgtcggcttaatttgcattgcatcacattgccggccgccatgagagctctcgctctcgcggtggtggccatggcggtggtggccgtgcgcggcgagcagtgcggcagccaggccggcggcgcgctctgccccaactgcctctgctgcagccagtacggctggtgcggctccacctccgattactgcggcgccggctgccagagccagtgctccggcggctgcggcggcggcccgaccccgccctccagcggtggcggcagcggcgtcgcctccatcatatcgccctcgctcttcgaccagatgctgctccaccgcaacgaccaggcgtgcgccgctaagggcttctacacctacgacgccttcgtcgccgccgccaacgcctacccggacttcgccaccaccggcgacgccgacacctgcaagcgcgaggtcgccgccttcctggcgcagacgtcccacgagaccaccggcggctggcccacggcgcccgacggcccctactcctggggctactgcttcaaggaggagaacaacggcaacgcccccacatactgcgagcccaagccggagtggccgtgcgccgccgccaagaagtactacggccggggacccatccagatcacctacaactacaactacggcccggcggggcaggccatcggctccgacctgctcaacaacccggacctggtggcgtcggacgccaccgtctccttcaagacggcgttctggttctggatgacgccgcagtcgcccaagccgtcgtgccacgcggtgatcaccggccagtggacgccgtccgccgacgaccagccggcggggcgcgttccgggctacggcgagatcaccaacatcatcaacggcggtgtggagtgcgggcacggcgcggacgacaaggtggccgaccggatcgggttctacaagcgctactgcgccatgctgggcgtccgctatggcgataacctggattgctacaaccagaggccctacccgccttcctagttgatatttgatccgagcagacgaataaaatacaatgcacacgagattgtgagactcgagaaaacatatactacctctgaattttaatacatatctctaaaacaaaaaaaaaaaaaaaaaaaatatac

SEQ ID NO: 17745 - DNA, 534 bp, Oryza sativa
  Clone ID: PAT_MRT4530_23369C.1
atggcgatggggcctccgcgcctcctgcggggcctgattccgcagctcctgtcagtggacgcctggcttccctgcacctgcagcagccggctgcagctgctgctctcccacttccactgccgcctccaccttcgctggccctcctgcgccgacgccttcaagctccttctcgcccttctcctcgtctccgccgccctcgccgaggtccgctacatcgcctcctcctccatggcccccacgctccgccccgccgaccgcgccgtcgccgaaaggaattatggcgtaaataaggatgttgtgttcatcaagaggatattggcaactcctggagatttcattgaggttcggcaaggacagcttattataaatggtgttgcacgaaaagaacattacacagcaagccatgcatcatacactatggaagcaatggatcctgtactaaagccatgtatgatcctgcagcgccttcctgaaggccacgtatttgtcatgggtgataaccgtaataacagctgcgattctcgtgcctggtaa

SEQ ID NO: 17746 - DNA, 595 bp, Oryza sativa
  unsure (1)..(595): unsure at all n locations
  Clone ID: PAT_MRT4530_2336C.1
accgagcggacaggggcgtgcgagcgagacatggagaacgcagctggtggaagaagggcacaacaaacgcaagtgactgaggagaggcagaagaagatgaagcacaaggcggctcaggagattgctgatggcagcagcactagtgacacagtacatggtgctgctgatggtgtctgcttcccgtgtggtacaagtacagctacagcccacctcttgcaacccaagcactcacagccacagcacgagttctggtgttcggtggtttcttcggtcttcatctgctgtgaactgagctctccaacgaaactgaagttgtcggatgcaggagtggttcaagcgaattggcctcctcctcatttcacacgattttcgaatgtgagtatagtgtttcattcttgtgagcttgggcggtggagcccatagcattcctcggctatgctccatgcatttgcatgctgtggtaccatgccttgcttcaagtgatgtgcgttgagaggatgtttgatcgatgggtgggtttagttggtaaaaaccgtatccaaaaaaacaaaccaattttgtttggtcttttttactcggnttttgttttattcgc

SEQ ID NO: 17747 - DNA, 854 bp, Oryza sativa
  Clone ID: PAT_MRT4530_23370C.1
tttattcctcctcccaactcttgcttccgttgtgcgtgctttttaatgccgacagggctacacctgaatagctcatcctcacctgatcagctgaacctgtttgagagaaagaagttagttggccatctcgccctcgctagaaaaaggaaaaaaaagaaggaaaggagaaggaggagagagcttgctttgctgctgggttgttgctaatggtgttctactacaaggcgaggccggacgccggcgactacaccatctacatgggcgccgacaagaacgagaacgaggagctcatcaagtacggcctccccgaggacgtctggttccacgtggacaaggtatcctcggcgcacgtctatttgaggctcaagaaaggcgagtcgatagatagcatctgcgacggtctgctggaggactgtgcacagcttgtaaaggctcattccattcaaggaaacaagatgaacaatgttgaggtggtctacacgccctggtccaatctcaagaagtccccatccatggatgtcggtcaagttggcttccataataccaggatggttcgcgtggtgatcgtcgagaagcgcgtcaatgagatcatcaacaggttgaacaagaccagggtagagcgccggcctgatctgaaagccgagaaggacgcgtcgaacgcggcggagaaggcggagaggaagatgcagctgaaggagaagaggcggcgggaggagatggagaggctggagaaggagaggcgggcggagatacggagctacaagggcctcatggtcgccgagaagatgacctccaaccgccagatcgcctccgccggcaactccatgcaggagatggaggacgacttcgtctga

SEQ ID NO: 17748 - DNA, 218 bp, Oryza sativa
  Clone ID: PAT_MRT4530_23371C.1
ctgtcagaatggagcatggctcaccagaagatgtgacccggcatgcttgtcatcttggggatgtcacctctagagaagctgatgtggtttatttgcatgactacgactgtgagatatcacttactggaccaaattcattcattgggagatgcatgatggtccatcaccatacttatgacctacgaaaggtgggacactcgctgatcatgaacagctta

SEQ ID NO: 17749 - DNA, 236 bp, Oryza sativa
  Clone ID: PAT_MRT4530_23372C.1
aagcgctaacttgacgatcttttggatttgcaaccgtgaaaagcatacaaatgcttgctgaaatatatgccaaactaaatatacagagagattacataggaggaacagatgaaaaactaaggaacgtgggggggaaacattgtgacccttttatgatattgacgcatattaaccacaagggaaagaacaaaagaataattgtggagaactaaagtagagtttttcatacgcacttt

SEQ ID NO: 17750 - DNA, 2445 bp, Oryza sativa
  Clone ID: PAT_MRT4530_23373C.1
atgcaccagcttccttcccccgccccctcctccgcctcctcctcgccgtcgacgacgacggcgacgaccacgtcgctcctgtcgcgcgcccgcaccgcgatccacaccgccgacgcccgcgtcaacaccgacaacaaggccgtcccccgagggccggaaaagaccgcggcgagaagggcgccgcaccagtggcgctcgccggctcggcaccccgactccctcgcccccgtcgtggcatgcacaaacgacgaaccccgagatacagccacctcctccgccttcaattcccccaatgtccagcctgactcaaattgattgcccgaatttgccagagccgtagtgtggatgtttcattagtaggcttctgagatgtactacgacaaaaattgggatacaagcaatagttgtaaatactccatacaataaataaagaaagcgaaggggggattgaccttatttattgtcaaatcacttgttctgcgtaaaaaggatgaaagatcgagttctgaatttgttggcgatgatgaaacacaatctttgatgtacacattgttcaaattagaggagcattttccccatgacaaaagtcaatgcaactcagagttgcatcactcaatatctttgcccaaggatctacacggtgcaccacctggaagtttcactcatcaaatagcagagactattggcaaaataagttctgtatacaaaatggcgttcttttggcaatccctagttctcgagttgaagaaactatggtccgatgggcaaccggtgcctcgaatgccactggatgctgctccagacttgaattgttgtttactgcatcaagagatacaagttataaattgctgcattgccaggaaaaaacggagaaaagccgccaaggaatcactggattcattgttaaaacgtgcaagtattgataactccaatcacttgtattcaaatggggactctcctgacagcgagatgtatataaaaggtagtgctggtgacaatgttcttcggcttggtgctgatcatccatcagagaacttaacgttgttggaaactggtgagctcgtatattctccaactctgcaggaaggtcccattatgacagcagagcttataaaagaaacagaagaacttgtcttaaggactggaaggccgcaaatccagggtgtgtcctggaagacttcattagatggcactctccacctgattgaagggaacttgtggaaggaattatggggggctgcaaaaccaatacctgctgttgaacaggcgcctatatatgatgaagatttagctgtggagagcatttttgatgccttggaagttattgaaccgtcaaaactttttgagcagctactagctgtcattaaagctattagctggctaattactttacaagttacatcctatttatatcaagacaaatgtaatgccttaccacatgctatctgtggataccagctttctgtatgctttgtagcagcagaattggtgctaccagcaggtagcaacttgtcgaaattattctacgactgtaaagattacatactcagcatttaccaagatgacatatcaaaagagaagctagatgagatatgcaaggtctacgagacgatggaagccatagtaactcaccctgaagaaactcttcagataatggaggcacctgatgaaaagtccccccttgagagtaaaaaccggttcaagatcaagctcaactttatcggcaaagatcgccatccactgtggaagcgtgcaccaaaggaggagaaaaaatcatcaccgaaagacgagaaaagatcgtcagaggaaaggagcacgaaaattttctcaaaccttcttgacaagaaggtttccatattctccaagaagaatgcaaaaccaacaacagaggtaccgccaccacctcccccttcatctgcccctggaccattcgatgatagcacgcttcgtaagctcctaaacagtagtaccatttttttttttgcaagccgcggcatcttggctcttgggccatgccgtggcctcgccgaagttgaaccagtgatccgttacgtcaagaagtggcctggctggtggctgtgttggtggctagggatgagatgggatggtcgtccaggcgcaggaggagggtgttggcattggcgagacacctttgtggagatcccacgtgccatggcgctcctcgaccgtctccctgtcgtgctcttcgtcatgctctccactgccggcccacacttttacttgggcatcgagctcggctcccatgggaaccccgccatggccccccctcgccacgcgacgctgcgacgatcctacgccctacgcggcggcatcgagattgtgggcgtctgcgacatacggtgctgctccaaggacttcacgttcaagccctgtcgcctcgccactgcagccatcttgctgccttcaggtcgccgctcctcatag

SEQ ID NO: 17751 - DNA, 291 bp, Oryza sativa
  Clone ID: PAT_MRT4530_23374C.1
atggcgaaaatcgcattcagcagcaacaacgagaggagagggaaagaatgggtgcagggaagtgtggggatggcggagcggggaatggagtggagaggagaggaggttcaccgggaaatcctcgtgggggaagcgcggccggagaagagaacagcggcgcggcgcgaggggaagtgcggcgtcggcggcgtggctgcattcgtcggcctcgagtccttcctggcggcggtgactacccgcgacccctctgctggcaataacaccttcggcgccctccccaccccgaactag

SEQ ID NO: 17752 - DNA, 468 bp, Oryza sativa
  Clone ID: PAT_MRT4530_23375C.1
aggtaaaatcttcatggctttttttttcattttatttcagattggttaatgaattggatggagtatttacagcttgagcttattcccgacatcttgtggcaccactctacaaattgtacaaaggaaacatccacgatttgcatctacaaaatcgtccactcactatcatcgaatggtccaggggcagatgaagggggaggtggtggcggtacctctgttgttggttttgcattcttcttggagaatatggaaaccttcttgtcaagaaggtttgagaaaattttcgtgctcctttcctctgacgatcttttctcgtctttcggagatgattttttctcctcctttggtgcacgcttccacagaggatggcgatctttgccgataaagttgagcttgatcttgaaccggtttttactctcaaggggggacttttcatcaggtgcctccattatctgaagagtttcttca

SEQ ID NO: 17753 - DNA, 597 bp, Oryza sativa
  unsure (1)..(597): unsure at all n locations
  Clone ID: PAT_MRT4530_23376C.1
agagactattggcaaaataagttctgtatacaaaatggcgttcttttggcaatccctagttctcgagttgaagaaactatggtccgatgggcaaccggtgcctcgaatgccactggatgctgctccagacttgaattgttgtttactgcatcaagagatacaagttataaattgctgcattgccaggaaaaaacggagaaaagccgccaaggaatcactggattcattgttaaaacgtgcaagtattgataactccaatcacttgtattcaaatggggactctcctgacagcgagatgtatataaaaggtagtgctggtgacaatgttcttcggcttggtgctgatcatccatcagagaacttaacgttgttggaaactggtgagctcgtatattctccaactctgcaggaaggtcccattatgacagcagagcttataaaagaaacagaagaacttgtcttaaggactggaagtgttggtgctgggtgttctcaacttctatcagatatgcaagccttcaaggccgcaaatccagngtgtgtcctggaagacttcattagatggcactctccacctgattggtctgaagattgtgc

SEQ ID NO: 17754 - DNA, 699 bp, Oryza sativa
  Clone ID: PAT_MRT4530_23377C.1
tccgggcgagaccgaaatttcagaagtttcaattgaaactatagaggattttggctaaatcttttcaatcctgctgagatctttcatgatattgttcttgactatccgttagatgcagtaacccgtccaaatgttgcccattcttgtgaatgctttgctatgttgaaggtcatataaataaatctctctttttgtacgttaataatattggcaggtatgttgaatatatgtacagatgtacaagtagatggtatggctctcggggtatctgtttcacctatggaacagggtttgggataaaaggattagttgctgctggatgaacattcagaaccagttctgcaatcagaaaggcaactgactctatgctgttggaggctggggagaaagctacttgtcccatttcaatgccaggtaaaattcattatttggtttacatactcatgcagtgaacactagttggtaattttgaccctaatcgatgcagctggccaggtttcttgctttcttcttgtcatatacttgcaagatccaatgcttttgcatcgagcagcaaaggatggtgaatttcctcagcaagtactactccctatttgggttcttgggatgggatggagcaaatcgattcataagaacagcaacttattactccctctatctacttttgatagtcatatttcatcttgacacacagaccaa

SEQ ID NO: 17755 - DNA, 3687 bp, Oryza sativa
  Clone ID: PAT_MRT4530_23378C.1
atgacgaagccgccgtcatccaaggcggaggtggagctggccaatgtgataccaatcatatttgatgatttcgaaggggaagatcgcaagtccatggaggagtacattaaggagatcacacaggaggcgctgatgagggcgtgcaccaggactcgtcaaggcgtgatcatcaagcctaagccacgtcctaagcctacttacgatgtggtaagtaatgaggaggtaacacaatttatccaacaacacattgcatctacaatagattcatctatgattactttgaataataagttaaatgcatctattcagaatcatgttgaaggatttttgaggactagattcggccctctcgtggccgattttatgttcaaagacaaagcctctaccagtgctagccaagccactatagatcagataagtagtataaccaacggggcgaaaacacaacagcacggcgaggggtgggcggcgcacacagccagtctaaccgggcctggtggccggttagatcgcgatgtcgctgtcggtcagaccggccagacggccggtcagaccgggtattaccccggcggtcagaccggaactcaggccggtctgaccgcgccactggacgtcggtcaaaccgggtcttgggccggtcagaccggcacaatcatcccaattcagggggtagatccaatgacaaataatgcttatttgtatcatcttagaacatttgattcccctgtatctactgccactacttgtccccaaattctcctacatgttcctaatgcttataatgatgtttctagggggtatcctcccgatactaggcaaggccaatataattatattgcgccgcaaccacaacctattaggccaccaaacccaccaccaaaccaacataggcctgataatatggaggaattgattagtggaatcattagggataaattcaggattgaagctaggaatcgtgctaaggtttaccaaaagccgtatcctgactattatgacaacataccatatcctcgtggttatagggttcccgaatttaccaagtttaatggtgaggatagtaggaccacatgggagcatgtagaaagattagatgttggccaacaatttcttgatgttagtcaactcgtgcaaaaggcactagctcaggaaagccgggttaaggatagcaaaaaatttgttagaccatatgagaagaagcctaatgttaattcaattgattaccatgaggctagtgatagtgaaggtgagggtgatcatgatatctgcgaagtgaagcctggccacccctgcattgtcgccgaaggtcgccgaaacactgtcgccgccgtggacagtacctcgccgccatcccgttctcgtcgccggccatcttccatcgctgtccgtcatcacgttcaatcggctataaatgaaggacgattgaagtttaccgatggttccaagatgaagcttgatcatgatccttttccggtgaacataattaattttgatgataagaaggtattgattcggccggagcaagccgaatctacaaaggggaaaggaatggtcattggagagcctaggccaaaaatgatggtgccaaagaatccggaggttggtgtttgcaaggaaaataggagtgaagcttcaacttctagagttcctaagaagactaagaaccgggccaatggagaaaagcgggaaggaaagcgcgtcaaggtgaagactaggacttcggaggtgattaccatcaaagtggggtctcatgatgtgccaataccttctggagatgaagttggggagtcctcaagcaacaaatctgaagccggtaccagctcatcgaagtcggccgatctgaccaggccctctggccggtctaaccgcagccatacgggcggtctgatcgccaatccaacaacggatgctagtggatggaggtgccgccgtgaatttgatgccgtactcgttgttcaagaagttgggcgtggagatgatgagttgaagaagaccaacatgattctcaatggcttcaatggtgaaccaacggaggcggagggtatcttttcggcagaacttaccgtggggaacaagacctaccaaccgctttcttcatcgtcgatgtgcaaggttaaagtaatcgagctacttatggagtatgtggattggttcgcatgggagtatcatgagatgccgggacttagccgtgatcttgttgagcatcggcttccaatcaaaccgagttttaggccttataaacaactacctcgtcgttttaatcctttgctatatgaccgagtcaaagaggagattgatcggttgttgaaggcggggtttattaggccatgtcgttatgcggagtgggtttctagcatagtcccggtggacaagaaggggagtggtaagattagagtttgcataaactttagagatttgaataaagcttctcccaaagatgaatatcctatgcctatagccgacatgatgatgaatgatgcctcgggtcataaggtgatttgctttttagatgataatgccggctacaatcaaatctttatggcggaggaggatatgtacaggacggcttttacgtgcccaggatttgttgggttgtttgagtgggttgtcatgacttttagattgaagaacgccggtgcaacatatcaaagggcaatgaatttaatcttccatgatttgctaggtattatcttagaaatctatattaatgatattgttgtcaaatcggatggtatggagggacatatagccgatttgaggttggcttttgagaggatgcgccggtatggtttgaagatgaacccacataaatgtgctttaggtgtgtcggtggggaggttcttaggattcatggtgcatgagagaggagttgagattgatcctaagaagattgaaaagattcgttatttcaaagcgccaacatgcaagaatgaagttcaaaagttgctaggtaagggggcaaaacaacaagaggtgtttgaagagttgaagaaatatttgtctactccacttgtggtgcgggcgcctaaagccggaaagccttttcggttatatattgcctccgaagacaaagtcattggtgccgttttgacgcaagcggaagatggcaagggatatatcattacatatttgagccaacgtcttttggatgccgaaacgagacatattgctaggcatgataattctagagcaaatgatttggcacaacaagcatctggctataatgtgaagaagggattatttctggtattagaagagccggtgcttgattttaagtctttgtgcgaaattggcaaaacttcagaccaggggcggtctgaccggcattgcacggccggtctgactggccacatgccaccggaaacagaggaagattggagaattcctttgattagatatatgaacgatcctacacgtaaggggcataggttcgtgctagttgctacggattacttcaccaagtgggccaaagccgtgccgctcaagaacatgactcatacggaggctaatggacaagtcgagtcgagtaataagacattgttgaagctagtaaagaagaagattgaggaacacccaaagaagtggcatgagcaaaatgatttatcaagtgaagattacaagacgttgatgggagacaactttgatgagatcatcgacaagcgcttgaaggctttggaagaaatatag

SEQ ID NO: 17756 - DNA, 711 bp, Oryza sativa
  unsure (1)..(711): unsure at all n locations
  Clone ID: PAT_MRT4530_23379C.1
cgtcactgccaggtaggccccaccatgcaccagcttccttcccccgccccctcctccgcctcctcctcgccgtcgacgacgacggcgacgaccacgtcgctcgtgtcgcgcgcccgcaccgcgatccactccgccgccgcccgcgtcctcaccgacatcaaggccgacctccgagatgcggacggatccggggcgctcagggcgccgtccccgcggccatcggcggatcggcaccccgactccatcgccgccgtcgtgggttcgccgcgagacgaggccccagatataatctcctccccagatggggatacctcaaatattgaacctgactcaacttcttcaacaaagatggcctttccttcagtttcagtggttaagcagctggttgctgccattgacaacggtaaaaatttcaagtcaatgaatgatatgaggtctaatggagaccaattactgaaagagaaggggggcttgagcttatctgttgtcaaatcacttgttcggcgtgaaaaggatgaaagatcgagttctgaatttgttggcgatgatgaaacacaatctttgatgtacacattgttcaaattagaggagcattttccccatgacaaaagtcaatgcaactcagagttgcatcactcaatatctttgcccaaggatctacacggtgcacacctggnaagtttcactcatcanatagcagagactattggc

SEQ ID NO: 17757 - DNA, 1910 bp, Oryza sativa
  unsure (1)..(1910): unsure at all n locations
  Clone ID: PAT_MRT4530_2337C.1
ttttttttttctattgaaccagaaattaatattttattgcataaacaaaatataaccacattttgtcccttggcaaataaccacattttgagtgtctttttctaaaagtgactacgtgcagtgtcctacagctaaaaccacaaagtcgcgatgtcctgtagcaaaatttgccgtagtagaaacattcactgccgaacacatggctaccggctgccgcgataggaaggtaaggtccgaagatgtcaggctgttactttacttgggagctagcagcccccgattttttttttatctaagcaaaacaagaaatatcttttttctaacaatatccttgcttacccaaatcgcagaagcagaactctgaaaaaaaagatactccccatgcagaactccgaaaacggacaactgtacatcacatttttcaggcagccaccgagggcgagggataacgagttctaatggcaatgtgaaccagaggggattctgaaatctgaattatgatcacgctccagcaaactggaagcacatagagctggctggccttgggaactatgtatttgcataccagcacagcaatggtaaaagcaatagcatcctaattacagcagtggtatcagaactgaggcaaagggtttcctcctccagatctcctaatgcaagggctcctccgaatctcctagccgtgataggtggaggtaagcatcggttccatatccttccatagaaatgatctgcaggtccccgccaaaatatcgagcataaagacggctaatcgggatcccatagccgtacccggccatggtcactccttcgttacggccatccagatcaggtgggttttctgctgtgctgtagagatatgtgaaaattctcgagagaccacttctgggtattccaccaccttcatcactaatcttgattgttacgtcctctgctccatcagcgactatgattctaacaggaggcgcatgcttatcagagttcatatatcgttcctgtactgcacggagggaattcttcaccaattcaaacatcatcagttgtagatgtagtttaacatatggaaatgtgaaatctgggtctccatatatgttcacatcaggggctgatccatattccctcatgcaaatagcacgtgcatcttcagtagcatgttgagccaccagcatgggggataatcttttgcttatgagtccaataacaccaggttctggatcaggctcatgcaaagcaacatgctgccctatcagcatgcggatcccaatccttgacatgtagaagcggtcgaggaactgatggatctcatcaatgccagggggaaaggcctttgtgccacccaggtctttcttcagctgccgcacacccaacgccatggtgggcaccacattgttgtgccgcactcgaatcatcttgatcatctcggtgaatgcaagctcatcatcccggttcctcacctccgggaagcaccgtaagtcgcggaatgagtccaaataccaatctctcaccttgaggatggcgggcttggtggagaggccgaaggggagggagtcgaggtcgagcgcgcggcgggcgatgcggatggggagctccctgcgcaggaactgcgccgaccgcagcaggttcctctccgtggggcgcgccccgaactccatcatgtaccgcagcgtcacccccgtctgcctcatccctccccaccgcgccacctcctccgccaccgccctcgccgccggctccgagtacgccatnatccccccacccacccccactccctccctaccgacaacagcaccaccccgcggcgcccctggaccggcggcgcatcggccggccggcgtcgtacggacgacgaagggaggagctgcggcgaaagcgagaaaacgcagccgcgaaaacgggagccgcgtgagcgc

SEQ ID NO: 17758 - DNA, 3924 bp, Oryza sativa
  Clone ID: PAT_MRT4530_23380C.1
atgacggaaccgccatcatccaaggcggaggtggagccggccattgtgataccaatcacattgaatgatttcgaaggagaagaccgcaagtccatggaggagtacatcaaggagctcacacaagaggcgttgatgagggcgtctactaggactcgtcaagatgcaacttttgaggataaatttgatgagtttttaagatttaaagtcggccctctcttggccgattttgtgggtaaaaataaagcctctaccactgctagccaagcccctatagatcaaacaaatagtagaaccgatggagtggcgcacacagccggtccgaccgggcctgatggccggccaaacggccggtccgaccgggtattaccccggcggtcagaccgggacttaggccagtctgatcgcgcctctggatgtcgatcagaccgggccctggaccgaacatttgatcctcctgtatctagtgctgcaactaatccccaagttcccccacatgttcctaatgcttataatgatgttggtagggggtatcctcccgatactaggcaagtccaatataaccatattgcgccgcaaacacaacctattaggccaccaaatccaccaccaaatcaacataggcctgataatatggaggaaataattggtgggattattagggataaattcgggattgaaactaggaatcttgctaaggtttaccaaaagccgtatcctgactattatgataatatgccgtttcctcgtaattatagagttcccaaatttaccaagtttagtggtgaagatggtaggaccacatgggagcatgaaagccgggttaaggataataaaaaaattgttagaccatatgagaaaaagcctaatgttaatgtgattgattaccctgaggctagtgatagtgaagatgagggtgatcatgatatgtatgttgctgaatggtcatggactaacaaaaacaagccttttgtttgttctaacctaatgccgactcctcgcaaagatcggcaaagtgaggttaaatatagttttgatgtggccaagtatgataagatttttgattatcttttacaagaaaaacaaattagattacctaaaggccatatcataccatctcaagaagaattgaaacgtcgagcttattgtaaatggcatgattctcattctcattccactaatgattgcaatgtgtttcgacgacaggttcaattggccatagatgaaggacgattgaagttcaccgatggctccaagatgaagcttgatcatgatccttttccggtgaatacaattaatttcaatgacaagaaggtgttgattcggccggagcaagccgaatctactaaaggaaaaggagtaatcattggtgaaccaaggccaaagataatagtgccaaagaacccagaggtttgtgtttgtaaagagaataaaagtgaagcttcaacttctaaagctcctaggaagaccaaagtgacccttgatatgcttttggagaaatatgaaaagcaaggtagtgagagagctcgcaacaaggggaaaatacagagatcacctcctagggagcgatttggtcactcgccaagacggtcgcattcacctccatatcatcattcacaagacataccatggggtccctatccaatgccgccgccgggttatccttatccttattacatgccatggggggcaacgccgccaatgttcaatcatatgcctccaatgcaattcaatcaagggtggggaggaccaaggaggccaattcatgagcgtttgtcttcaccaaacaacggccggttttatggtaagaaccgggccaatgaggaaagcgcatctggctggtctgaccggtggtctacgtccggtctgaccaggctccagcgccggtttgataggaggtttgcaaagggcgatgtgagggcttcatcgtcatcaactagacctaatagggggcattatttacctcctggaacagagccgaaacctaggaggatgcctaagtatttaacggctactcaaaggagaaggttgcaatgtcttcgggcccaagaaataagagagaaaaaggctgaagagcaaagggataaaaggttcaatgagttgcgaccaccaccggtatggaggcgtaaaaccatagagaaggaagaaccggttgttgtagagaagaaggaagaacaatcgattgctaaagatgagtcatctccaaaagaagacatggatatcaacaaggtatgtatgttgcctatggagttttgtgctatggatgaagccgaggttgctcaattttcactaggtcctaaagatgtggtttttgagaagcccgatgaatcaaaccgtcatatgaagcctctctatctcaaatgtcatactgatggaaagccggtatctaggatgcttgtggatggaggtgccgctgtgaatttgatgccatactcgttgttcaagaagttggggcgtgaagatgatgagttgaagaagactaacatgattctcaatggcttcaatggtgaaccaacggaggcgaagggtatcttttcggcggagcttaccgtggggaacaagacgttaccaaccgctttcttcatcgtcgatgtgcaagaggctaatttagagtggttacaaaagagggtgcaagaatatcggtctacaaagaacgatattggtgaaactattgaagattttgatgaagtggagaagcttggacaagggtttacatcggccgatccattggaggaagtagacatagttgatggaaccaaaccaaggccgacttttgtaaacaaaaatatgagagccgattataaggttaatataatcgagctacttacagagtatgttgattgctttgcatgggagtaccatgagatgccgggtcttagccgtgagcttgttgagcatcggcttccaattaaaccgggttttaggccttataaacaaccacctcgtcgttttaatcctttgctatatgaccgagtcaaagaggagattgatcggttgttgaaggcggggtttattgggccatgtcgttatgcggagtgggtttcttgtatagtcctggtggagaagaaggggagtgccacggccatcgtgctgttggcatggagatatatcaaaccgtcaacgcgagaacgagcggctgcatgggaggatcagtccagcaccatcatcgttctgtttccagcaccatcatcttcctgctactaccgtctcctctttgctacttacatcggaaagttgtgccgcctcttctttgctacggttgcacatacaccatcaagggcgtcagtcccgacgccgtcaggctacgactatttccgttctctgttcttcagagagcgaagcagtggttctatgccaaccttgctgctgtcaatacctgggacaaaatgctctacggcattcctctcgaaattcttcccgatgggcaaaaccaatgcccttcgtggaaggatttcaagtttccagcaaacaagggatgagtctattccggaagcatgggaacgactgcaggagtacgtagctgcatgtcctcatcttgggatggacgactggctgatcctgcaaaacttttattatggactcaccccgatgtcccacgatcacctggacgcggcagctggaggagcgttcttctctaaaacggttcaaggagccgttgatctaatagagaagatggtctccaatatgggttggagggaggaacgactccagacccgtcagcgaggcatgctacttgctgctaagctggacctcctcatgaaacgattggacgaccatgagaaacggccacaaggcaccctcaaggccttggacactcacgccacatgtgaggtctgcggcaacacgggtcattctgggaatgactgcccggaaacccgtgaggaggcgatgtacatgggcaacaacaacaacgggtatcatccataa

SEQ ID NO: 17759 - DNA, 3103 bp, Oryza sativa
  Clone ID: PAT_MRT4530_23381C.1
atggtgaggaccgggactatgttcagggaggaacagaggtctagtgcggtcgggataccatgtgagaaggtgactagagtcaggattcttggaggtcaacttccgtcaacggtggggatcgggactagactcagggaggagttgaggtccagacggtcaaggataccggatgacgaagttggatacgagatggcacagggcgacaagacggcggttcaaccggcggcgtgcaagcggttcgactggcggcgtgcgagcggccggtctgaccgccatgtgttaggcggtcagaccgccggttggaggccggtcagaccggcgatcgaggtggttggcgactctagaatcaccgcaaggcttgaggtgctgcgatcgtgcttgtcaacttgtcacaaaaagttgccaacacgatttttggcgactccgctggggaagagatccgttcatcgtcaactcgacttcgacttcgccatgacgaagccatcatccaagacggaggtggagccatctcatatgataccggtcacattagatgactttgaaggtgaggatcgcaaagccatggaggagtacatcaacgagctcacacgggaggcgttgatgagagcaactactaggactcgtcaaggcgtgatcatcaagcccgggccacgtcccaagctcgctcccgacgtggataaagcctataccactgctaatcaacatcctatagatctaatagggtctaaaaccgacggagcggcgttcatggccggtccgaccgggcctgacggccggtcagaccgcgacacagctgtcggtccgaccggccagatggccggtcagaccgggtgttatcccaccggtcagaccggctttcaggccggtccgaccgcgcaacctgacgccggtcagaccgggccctgggccgttgctcctcttagagagaaactagatggccaacaatttcttgatgttagtcaacttatgcaaagggctctggttcaagaaagctgggttaaagataaaaaatttgctagaccattcgacaaaaagcctaatgttaatgtagttgattactctgatgctagtgatagtgaggaagagggaaaggaagtggtcattggtgagccaagacctaagatgatggtgccaaagaagccggaagttggtgtttggaaggaaaataagggtgaagcttcaacttctaaggcccctaggaagaccaaggtgacttttgatatgcttttggaaaagtatgagaagcaaggtgagaagagggaaggaaagcgcgtcaagatagaagagaggacttcagaggtgattactatcaaaatagggtcccatgatgtgcctgtaccttctggagatggagttggaaagtccccaagcaaaaaatccgaagccggtaccagctcttcgcagtcggccggtctgaccaggcctccaggctggtctgaccgcagccatgcggtcggtctgaccgggccatcaggccggtctgaccgccaaccagacagcggtccgaccgaggcttcaggccggtctgaccgtgtacccgctgtcggtctgaccggcgcgtctggccggtctgaccggtggtctgcgaccggtctgaccgggctccagcgccagtttgataagagggctgcaaagggtgatgtgggggctccatcgtcttcaaataaggttaatagaggacattatttacctcctggaacagagccgaatcctaggtggatgcctaaggatttgacggctactcaaaagaaaaggttgcaacgtcttcgggcccaagaactaagggagaaaagggccgaagaacaaagagataaaatgttcaatgagttgcgaccaccaccagtatggaggcctaaatccatagagaaggcaaaaccgattgatgtagaggagaaggaagaacaatcggttgacaaagataaatcgtctccaaaggaagacatagatatcaacatggtgtgtatgttgcctatggagttttgtgctatggatgaagccgaagttgcccaattctcattaggtcctaaagacgcggtttttgagaagcccgatgagtcaaaccgtcacatgaagcctctttatctcaaaggccatgttgatgggaaaccggtctctaggatgctagtggatggaggtgccgccgtgaacttgatgccgtattcgctattcaagaagttggggcgtaaggatgatgagttgaagaagaccaacatgatcctcaatggcttcaatggtgaaccaacggaggcgaggggtatcttttcggcggagctcaccgtgggaaacaagacgctaccaaccgctttcttcatcgtcgatgtgcaagatattattgccaattttgataattttgctattagacatattgctaggtgtgataattctagagcaaatgacttggcacaacaagcatctggttataatgtaaagagggggttatttctgatattagaagagccggtgcttgattttaaatttttgtgcgaaattggcaaagttggggaccagaggcggtctggccggcgttgcacggccggtctgaccggtgaccaggggcggtctgaccggctgcatgccgccggtctgaccggcgtccccgagcagtctgaccggccctgtgtggccggtctgaccggttctaggcaggatgctggggacacgtttcaagctaatggacaagccgagtcgagtaataagacattgttaaagctagtaaaaaagaagattgaggaacacccgaagaggtggcatgaggtgctttccgaagcattgtgggcgcataggatatctaaacatggtgcccctaaagtcactccttttgagttggtttatggtcaagaagccgttttaccggtagaggtaaatcttggttctcttcgttatatcaagcaagatgatttgtcaagtgaagattacaagacgttgatgggaggcaaccttgatgaagtcatcgacaaacgcttcaaggcattaaaagagatagagaaagagaagaagagggtggccaaggcgtacaacaagagggtgaaggcaaaattgtttccagttggagacttggtttggaagacaattttgcctttgggtactcgatccaaggagttcg

SEQ ID NO: 17760 - DNA, 3018 bp, Oryza sativa
  Clone ID: PAT_MRT4530_23382C.1
atggcgaacttcggcttgacggcgacgatggagctccggtggatttcggcttcggggaaccggctgccgggcttcatcttgctcctgcgaacccaatggagtcgatggcgacggaaagcggcggctaaggcggctgctagctgcggctggaggcgccgcaaaggccgaaaccttctggttcgcgtcggcaagcggcttccggctggatttggcacgaaggaaccaaaggccagggtagagctcgactttgcggagccgagggaagtggcggcgctgaccgacgacggccggggcgacggcgcacggcggctggagcggcggccggaggttcaatcggccatagatgaaggacgattgaagttcaccgatggctccaagatgaagcttgatcatgatccttttccggtgaatacaattaatttcaatgacaagaaggtgttgatttggccggagcaagccgaatctactaaaggaaaaggagtaatcattggtgaaccaaggccaaagatgatagtaccaaagaagccggaggttggtgtttggaaagagaataaaagtgaagcttcaacttctaaagctcctaggaagactaaagtgacccttgatatgcttttggagaaatatgaaaagcagggtggtgagagagctcacaacaaggggaaaagaccaagatcacctctttgggagcgatttgttcactcgctaagacggtcgcattcacctccatatcatcatccacaagacatgtcatggggttcttattcaatgccgccgccgagttatacttatccttattatatgccatggggggcaacatcgccaatgttcaaccatatgcctccaatgcaattcaaccaagggtggggaggaccaagaaggccaattcatgagcgtttttcttcaccaaacaatggccagttttatggtaggaaccgggccaatgaagaaaggagggaaggaaagcgcattaaggtggaggcaaggacttcggaagtgattaccatcaaagtagggtctcatgatgtgccaataccttctggagatgaagttggagagtcctcaagcaaaaaatccgaagctggctggtttgaccgccgaactgacaatggtccgaccgacgcctcaggccggtctgaccgcccaccgaatgtcgccgaggttgctcaattttcactaggccctaaagatgcggtttttgagaagcccgatgaatcaaaccgtcacatgaagcatctctatctcaaaggtcatattgatggaaaactggtctctaggatgcttgtggatggaggtgccgctgtgaatttgatgccatactcattgttcaagaagttgaggcatggagatgatgagttgaagaagactaacatgattctcaatggcttcaatggtgaaccaacggaggcgaagggtatcttttcagcggagcttaccgtggggaacaagacgttaccaaccgctttcttcatcgtcgatgtgcaagaagagtcggtgcttgattttaaatctttgtgcgatattggcaaaactgaagaccaggagcggtctgaccggcattacacggccggtctgaccggtgaccaggggcggtctgaccggccacatgccgtcggtcagaccagcgaccccgagcggtctaaccggcctggtgtcacgcccagaaattcccgaatagaattccaagcagaatgtgcattaaaatccccgtccaggaccggccggggcatcctcgacggcacggacgaagcctactcctcggagaaacctccatctgacacatactcgtactctgggaggccgtcgcagggcccgccccgctccatcacgcccacccttgcctggatgcgtcagctagaggaaagctacactacaagcccagccgttgcccaggctggcttgtgggctgacgtcatcaaggggggtggcgccgacaggagggtcccactggtcagcggctcaaaggggggccggtgcaccgtggaccgggaccacgcgggcttaggaggagaacttcagggtgtgacacctggtatggccggtctgaccggttctaggcagagcgctggagggcacgtttcaatcaattttaaggccgaattaattgtgaattcggacatttgtgcccaagaaacagaagaagattggaggattcctttgattcgatatttgaaagatcccacgcttaaggttgatcggaaaattcgacggcaagcattcaagtacacattgcttgatgaagatttatatcgccgaaatatagatggtgtcttgttgaagtgcttagatgaagatcaatctaaagtggctatgggagaggggcataggttcgtgctagttgctacggattacttcaccaagtgggccgaagatgtgccgttgaagaatatgactcatacggaggctaatggacaagccgagtcgagtaataagacattgttgaaattagtgaaaaagaagattgaggaacacccaaagaggcaagatgatttgtcaagtaaagattacaagacgttgatgggagacaaccttgatgaagtcatcgacaagcgcctgaaggctttggaagagatagagaaagaaaagaagagggtggccaaggcgtacaacaagaggtcgccactccaggccgacatgggacaggaggggcgcgtgaatcgccaccacctcccacctctggtcacagccgctggccccaccctccagccgacgactttcacagccgccacgggaggggcaaccgacgaagctgcgaccaccgccgcctcctatcccgtctgcgccgagctcccacctccggccatcgacgtcctccagccgtcggccgtgacaccttcctctagtcgctcctccttcatccgcctggctgcctcccacctccggtcgccgccgcctcttacctccactgcgccgtgctcccctccaaccatcggcgtcctacttgtggtagcactacccatgcccgtcgtgccctactgccctctcctccgtaatcacggccagctacttgcggtcgactag

SEQ ID NO: 17761 - DNA, 8799 bp, Oryza sativa
  Clone ID: PAT_MRT4530_23383C.1
atgacgaagccatcatctaagacggaggtggagccatctcatgtgataccggtcacattggatgactttgaaggagaggatcgtaaagccatggaagagcacatcaacgagctcacacgggaggcgttgatgagagcaactactaggactcgtcaaggcgtgatcatcaagcccgggccacgtcccaaactcgctcccgacatggaaaaggttgatgggtttttaaggaataggctaggttctcttatggatgattacacattaaaagataaagcctataccactgttagtcaatctcccatagatccaatagggtctaaaaccgacggagcggcgttcacggccggtccgaccgggcctgatggccggggatatcctcccgatactaggcaaggccaatataatcatattgcgtcacaaactcaacctattaggccaccaaacccaccaccaaatccacaagggcctaataacatggaggatatgattagtgatattatgaggaatagattcgggatcgaaactaggaatcgtgctagagcttacaaaaagccatatcccgattattatgataatgtgtcgtttcctagaaattatagagttcccgaattttccaaatttagtggtgaagatgttgattactctgatgctagtgatagtgaggaggagggtgatcatgatatttatgttgccgaatggtcatggactaacaaaaataaaccttttgtttgttctaacttaatgccgactcttcgtaaagatcggcaaagtgaggttaaatatagttttgatgtggctaagtgtgataagattttgattatcttttgcaagagaagcaaattagattacctaaaggccatgtcataccttctcaagaagcgtcgagcatattgtaaatggcataattctcattctcactctactaatgattgcaatgtgtttcgacgacaggttcaatcggccatagatgagggacgattgaaattcaccgatggctccaagatgaagtttgatcatgatccttttccggtgaatacaattaatttcaataataagaaggtgttgattcggccggagcaagccgaatctaccaagggaaagaaagtggtcattggtgagccaaggcctaagatgatggtgccaaagaagcaggagattggcgtttggaaggagaataagggtgaagcttcgacttctaaggcccctagaaagaccaaagtgacttttgatatgcttttggaaaagtatgagaggcaaggtggtgagagggatcacaacaaagggaaaagaccaagatcacctcctagggagcgatttggtcattcgccaagacggtcatgttcacctccatattttcatccacaagacatgtcatggggtccttatccaatgccgccgccgggttatccttatccttactttatgccagggggggcaacgccgccaatgtacaatcatatgccgccaatgagattcaaccaaggatggggaggaccacggaggccaattcatgagcgtttatcttcaccaaacaaaagccgattttatggtaaaaatcgggttaatgaagagaagagggaaggaaagcgcgtcaagatagaagagaggacttcggaggtgattaccatcaagataggatcccatgatgtgcctataccttccgaagatggagttggaaagtccccaagtaaaaagtccgaagccggttctagctcctcgcagtcggccggtctgaccaggccttctggccggtctgaccgcggccatgttgccggtccgaccgggccatctggccggtctgaccgccgatctgacgacggtctgaccgacgcctcaggccggtctgaccgtgtgtctaacgtcgatctaaccggcgcatctggccggtctgaccggcggtctgctgccggtctgaccggtttccagcgccggtttgacgggagagttgcaaaaggcgatgtaagggcttcatcgtcttcaaacaaggttaataaaggacattatttacctcctggaacagagccgaatcctaggtggatgcctaaggatttgacggctacacaaaagagaaggttgcaacgtcttcgggcccaagaattaagggagaaaaaggccgaagagaaaagggataaaaggttcaatgagttgcgaccaccaccattttgtgctatggatgaagccgaggttgcccaattcttattaggtcctaaagacgcggtttttgagaaacccgatgaatcaaaccgtcacatgaagcctctctatctcaaaggccatgttgatgggaagccggtctctaggatgctagtggatggaggtgccgccgtgaacttgatgccgtattcgctattcaagaagttggggcgtgagggtgatgagttgaagaagaccaacatgattctcaatggattcaatggtgaaccaacggaggcgaggggtattttttcggcggagctcaccgtgggaaataagacgctaccaaccgctttcttcatcgtcgatgtgcaagaggctagtttagagtggttacaaaagagggtgcaagaatatcggtctacaaagaacgatattggtgaaactgttgaagattttgatgaagttgagaagcttggacaagggtttacatcggccgatccattggaagaagtagatataggtgatggaactaaaccaaggccgacttttgtacagaaaaacatgaaagccgattataaggttaaggtaatcgagctacttaaagagtatgttgattgctttgcatgggagtaccatgagatgccgggtcttagccgtgagcttgttgagcatcggcttccagttaaaccgggttttaggccttataagcaaccacttcgtcgttttaatcctttattatatgaccgagtcaaagaggagattgatcggttattaaaggcggggtttattaggccatgtcgttatgcggagtgggtttctagcatagtcccagtggagaagaaggggagtggtaaaattagagtttgcatagattttagatatttaaataaagccactcctaaagatgagtatcctatgcctatagctgacctgatgattaatgatgccttgggtcataaggtgattagctttttagatggtaatgtcggctacaatcaaatctttatggcggaagaggatatgtacaagacggcttttaggtgcccggggtttgttggtttatttgagtgggttgtcatgacctttgggttgaagaatgccggtgcaacgtatcaaagggcaatgaatttgatctttcatgatttgctaggtattatcttagagatctatattgatgatattgttgtcaaatcggatggtatggaaggccatatagccgatttgagattagcttttgagaggatgcgccggtatggtttgaagatgaacccacttaaatgtgcttttggtgtgtcggcggggaagttcttaggattcatggtgcatgagagaggagttgagattgatcctaagaagatagaaaaaattcatgatttcaaagcgccgacatgcaagaaagaggtccaaaagttgctaggtaaggtgaattatttgaggaggtttatttctaacctagcgggtaaaatcgatgcttttgttcctatacttcgcttgaaaaaagaagccgattttacttggggggcaaaacaaaaagagacgtttgaagagttgaagaggtatttatctactccacccgttgtgcgagcgcctaaagccggaaagccttttcggttatatgttgcctccgaggacaaagtcattggtgccgttttgacgcaagaggaagatggcaaggaatatatcattacatatttgagccgccgtcttttggatgctgaaacgagacatattgctaggtgtgataattctagagcaaatgacttggcacaacaaacatctggttataatgtaaaaagggggttatttctgatattagaagagccggtgcttgattttaaatttttgcgcaaaattggcaaagttggggaccagaggcggtctgaccgacgttgcacggccggtctgaccgtgaccaggggcggtctgaccggccacatgccgccggggcataggttcgtgctagtcgctacggattacttcaccaagtgggccgaagccgtacctttgaagaatatgactcatacggaggctaatggacaagccgagtcgagtaataagacattgttaaagctagtaaaaaagaagattgaggaacacccgaagaggtggcatgaggtgctttctgaagcattgtgggcacataggatatataaacatggtgccactaaagtcactccttttgagttggtttatggtcaagaagccgttttaccggtggaggtaaatcttggttctcttcgttatatcaagcaagatgatttgtcaagtgaagattacgagacgtttatgggagacaaccttgatgaagtcaccgacaagcgcttgaaggcattggaagagatagagaaagagaagaagagggtggccaaagcgtacaacaagagagtgaaagcaaaattgtttcaagttggagacttgatcgaggtggttggcgactctaggatcaccgcaaagcttaaggtgctgcgatcgtgcttgtcaacttgtcaaaaaagttgccaacagttccagaagatggactttccccgctatgatggcacgaccgatcccctgatcttcgtcaacagatgtgaatcttatttccatcaacaacgcatcatggaggaggagaaagtatggatggcttcatacaacctggaggacgtggcccaattgtggtatatccaactccaggaggacgagggtactcccagatggaatcgcttcaaggacctcctccacctgcgctttggaccgcccctgcgctcagcgccgctgttcgagctcgccgagtgccggcgcacgggtaccgtcaaggagtaccagaacagcttccaggcgctcctaccacgcgccggtccactgcaggaagcccagctggtccagctattcacggggggactccttccgccgctgagtcacgctgtgcggattcacaacccgcagtcgctcgcggccgccatgagcctggcccgtcaagttgagttgatggagctcgacaagccggctccagttcccgcccggccagcgccccgcggcctgctgccggcactgccccagcgcctcgcgctccctgcaccgccggcgagcgcacccgtggccaagatggaggccaaaccggtgaaacgcctctcccaggaggagcaggcggaacgtcgccgcctcgggctgtgctacaattgcgacgaaaagtactcccgtggccataaccgggtctgccgccgcatcttctacatcgacggcgtgacgctcaccgacgccgaggacgccgcgttggacgcggaccaagatggggaggcccctgtcttctctttgcaggcggtcgcaggagtcccgatctgcgacacgatgcaagtccgggtgatgctgggcgcggtcaccctcaccgccctcctcgacaccagctccacccacaatttcatcgccgaggaggcggcgcgccgcaccaacctggccatccagcccaagccgcgcctcacggccacagtggccaatggcgagaagatccagtgcccgggcgtgctccgacaggcgccgatcaccatcgatggagaggagttccacgtggacctcttcgtcatgccgttggcgggatacgatctcgttctgggaacccaatggatggttaccctggggccgataacatgggacttcacggcgcgcaccatgtcgttctcgcgccacggcatggaggttcgctggtccgacgtggcggcgcgcccggagccgactgtcgccgtcatagcagcctcggaggtccttctcgatgggctgctggcctctttcgaaggggtcttcgccgagccatccggtctgccaccacagcgcgctcgggaccacagcatcgtcttaaagccgggtgcgctgccagtggccgtccgcccctatcgttacctggcggctcacaaggatgaattggagctgcaatgtgccgccataatcgagcaaggcattgtccgccgcagcgactccgcgttctcgtccccggtcctcctcgtcaagaagccggacggatcgtggcgcttttgcgtcgactaccgcgccctcaacgcgctcacggtcaaggatgcgtttccgatccccgtcatcgacgagctgctcgatgagctccacggggcgcgcttcttcaccaagctagatctccgctccgggtaccaccaggtgcggatgcggccggccgacgttcacaagaccgcgttccatacccacgacggcctctacgagttcctcgtcatgccgttcgggctgtgcaatgccccggtgacgttccaggctctgatgaacgacgtacttcggccgttccttcgccgtttcgttcttgtgttttttgatgatatactaatttacagcaagacctgggcggatcatctgcgccacatccgcgccgtcctcagcgagcttcagcggcaccagctcttcctcaagcgcgccaagtgcgccttcgccagcgcgtccgtcgcgtacctcggccacgtcatctctgaggcgggcgtcgccatggacccggccaaggtgcaggctgtgcgggattggccggcgccacgctcggcgcgcgcagtccgcagcttcctcggcttggcgggctactaccgcaagtttgtgcacaactacggcgccatcgccgcgcccctcaccgccctcctcaagaaagatagtttctcctggtcaggggaggccgcaacggcgttcgacgcgctcaaggcagcagtcaccaccgccccggtgctcgccatgccggacttctccaagcccttcatcgtcgaatgcgacgcttcgtctcatggcttcggagcggtgctcgtccaggacagccaccctgttgccttcttcagtaggccggtggcaccccgccatcgcgcgctcgcagcatacgagcgtgagctgatcggcttcgtgcacgctgtacgtcactggcggccgtacttgtgggggcgccgcttcgtcgtcaagaccgaccactacagcctcaagtacctgctcgatcagaggctcgcgacgattcctcagcatcactgggtggggaagcttctcgggttcgacttcaccgtcgagtacaagccgggacatgccaatgccgtagcggacgcgctgtcgcgccgggacacaccggaggatggcaccatcttggcgctctcggccccacgctttgacttcgtcgacaggctccgccacgcgcaaaccactgacccggccctcgtcgccatgcatgaagagctcacctcgggctcccaagctctgccgtgggcggccgtggacgggatgatccagtacagcgggcggctgtacattcccccggcctcgcctctgctgccggagctcatggcggctgtccacgaggaaggacacgaaggcgtccagcgcacgctgcaccggctgcggcgtgattttcattttcctaacatgaaacagctcgtgcaggatttggtgcgggcatgccctacgtgccagcgctacaagtcggagcatctacatccggctggccttcttctaccgctgcccgtgccacaaggagtctggacggacatcgccctagacttcgtcgaggcgctaccacgcgtccggggcaagtcagtcattctgacggtggtggacaggttcagcaagtactgccacttcatccccctgtctcacccgtactccgcggagaccgtcgcccaggccttcttcgccgacatcgttcgcctccatggcatgccacagtccatcgtgtcggaccgggacacggttttcacctcccacttctggcgcgagctgatgtggttggtgggtaccaagttgcacatgacgacggcctttcacccacagtcagatgggcagtcagagtccgccaaccgcgtcattgtcatgtacctgcggtgcctcactggtgatcgaccgcggcagtggctccagtggcttccgtgggcggagtacgtcttcaacaccgcctaccaaacgtcactgcgggacacaccgttccgcgtcgtctacggccgcgatcccccatccatccggtcatatgagcccggagacaccagggtggccgccgtcgccaagaccatggaagagcgggataagttcctcgctgacattcgcagccgccttgaacaagcacaggcgacccagaagcgccactatgacaaggcacatcgccatgtcacgtaccaggtgggtgactgggccctactacgcctcaggcagcgcgcggcatcttcactgccacagaccgtcgccggcaagctgaggccccgcttctacgggccctaccgcatcaccgagctcatcaacgacgtcgcggttcgcctcgctctgccaccccgagctcgtctgcacgacgttttccacatcggcctcctcaagaagttccatggctccccgccggatgctccaccgcccctgcctgctgttcaccatggtgccgtggtcccggagccggaacgagccgtcaagacgcgcctcgcacgtggtgtgcgccagctgctgatccaatggaagggagagtccccagcttcggcgacgtgggaagacgccgacgctttcatcgccaagtaccccgacttccagctcggggacgagctggctctcgatgaggggggagatgtcatgtggggccgcacgtacgcgagacgccgtcgcgcgcgtgacgtgcgccgcgctacagagcgcgcccagcgcacagctgaggaagccaccgggagtggctaa

SEQ ID NO: 17762 - DNA, 1228 bp, Oryza sativa
  Clone ID: PAT_MRT4530_23384C.1
cttgaggcgatggcggaagctggtgacgagatcgatcaggccgacgagaagctggcaaccttttgccttcatcttcaggccccggagccatccccgtccgcacccaacgccgtcgctgccaacaacgacgaggaggcggctccatcctcggcgtcgccaccaacgaggatgacaaggaggcagctaatacggctcacatttacctcattgcaaagaaggtttgaagctatgggatctgcagaacattaccggccaataagtttcattcatagtttcacgaagataatcacaaagcagctagcaaatcgcccttcccctgaatcaatgagctgatgtctagaaacataagtgctttcatccgtaaaagagaagttcatgataatttcctctttatagatcatctgtaaaagagcataggtaaaaaaaaaaaaactaccctcttcatcaagatagacatctcaagtgcttttgattccataagttggccttaccttctcgaggtcttacaaagatttagttttggaacaagatggagaaactagattgcaaacctcttggcctcatcctcctcttcgattattctgaatggctccccaggagatagtatccatcatgataggaggcttaggtaaggggatccactagcgcctttcgtcttcatcctacccatggaacttctccagaaattaaatgatccaggcagcagaaacaacagcatctctcactcccttcaatgcaaggttccaaaggttcacatactcaatatatatggatgatgtgaccatctttatcaggtctgtgaagggcatgtagcctagtgtttgcagtgatctgagtagcaccacaagggtattaggtctgcagacaaacatccacaagactgagatttacctaattgtctcatacaagcctatccagcaaaattaggctccttcctctgcagttacatggccacttgatgttatgaagctgcgaaagactgagtttgtgcctctgttagataaaattggaggaaaaatattaggatggaaagggcgcttcttcactttggctggaagaaatactcttgtcaaatcagtcctatcggcgatgccggttttccatctaaccgcagtccaaactccgaaatatgggttctcaagagaatagagaaaattagaaaagccttccgttggaagggagaacccggagaagagcttaactggcaaaatgattgccgtccgaaaat

SEQ ID NO: 17763 - DNA, 4884 bp, Oryza sativa
  Clone ID: PAT_MRT4530_23385C.1
atgacgaagccgccatccaagatggaggtggagccatccaatgtgataccggtcacattggatgacttcgaaggagaagatcgtaaagctatggagaaatacatcaacgagctcacatgggaggcattgatgagagcaagcactaggactcgtcaaggcgtgatcatcaagcccgggccacgtcccaagctcgctcccgacgtggtaagcaatgatgaggtatcacaatctatccaacaacaaattgcatctacaatagattcatctatggctgcttttaaagatcggttagatgtaatgtttaaggataaatttgatgggtttttaaggattaagttagagttcccgaatttgccaagtttagtggtgaagatgagatttagagatgttagaaaccgatgttatgctttgaatataactgatagagatttggccggtcttgcttttaatggtttagttgctcctcttagagaaagactagatggccaacaatttcttgatgttagtcaactcatgcaaagggctctggctcaggaaagccgggttaaagataatagaaaacttgctagaccatttgacaaaaagtctaatgttaatgtggttgattaccctgaggctagtgatagtgaggaagagggtgatcatgatatttatgttgccaaatggtcatggactaataaaaataagccttttgtttgctctaatctaatgtcgactcctcgcaaagatcagcaaagtgaggttaaatatagttttgatgtggccaagtgtgataagatttttgattatcttttgcaagagaaacaaattagattacctaaaggccatgtcataccttctcaagaagagttgaaacgtcgagcatattgtaagtggcatgattctcattctcactctactaatgattgcaatgtgtttcgacgacaggttcaatcggccatagatgaaggacgattgaagttcaccgatggctccaagatgaagcttgatcatgatccttttccggtgaatagaattaatttcagtgataagaaggtgttgattcggccggagcaagccgaatctactaagggaaaggaagtggtcattggggaaccaaggtccaagatgatagtgccaaagaagccggaggttggcgtttggaaggagaataggagtggagcttcaacttctaaagcccctaggaagaccaaggtgacttttgatatgcttttggagaaatatgagaagcaaggtgctgagaaaattcgcaacaaagggaaaagaccaagatcacctcctagggagcgatttggtcattcaccaagacggtcgcattcaccttcatatcattatccacaagacatgtcatggggtccctatccaatgccgccgccgggttatccttatccttgcttcatgccatggggggcgacgccgccaatgttcaatcatatgcctcaaatgcaattcaaccaagggtggggaggaccatggaggccaattcatgagcgtttgtcttcaccaaacaatagccgattttatggaaagaatcgggctaatgaagaaaagagggaaggaaagctcgtcaaggtggaggagaggacttcggaagtgattactattaaagtagggtctcatgatgtgccaatacctactggagatggagttggagtgtccccaaatagaaaatccgaagccggtaccaactcctcgcagtcggctggtctaaccaggccttctggccggtctgaccgcggtcatgctgccggtctgactgggccatcaggccggtctgaccgccgacccgatagctatccgaccgacacctcaggccggtctgaccgtgcgccggatgtcggtctgaccgacgcgtctggccggaagattgcgaagggcgatgtggaggcttcgtcgtcttcaaacaaggttaatagagggcattatttacctcctggaacagagccgaatcctaggtggatgcctaaagatttgacggctactcaaaaaagaaggttgcaacgtcttcgggcccaagagctaagagagaaaaaggccgaagagcaaagggataaaaggttcaatgagttgcgacccccaccaatatggaggcctaaatccatagagaaggcaaaaccgattggtgtagaggagaaggaagaacaattggttgataaaagtgaatcatctccaaaagaagacatggatatcaacatggtatgtatgttacctatggagttttgtgctatggatgaagccgaggttgctcaattctcattaggtcctaaagacgcggtttttgagaagcccgatgagtcaaaccgtcacatgaagcctctctatcttaaaggccatgttgatgggaggccggtctctaggatgctagtagatggaggtgccgtcgtgaacttgatgccgtattcgttattcaagaagttggggcgtgaggatgataagttgaagaagaccaacatgattctcaatggcttcaatggtgaaccaacggaggcgaagggtatcttttcggcggagctcaccgtgggaaacaagacgctaccaaccgctttcttcatcgtcgacgtgcaagaggctaatttagagtggttacaaagaagggtgcaagaatatcgatctacaaagaacgatattggtgaaaccgttgaagattttgatgaagtggagaagcttggacaagggtttacatcggccgatccattggaggaagtggacatagatgatggaactaaaccaaggccgacttttgtaaacaaaaacatgagagccgattataaggttaagataatcgagctacttaaagagtatgttgattgctttgcatgggaataccatgagatgcctggtcttagccgtgagctcgttgagcatcggcttccaattaaaccgggttttaggccttataagcaaccgcctcgtcgttttaatcctttgctatatgtccgagtcaaagaggagattgatcggttgttgaaggcggggtttattaggccatgtcgttatgcagagtgggtttctagcatagtcccggtggagaagaaggggagtggtaagattatagtttgcatagattttagagatttaaataaacccactcccaaagatgagtatcctatgcctatagccgacatgatgattaatgatgcctcgggtcataaggtgattagctttttagatggtaatgccggctacaatcaaatctttatggcggaagaggatatgtacaagacggcttttaggtgcccggggtttgttggtttatttgagtgggttgttatgacttttgggttgaagaatgccggtgcaacatatcaaagagcaatgaatttgatcttccatgatttgctaggtattatcttagagatctatattgatgatattgttgtcaaatcggatggtatagaaggacacatagccaatttgagattagcttttgagaggatgcgccggtatggtttgaagatgaacccacttaaatgtgcttttggtgtgtcggcggggaagttcttaggattcatggtgcatgagagaggagttgagattgatcctaagaagatagaaaagattcgtgatttcaaagcgccgacatgcaagaagaaggttcaaaagttgctaagtaaggtgaattatttgaggaggtttatttctaacctagcgggtaaaatcgatgcttttgttcctatacttcgcttgaaaaaggaagccgattttacttggggggcaaaacaacaagaggcgtttgaagagttaaagacatatttgtctactccacccgttgtgcgagcgcctaaagccggaaagacttttcggttatatattgcctccgaggacaaagtcattggtgtcgttttgacgcaagaggaagatggcaaggaatatatcattacatatttgagccgccgtcttttggatgccgagacgaggcatattgctaggcgtgataattctagagcaaatgacttggcacaacaagcatctggctataatgtgaagaggggattatttctgatattagaagagccggtgcttgattttcaatctttgtacgaaattggcaaaattggagaccaggggcgaggatgcgaggcttgtcaacggttcggcaatgttcagttggcgcccgccgccgtgttgaaccctataatcaaatcatggccgttccgagggtgggctttggatttcattggtcaaatttatccttcgtcatcaaaagggcataggttcgtgctagttgctacggattacttcaccaagtgggccgaagctgtgcctttgaagaatatgactcatacggaggctaatggacaagccgagtcgagtaataaaacattgttgaaattggtgaagaagaagattgaggaatacccaaagaggtggcatgaggtgctttctgaagcattgtgggcgcataggatatctaaacatggtgccactaaagtcactccttttgagttggtttatggtcaagaagccgttttactggtggaggtaaatcttggctctcttcattatatcaagcaagatgatttgtcaagtgaatattacaagatgttgatgggagacaaccttgatgaagtcatcgacaagcacttgaaggcattggaagagatagagaaagagaagaagagggtggccaaggcatacaacaagagggtgaaggcaaaattgtttcaagttggaaacttggtttggaagacaattttgcctttgggtactcgatccaaggagttcggtaagtggtctcctagttgggagggtccttatcgagtgtgcggcattgttcgagggaacgcatactttttggagacacttcaaggggagcattttcagcgagcaatcaacgggaaatacttgaagaaatacttcccgagtgtttggcaagacgcttag

SEQ ID NO: 17764 - DNA, 2925 bp, Oryza sativa
  Clone ID: PAT_MRT4530_23386C.1
atggatgaccaaggagagaagctgtatagagagatttggacggggaatcaggggaagagaggaaagaagttgccaacacgattttttgtgactccactggggaaatctgctcaacgtcatctcagctttgacgtcgccataacaaagcctccatcaactaaggcggaggtggaaccatccaatgtcataccaatcacattgaaggagcttgatgagggagcactcaaggccatggaggaacatctcaaggcgtatacccaggaaatgttgatgaagacgtgcactaggacccgtcaaggtgtggttctcaagccgggatggttgcctaaacctaatttcgatgtgggatttagggatgttagaaaccgatgttatagcttgaatataactgatagagatttggctgatcttgcttttaatggtttaattgctcctattaaggaaagattagttggccaacaatttcttgatgttagtcaactcatggaaaaagctccggctcaggaaagccgaattaaagataatgaagaacgattgaaattttccgatggttccaagatgaagcttgatcatgatgcttttccggcgaatacaattaatttcaatgataagaaggtgttgatttggccgaagcaagccgaatctactaaggggaaaggaatggtcagtgaagagcctaggccaaagatgattgtgccaaagaatccagaagttggtgtttggaaggagaataggagtgaggcttcaagttccaaagctcctaagaagactaagatgaccttcattatgcttttgaacaagtatgagaagcaaggtggaaagagggaaggaaagcgcatcaaggtggagacaaggacttcagaagtgattactatcaaagtggggtctcatgatgtgctaataccttctggacatgaggttggagagtcttcaagcaacaaattcgaagccagaaccaactcatcgcagtcagccggtctgaccaacctcttaggccggtctgactgggccttcaggccggaggaggaagaacaatcggttgatgaatcatatccaaaggaagacatggatgtcaacatgatgtgtatgttgcctatggatttttgtgctatggatgaagccgaagttgctcaattttcactaggtcctaaagatgcggtttttgagaagcccgatgagtcaaactgtcatatgaagcctatttatctcaaaggtcatattgatgggaagccggtctctaggatgttggtggatggaggtgccgccgtgaatttgatgccgtactcgttgttcaagaagttggggcgtggagatgatgagctaaagaagaccaacggaggcgaaaagcacgacaaggccatatcactttatgtaatgagtaaagaagctaatttagagtggttgcaaaaaagggtgcaagaatatcgatctacaaagaacgatattggtgaaactattgaagattttgacgaagtagaaaagtatcatgagatgccaggtcttagccgtggtcttgtcgaacatcagcttccaattaaaccgggttttaggccttataaacaagcaccttatcgtttcaatcctttgttatatgaccgggtcaaggaggagatttatcggttattgaaagcggggtttattaggccatgtcgttatgcggagtgggtatctagtatagtcccggtggagaagaaagggagtggtaagattagagtttgcatagactttagagatttaaataaagctactccaaaagatgaatatcctatgcctatagctgacataatgattaatgatacctcgggtcatcaggtgattagctttttggatggtatcatcttagaagtctatattgatgatattgttgtcaaatcggatggtatggagggacatatagccgatttgaagttagcttttgaaaggatgcgccggtatggtttgaacgtgaacctactcatgtgtgcttttggtatgtcggcagggaggatcttaaggtttatggtgcatgagagaggagttgagattgatcctaagaagatagaaaagattcgtgatttcaaagcgccgacatgcaagaaagaggtgcaaaagttactaggtaagtttagagaaaccactatttttggtgctgcacttctatttgatgaaacagaagcatcatttacatggttgtttgagacttttctacctgcacataatggaaagcaacctaaaacaatttacacggatcaagatgcagcaataggaaaagccataaagatagtattcacagaatcatatcatggtctctgcacctttcacataatgcagaatgctgtgaagcatttatctccagtgaagggtaaagaggaagatgaaggtgaagaggaagacgaaggtgaagaggaatcgcatgttctctctgattttagtgcttgtatgtttggccatgaagatgaggcatcatttgaagaggcatttcagattatgagatccaaagttcataagcaaacatggttagatagcatttacaaggacaatgcacagcctaagggtcaagttataggtgtagttttattttcacctaatggcatgtgttatgaggcatcggttcgtttgaaatattattatacaaataatcaagctgagtatgatgctttattattcggcttacaagtgatggagatgattggagccaaacacatagaagcatttggtgattcggaattggtggtgcaacaagttgccggggcttacaaatgcttgtacggatcattaaataggtatcttgatcaatgcttggatattattgccaatttatataattttgctattagacatgttgctaggcgtgataattctagagcaaatgatttagtgatgaactctgagctccactcgagacactcaaggctgttgttggcccgatctttcggtgagttgtag

SEQ ID NO: 17765 - DNA, 5580 bp, Oryza sativa
  Clone ID: PAT_MRT4530_23387C.1
atgacgaagcagtcatcatccaaggcagaggtggagccgaccaatgtgataccaatcacattggatgacttcgaaggggaagatcgcaagtccatggaggagtacattaaggagatcacacaggaggcgttgatgagggtgtgcactaggacttgtcaaggcgtgatcatcaagcccgggccacgtcctaagctcactcccgatttggtaagcaatgaagaggtaacacaatctatccaacaacaagttgcatctacaatagattcatccatgattatttttaaaagtaagttagatgcaactattgaaggtcgatttgatgagtttttaagaactaaattcggccctctcatggccaattttatgttaaaagataaagcctctaccagtgctagccaagctcctatagatcaaacaagtaatggaaccgatggagcggcgcagacagccggtccgaccgggcctgatggccggtcagaccgcaacttcgccgtcggtccgaccggccaaacggccggtccgaccaggtattatcctggcggtcagaccaggactcatgccggtctgaccgcacctctggacgtcggtcagaccgggccctggaccggtcagaccggcgcaattatttcgattcaggggatagatccaatgactaatgctagttatttgtatcatcttagaacatttgatcctcctgtatctactgctgcaattaatccccaagttcccccacatgttcctaatgcttataatgatgttgctaggggatttcctcccgatactaggcaaggccaatataatcatattgcgccacaaacacaacctattaggccaccaaatccaccaccaaatcaatataggcctgataatatggaggaaataattagtgggattattagggataaattcgggattgaagctaggaatcgtgctaaggtataccaaaagccatatcctgattattatgataatgtaccatttcctcgtggttatagagttcccgaatttaccaagtttagtggtgaagatagtaggaccacatgggagtatgtaggtcaatttttagcgcaatgtggtgaggctaatagtgatagttttaaattgcgcttgttttctttatctttgtccggtaccgcttttacatggtttacttctttaccggcaaattctattcatacttgggctcaattagaacaaagatttcatgattatttctatactggaaaaactgagcttaggttatgtgatttgacatcgattaagcaaaaatataatgagcctgtcattgattatattaagagatttagggatgttagaaaccgatgttatagcttgaatataactgatagagatttggcttgtcttgcttttaatggtttaattgctcctcttagagaaagattagatggccaacaatttcttgatgttagtcaacttatgcaaaaggctctggctcaggaaagccgggttaaggataataaaaaatttattagaccatatgagaaaaagcctaatgttaatttgattgattaccctgaggctagtgatagtgaagatgagggtgatcatgatatgtatgttgctgagtggtcatggactaacaaaaataagccctttctttgttctaatctaatgccaactcctcgtaaagatcggcaaagtgagattaaatatagttttgatgtggccaagtgtgataagattttttattatcttttacaagaaaaacaaattagattacctacaggccatatcataccatctcaagaagaattgaaatgtcgagcttattgtaaatggcatgattcccactctcattctactaatgattgcaatgtgtttcgacgacaggttcaatcggccatagatgaaggacgattgaagtttaccgatggttctaagatgaagcttgatcatgattcttttccagtgaatacaattaatttcaatgataagaaggtgttgatttggctggagcaagccgaatctactaagggaaaaggagtaatcattggtgaaccgaggccaaagatgatagtgccaaagaagccggaggttggtgtttggaaggaaaataagagtgaagcttcaacttttaaagctcctaggaagaccaaagtgacccttgatatgcttttggaaaagtatgaaaagcaaggtggtgagagagctcgcaacaaagggaaaagaccaagatcacctcctagggagcaatttggtcactcaccaagacggtcgcattcacctccataccatcattcacaagacatgtcatggggtccttatccaatgccgccgccgggttatccttatccttattacatgccatggggggcaacaccgccaatgttcaaccatgtgcctccaatgcaattcaaccaagggtggggaggactaaggaggccaatctatgagcgtttgtcttcgccaaacaatggccggttttatggtaggaaccgggccaatgaagagaagagggaaggaaagcgtattaaggtggaggcaaggacttcggaagtgattaccatcaaagtggggtctcatgatgtgccaataccttctggagatgaagttggagagtcttcaagcaacaaacccgaagccggtaccagcttatcgcagttggccggtctgaccgggccttctggccggtctgaccgcagccatacggccggtctgaccgggccatctggccggtctgaccgccgacccgacaatagtccgaccgacgcctcaggccggtctgaccgcccaccaaatgtcggtctgaccggcgcatctggccggtctgaccgatggtctacgtccggtctgaccaagctccagcgccagtttgacaggaggtttgcaaaggacaatgcgggggcttcatcgtcatcaagtaaactcaatagggggtactatttacctcctggaacagagccgaaacctaggtggatgcctaaggatttaacggctactcaaagaagaaggttgcaacttcttcgggcccaagaattgagagaaaagaaggccgaagaggaaagagatagaaagttcaatgagttgcgaccgccaccggtttggagacgtaaatccgtagagaaggaagaaccggttgttgtagagaagaaggaagaacaatcggttgataaagatgagtcatctccaaaagaagacatggatatcaacatggtatgtcctaaagatgcggtttttgagaagcccgatgaatcaaaccgtcatatgaagcctctctatctcaaaggtcatattgatgggaagccggtctctagaatgcttgtggatggaggtgccgccgtgaatttgatgccgtactcgttgttcaaaaagttggggcgtggagatgatgagttgaagaagaccaacatgattctcaatggcttcattggtgaaccaacggaggcgaagggtatcttttcagtggagcttaccgtgggaaacaagacgctaccaacagctttttcatcgtcgatgtgcaagagggtacaagaatatcggtctacaaagaacgatattggtgaaactattgaagattttgatgaagtggagaagcttggacaagggtttacattggccgatccattggaggaagtagacataggtgatggaactaaaccaaggccgacttttataaacaaaaatatgagagccgattataaggttaagataatcgagctacttaaagagtatgttgattgctttgcatgggtgtaccatgagatgccgggtcttagccgtgagcttgttgagcatcggcttccaattaaaccgggtgttaggccttataagcaaccacctcgtcgttttaatcctttgctatatgaccgagtcaaagaggaaattgatcggttgttgaaggcggggtttattatgccatgtcgttatgcggagtgggtttctagcatagtcccggtggagaagaaggggagtggtaagattagagtttgcatagactttagagatttaaataaagctactcccaaagatgaatatcatatgcctatagccgacatgatgataaatgatgcctcgggtcataaggtgattagttttttatatggtaatgacggctacaatcaaatctttatggcggaggaggatatgcacaaaacggcttttaggtgcctgggatttgttggtttgtttgagtgggttgtcatgacttttggattgaagaatgccggtgcaacatatcaaagggcaatgaatttgatcttccatgatttactaggtattatcttagaaatctacattgatgatattgttgtcaaatcggatggtatggagggacatatagccgatttgatgttagcctttgagaggatgtgccggtatagtttgaagatgaacccacttaaatgtgcttttggtgtgtcagcggggaagttcttaggattcatggtgcatgagagaagagttgagattgatcctaagaagatagaaaaaattcgtgatttcaaagcaccgacatgcaagaagggagttcaaaagttgctaggtaaaatcgatgcttatgttcctatacttcgtttgaaaagggaagccgattttacttggggggcaaaacaacaagaagcgtttgaggagttgaagaggtatttatctactccaccccttgtgtgggcgcctaaagccggaaagcctttttggttatatattgcctccgaagacaaagtcattggtgccgttttgacgcaagaggaggatggcaaggaatatattattacatatttgagccgccgtcttttggatgccgaaacgaggccaattctaagtgggagaattggcaagtgggcatatgctttgatagaatatgatttggcttatgaaccattgaaatctatgagaggccaaattgtatgtgattttatagtagaccatcatgtagatattgcttatgaggaagaggaaacagaggaggattggagaattcctttgattagatatctgaaagatcccacacttaaggttgatcggaaaattcagcggcaagcgttcaaatacacattgcttgatgaagatttatatcaccaaaatatagatagagtcttgttgaagtgtctagatgaagatcaatctaaagtagctatgggagaggggcataggttcgtgctaggttctacggattacttcaccaagtgggccgaagccgtgccgctgatgaatacgactcatacggaggctaatggacaagccgagtcaagtaacaagacattgttgaaactagtgaaaaaaaagattgaggaacacccaaaaaggtggcatgaagtggtttccgaagcattgtgggcgcataggatatctaaacatggtgccactaaagtcactccttttgagttggtttatggtcaagaagtcgttttaccggttgagataaatcttggttctcttcgttatatcaagcaagatgatttgtcaagtgaagattacaagacgttgatgggagacaactttcatgaagtcatcaacaagcacttgaaggctttggaagagatagagaaagagaagaagagggtggccaaggcgtacaacaaaagggtgaaagcaaagttgtttcaagttggagacttggtttga

SEQ ID NO: 17766 - DNA, 421 bp, Oryza sativa
  Clone ID: PAT_MRT4530_23388C.1
cacgagggtagaatagagcactgctcccgctcctctagccggcgtcccaaaccagaggacatatagtttccactggcaacgatggcatcgggaaatagcgaagttgccgctgcggcaggttggtccaacaaaatgcagaaagacgaagaccaggtcacatcagaccaggacacaacaaacaatgatgatccgccgccgtcgccaccaacgggaggagtactctagtgaaataggaaaccgtatggctttacacatcctagcacgtggttccatctttcaactactctgccttaagcgtcaccgttcttcttccgataaaaccgcagatatatatataccctgatatatacacaatatgtgtgtaagaataaactgtcttgatggcactgttctaataatgtctttgtgaatcgctaatatt

SEQ ID NO: 17767 - DNA, 438 bp, Oryza sativa
  unsure (1)..(438): unsure at all n locations
  Clone ID: PAT_MRT4530_23389C.1
ttaaattgcgcttgtttacttggggtttgtccggtgatgctttcacatgtctcacttctttaccatcaaattctatccatacatggtccctactattatacacaccataggttgatttttctactgcagagaatggcttaggattatgtgatttaacatcggcttaaccaaaagtataatgagcctgtcattgattatattaagagatttacggatgttagaaaccgatgttatagcttgaatataactgatagagatttggctggtcttgcttttaatggtttaattgctcctcttagagaaagactagatggccaacttgctatggatgaagccgaggttgctcaactttcattaggtcctaaagatgcggtttttgagaagcccgatgaatcaaaccgtcatatgggtaccgagtggacatttcaaangcacact

SEQ ID NO: 17768 - DNA, 1309 bp, Oryza sativa
  Clone ID: PAT_MRT4530_2338C.1
aaaaaaaatatctctagatcatttaaaataatttcttctaacagttctagatgcaaaatcagtgatgatagtttactcaactttttaggagttggtacaatgcattttaaaaggtgccaaacagtaatgctttatatagctgtccgctgacttttttatataagtcaaggcgctgtttgggttcataaagcaattgattggatacaatatcattgctttttgccacgtaagtgtgcacttttattgaccaatattatggcttaggctgattatatattttggtcattttccaggcagttggtaaatcctttatgagtttatttactcggattttataccacatatgccatatatttctaggtgtggtggaaccatgtgtcttctagggacttaagcacatcggttaaagcagtgtgcgtatggcgtatgcccaatactttgaaaatttctttattcacaacatacaagcttctttatatttgttttgctatgtgaattttcaatgatgtagccaactttaggttacactcatcatattttacaaagcggttggtatatcactcggatcatgttattcagggattcacaccgcatatgctacatattaatatcaagtcgcttggttgactataattatcaaagccactcggttggttggattattttttccttgactatatgcttggtttgttcaattaaccacatagtcgggggctacacctaggtgcatctagtcgatgcacctgactttatttttcagccctccacagtcttcagatttggtaaaagtactcaggagaccatgacgaagatgattgaagcactcggctttggagtaatctagttcgagagaagattatcttttcgactatgaaggtctcaggggctactgtggagattatgggtacaccatatgatgaggggtgttagatcccgatcttccgaaaggtattgataaatagtcgatttgggcggagtcgcgacacaactcgatccggcttctaaacgaacacgctactgagccccgcaatcgcagcaccacgtctcctctgcttatcaaccgtgccgaaacccggttgacctcaccgagaaggctaatccgtggcttgttttgcagattcccggcaactcggtaggagttttgatgtgggaccaaaactatctgaaaagtagacttcataagctttccaaaagtactaatgggccccgaaattccttctagatcagcagctaggtccgtttgaagttgatgctttagttgattaatacataagttagtcatggttatatccgtgttagttgtgtcctc

SEQ ID NO: 17769 - DNA, 438 bp, Oryza sativa
  Clone ID: PAT_MRT4530_23390C.1
atggagatggagcagctcacagcccgcttcaacgacgccgtcgccgtgcgcggcagcaaccagctggcgacgggcatggagatggcggcggcgccggggcggggcgccgatgacgatatggaggagctcgtcgcccggctcgtcgacgtcaccgtgtgcgacgacgggccggcggcgcggggcgaggcggcgtgcgccgtgcgggtccgcctcccggacgggcgcgtgttcgacagggtgttcgacgcggcgcggcccgtggcggcgctgttccgctactgcggcgcggcggtcgccgcgtgcggcatggcggggcggccgttccggctggtgcggctcgccggcggcgcgtcggaggagatcccgccgcgcggagacgcgtcgctgcaggacctgcggctcgaccgctgcatcgtatacgtggtcttctcgccatag

SEQ ID NO: 17770 - DNA, 767 bp, Oryza sativa
  Clone ID: PAT_MRT4530_23391C.1
ctccaccctatatatgtgcgggaatgtatgttggtttagaactctataagttctgcaattgatttttctaaacggacaaggactcctagtacggatggtatgatccataattagattgatatgattatcttttgtacagtaaatctatttagtaattttaaatttgtattcctactcgaactctcttttttcttttcttctaatttcagcaatttatttatttattattctgaattttaattaatcacgtattgggttcttatatgaactcctcttttaatattgcttatttttaattccgaatttcagttatttttcagattgtatttctacttggactcttttttttctttttctccgattaatgtggaaatttctagcctccacagcgaacgtggtgccttcttttcaagctgtcttaaaagtaaaatagacatatttactgaatttgaaagcaagaaattaccagcatgttgtgattcttaatgaaataaatcaaaaggttggattgggaacattatttcgtacaaaaagggaaaaagaatggatcgtcatactttctttagttcatcctcaagtagatccttttgcttctgaagcccagagatctcagccagtatttccttcaaaggaaaggcaaccaatcagaactcagaaactaaacacaatctatctattatattattaaaggaatagaaaaattaagcccttcacgttcgctctcatggcctagaaattctcacattaatcgggggaaaaagaaaaag

SEQ ID NO: 17771 - DNA, 1149 bp, Oryza sativa
  Clone ID: PAT_MRT4530_23392C.1
atgagcggcaatgagccaccctcgtcaagttggaccgttgcttctgcaatgagacttggaaccttgccttcccccgtcaagtccttcacgccctccccacagggccttctgaccactgccccctcatcctgtccaacccgcaatgcccgcgcagcctgccttagagaatgggccaaaggcatctgcaccgaggccaagcttcagtttcatatggcccttgacgtcattcaaacgctggatgtagcccaagagcacagagacctctctatcccagaaacaaggctaagagcaaccctcaaacgcaagatccttggccttgcctccatagagcgggcaaggaaaaagcaggcctccaagagcaagaggtgcaccatcaaggaaatgcccaccgacaaagcctcagggccagacggcttcacagggatcttctttaaagtctactgggaaatcatcaaagaggacattcttctggtcttcgattccatctgcaacctcagatacaacgccgtcatcttcattaatcccacccgaggcgatgtcacagattttgtagatatcctacatcgctttggcactgccactggactcgtcaccaaccttcagaaatcccaagtggcggccatcagatgtgacggcattgagttgacagaggttcttgagggcgtcccggcggcaagggcaaacttctccataaagtacttgggcctccccttggtattgggtaaactacggaaggcggatttgcagccttccccggccgccggacgccgtcgcccccgtcgccccgagccgcgccgccgctttcctccgctccggtcgccgtttccgtcgtcgccgtcgccccggggtgagccgtggcccgccgctttgcttcccccgtccctcccctctctcgggcgccgctccgccgcgccggaggtcgccggcggcgccattcggggcgcgggcgcgccgcctcccgtcggctgtgccggcgtggccgccttcgggcgcgccccgcggctgccgtgtggggcccggccgtcagccgcccgcgccctcggtcgttcacggcacctcctactggcgcaccagctccggatccagctcctgtcggcgtcggcggcggcgcagctcctgtcggcggcggcgcaccacctccgccaatag

SEQ ID NO: 17772 - DNA, 161 bp, Oryza sativa
  Clone ID: PAT_MRT4530_23393C.1
cctttctgtagcagccaatagagagcctacgcttcatgtatgatagagggcatagaatacatactctatttgctggatggagcgaagaaaatggaagcatacttccatggatggacctatgtaattgctcggactcttacatggtccaacatatatgtcag

SEQ ID NO: 17773 - DNA, 291 bp, Oryza sativa
  Clone ID: PAT_MRT4530_23394C.1
atggcagaggtggccaatgtgggaacaaagtcgtccatcaataacaatgaagacaccagtcagcggcaacgaaggcggtcgacggtgaaagcgaagatgccctccaacggcggcataataggccagccgtgtaggcagagacaccagtcggcggtggctaaggcaagccagtcggtgaagacgtggatgcccatgaacggtggcggagacaccagtcggcggcgacggaggcaggccgacggtgaagtcatagacgcccaacaacagcggcataataggccagccgtgtag

SEQ ID NO: 17774 - DNA, 292 bp, Oryza sativa
  Clone ID: PAT_MRT4530_23395C.1
acattatgtattcatcaaccaaggtattatatgttctatattagatttacttgtaatatatttgaacaaatattgctacataatgagtttcgtgtgttctcgtttgaagatgtacttacttgggtgaaggaaaaagagtccgagcgttaggaatgcatggatgatcaaagaagttgattggggaccaaaccaagatcttctccaagtccacttctatctcaccacgtcaattttggtccatagaagacaagagataaagttctacacattttagattcggattcaggcctcc

SEQ ID NO: 17775 - DNA, 609 bp, Oryza sativa
  Clone ID: PAT_MRT4530_23396C.1
atggcgagtaggaaaccggcgagtttccgaacctcggcaggcggccgggcgaatcgtgtcttctccggcgaactgccggcccgggcgaaccctacaaagaccgtcttaattgacgctgacgatgttgagccttcacagaagcgtaagcgcgcgaagggtggaagggcggaaactctcaccgcgatcgcgggggttcccccacttcggaccgaggttggaaccgaggcccgtgcgcgaggggtcgtgcaaattgggaatgctttcagtgatgatgacccatcgcatggcacccccactttgctggctgagcggacctcgagatccccggtccccactgctgtcgctggatctgctggtgaggaggtgcaaagcttcatggtgggcgccactgcatctgccgaaggtgctgtggcggcggcttgcgccaccttcaatgctccctccctgggcctcacctttcgctcctggcacccgcgcgggggaagcaggcggcggtcgaaacttcggggggtgggacaccttgtttcaccggtgggaggccttgtgcccttccccgaactgaatgagtttgtcgaaggatgcaccgcggcgaagagcctcctcgttcgg

SEQ ID NO: 17776 - DNA, 395 bp, Oryza sativa
  Clone ID: PAT_MRT4530_23397C.1
gcccaagtgcatacccgaacgaggaggctcttcgccgcggtgcatccttcgacaaactcattcagttcggggaagggcacaaggcctcccaccgtggcgcccaccatgaagctttgcacctcctcaccagcagatccagcgacagcagtggggaccggggatctcgaggtccgctcagccagcaaagtgggggtgccatgcgatgggtcatcatcactgaaagcattcccaatttgcacgacccctcgcgcacgggcctcggttccaacctcggtccgaaggctcagagtgtaacggggagacatcaatttttccctagtctcatcgacggtctcctcctccccctcctcttcgtcttcgccctcctcctcgtcatcggcgtcggactcaactga

SEQ ID NO: 17777 - DNA, 305 bp, Oryza sativa
  Clone ID: PAT_MRT4530_23398C.1
gcgttcttccagcgtccgcagacgtcgggggaggtgggggggtgcgacctgaaatgcacagaaagaagatctcacaacttgatcgcaaccagccaaccagtcaaaatgcgaggtttaaaaattcgaatccatggcatttgttgtctgattggggaaatattcgcgcgtcgtactgtatctctgcggtagcgggctccgtatctgtcttcgagctcctgtgggatgtcgtagtgtgtcagggtgacaaatggctgtattcctgctccagcaaaaaataaaggtgatcaaatttgtatgggtggatt

SEQ ID NO: 17778 - DNA, 921 bp, Oryza sativa
  Clone ID: PAT_MRT4530_23399C.1
atggcgccgccggtggagaggttgaagaagctgacgaaccccgcgcagcttgcacggcgacgacacggccgcgcgggcaggtggtggctcaccagatcctccgggagagatgcccacgacgaatcatcccgagtggcggcgacggcggaggcggccgaccggccgtcagccgccggcgcgtgctcctgctgctgcctccgcacgggatcaaggcagccgggcgcttgctgctgctcgccattacgagacctcgtcggcgatggcatgccgcgcgccctcaagattggtacatccaagctacattgccatgatcgagatgagcaggatgcagacgttgcgcaagtgcggagcggcgggcggacgacggcggcgctcaggggcgagcggcggacgacggcgagtgggggcggcgcggagctgcggacgacggcggcgcgtgggggcgcgcggcggatggcggcgcgcgggggcgggcggcggacggcggcgagtaggggcgtcgcaagtgcgcacggtggcgcggagctgcggacgacggcggcgcgtggtggaagccggtgtgcggggggcggacggcggacgccggcgagtatgggcggcacaagtgagctcggcggcccggcgccgcggacaacggcggcgcttgggggcgagcggaggacggcggcgcgcgggggccgtcggggtcccgcatcgtccttccagatccgcgcgtcctccgcccccgtccgccgccggtcccgcgcgaacaagctcgctggcccagccttctccctcctcctcgccgaggcccacgccgcgctccaccgccgcgacgcaacccgcctcgcctctacattgcgtgacctctccgcttccgccgcagcgacgtccgactccggcgaggtgaagaatgtccggttttgtggttcaggggggtaa

SEQ ID NO: 17779 - DNA, 687 bp, Oryza sativa
  Clone ID: PAT_MRT4530_2339C.1
atgggaggcagagagcgcgcagaggacgacgagggcgtcggtgaagtcgagcgtcaggaccacaaccaccagctagaacgcgtagagcacggagcaggtccacgccctctaccaacttaccgtccacctcgaaccgcgccatgccggtgccgcagatcggggcgggagagcggcgaggtcatcatggggaggggggagagctcagatcgagattctctccccgtcatcctcctcctccgctgccccggcgatggtccctcccagtccatcgctcgctgtcaccaaccccttccacttgtcaccgtcatccaccaccggcgcgaacgtcatgggccagtccatggccgaaagcccgcgcgcgcccgccgtcgcagccgatgtcatcttcctcatggccggcttcccctccgacgtccgctccacctccctcacccctccacgggcgccctcgccggcctcgccctaagcggcgtgctcgtcaacatgaccacctccgaccccactctcgccacggagattgccgaggtcgcggccgccaaaggctacgctgccgtcgatgcctcggtctccggtggcgaccgtggggcctgcaaggcgacgctctccatcttcgccggcagtgacgcggccgtggtcacccgcctcacgccgctgttcaagctgatggggaatgcactgtacatgggc

SEQ ID NO: 17780 - DNA, 1462 bp, Oryza sativa
  Clone ID: PAT_MRT4530_233C.1
tcaaacttccaacttttccgtcacatcgaactttcctttggatgtaagcaatctcttctcatatgtatctatgctaatgagatggcaacggggaattccccgtcggaggttacaccaccagacccgcctccgcggaggagaattttccccatcaccatcaccgtgaaatgcaacggggcaacatctttcaccatcaccgcctccgtgcgggtaatttctccccgtggagcctccatcatcacgtattcacttacaacggcattgccgcaagccagcaacaagcagtacaataaatttgtgcccaggcaacaagcagtacaagcagacgacagcggcgcttcgacctgctgcggcggcgccaagacctgctgcggtggcgtcgggacctgctgtggcggcgctgggacctggcggcgtggtggccctgcgcgggagtggccgagggcgcgagggcgcggccgcggccgagctgccgagggcgcgggcgcgatcgaccaagcaatacacaatggccactcgggcaaacggcagctcatgctccctggccagcctcatggcggccatcttcttcctcctagtcgtctcctcccggggcgcccatggcggcagaattgccatctactggggccagaacggcaacgagggcaccctcgccgacacctgcgccacgggcaactacgccttcgtcaacctcgccttcctctgcagcttcggctcgggccaggccccgcagctcaacctcgccggccactgcgacgcctactcgggcgcctgcgccaacctcaccgccgacatcgcccgctgccagtccatgggcgtcaaggtcctcctctccatcggcggcggcgccggcggctactcgctcgcctccaagcaggacgtgtcccacctcgcccggtacctctgggagagcttcctcggcggccgcccgtcggcgccgggcggcaggaggccgctcggcgacgcggtgctcgacggcgtcgacttcgacatcgagggcggcggcggcgacccccgctactacggcgacctcgccgcgtacctcaaggcgtacagcggcaagggcgccgccggcaaggaggtgctcctctcggcggcgccgcagtgcccgttcccggaccagtgggtcggcaaggcgctcgacaccggcctgttcgactacgtgtgggtgcagttctacaacaacccgccgtgccagtacgccgcagggagcggcggcggcgccgccaacctgctcgacgcatggcgccagtggacgtcgggggtggaggccaggtacatcttcctcgggctgccggcgtcgcccggcgcggcggggagcgggttcatcccggtggggagcctcgagtcgcaggtgttgccggcgctgaaggcgtcgagcaagtacggcggggtgatgctgtggtccaggtactacgacgatcaggatggatacagctccgccatcaagaatgccgtctga

SEQ ID NO: 17781 - DNA, 933 bp, Oryza sativa
  Clone ID: PAT_MRT4530_23400C.1
atggtgggcgccactgcatctgccgaaggtgctgtggcggcggcttgcgccaccttcaatgctcccctccctgggcctcacctttcgctcctggcacccgcgcgggggaagcaggcggcggtcgagacttcgggttcggacaattcgctgtctgctccccgcttcgtctcttccgatttcgagactcgtgcggaactcatccctattgtgcagggggtgggacaccttgtttcaccggtgggaggccttgtgcccttcaccgaactgaatgagttcgtcgaaggatgcaccgcggcgaagagcctcctcgttcgggctctttcggctcaatgctccgtcgagcaggtggtgagggctcgcctggacacctacaaggccagggttcgctccttggagggggagctcagccgaaaggagcttgagaaggaaaccctcacgggttcgctaaaagatgcgaactctgagatccgaaaactccggcttgagctcgagagagagaagaaagacaaccagggtcttatgacctactacaatgactccgaaaggatcctggatggacttcgccgggagcttgcactggagagggctgcgacgaaggctgtgaccgatgaggcaaagacagcgtgccacagtcttcgtcttgcactgacggacttgggagccaaggtcagcgacgtcccagccgaagatgcgtccgcccaaaccttcatggagtggacccagcaagcgggtggcaagaggttcggcctgaatccagacgaacttctgaactactactgcggttattgtgccaaggggttcggccttgatccagcgagagaagtactcgatggctacaatggtgaacttgtagccatttcgcgccactggaaatggaccaacgatgtccaagccccatcttgcgaatggccagattggcgcaattggttgtag

SEQ ID NO: 17782 - DNA, 1389 bp, Oryza sativa
  Clone ID: PAT_MRT4530_23401C.1
atggcgagtaggaaaccggcgagtttccgaacctcggcaggcggccgggcgaatcgtgtcttctccggcgaactgccggcccgggcgaaccctacaaagaccgtcttaattgacgctgacgatgttgagccttcacagaagcgtaagcgcgcgaagggtggaagggcggaaactctcaccgcgatcgcgggggttcccccacttcggaccgaggttggaaccgaggcccgtgcgcgaggggtcgtgcaaattgggaatgctttcagtgatgatgacccatcgcatggcacccccactttgctggctgagcggacctcgagatccccggtccccactgctgtcgctggatctgctggtgaggaggtgcaaagcttcatggtgggcgccactgcatctgccgaaggtgctgtggcggcggcttgcgccaccttcaatgctcccctccctgggcctcacctttcgctcctggcacccgcgcgggggaagcaggcggcggtcgagacttcgggttcggacaattcgctgtctgctccccgcttcgtctcttccgatttcgagactcgtgcggaactcatccctattgtgcagggggtgggacaccttgtttcaccggtgggaggccttgtgcccttcaccgaactgaatgagttcgtcgaaggatgcaccgcggcgaagagcctcctcgttcgggtatgcacttgggcctactttgcgcttatctcaacaacacctttgatttcttctcataacttgtttcgtttatttgtgaaggctctttcggctcaatgctccgtcgagcaggtggtgagggctcgcctggacacctacaaggccagggttcgctccttggagggggagctcagccgaaaggagcttgagaaggaaaccctcacgggttcgctaaaagatgcgaactctgagatccgaaaactccggcttgagctcgagagagagaagaaagacaaccagggtcttatgacctactacaatgactccgaaaggatcctggatggacttcgccgggagcttgcactggagagggctgcgacgaaggctgtgaccgatgaggcaaagacagcgtgccacagtcttcgtcttgcactgacggacttgggagccaaggtcagcgacgtcccagccgaagatgcgtccgcccaaaccttcatggagtggacccagcaagcgggtggcaagaggttcggcctgaatccagacgaacttctgaactactactgcggttattgtgccaaggggttcggccttgatccagcgagagaagtactcgatggctacaatggtgaacttgtagccatttcgcgccactggaaatggaccaacgatgtccaagccccatcttgcgaatggccagattggcgcaattggttgtag

SEQ ID NO: 17783 - DNA, 1102 bp, Oryza sativa
  Clone ID: PAT_MRT4530_23402C.1
tccggattcccgggtcgacccacgcgtccgcccacgcgtccgcccacgcgtccgttggcctcctgtgccgctgcacatatatatagctcccaccaccacgagtaatctaacagaataaatcatgggaccagcccacggccacctcgtcctcctcgtcgccgcggtggcgttgctgtcagctggcttcctcccgcacgctgtggcgaagaagggcggcgccgtgccaccggcggttgctgacatatgctctcgcactccattcccagacacgtgcaagagcaccgccgggcggcacgcgtccaagtacccggtgatcgacgtcgtggctgtgctcaacatgcaggtggacgcgttctccaagcgcacggcgcatgcgagggagcgcgtgaccaaggtgtcccgcggcgcacagcctcagcagacgcaggcgctgagcttctgcgacaccatgtacatgaacacccaggacaccatcggcgccgcggagcgggcgatcaccttcagagacaaggctacggcgaagatcatgctgcagctcgctgtgcaggactttgagtcgtgcgatcggcccttcaagcagtccgggatcaacaaccccttggagaagatcgacgtagagctcaaccagatggcacaaaactgcatgacactggccagcatgatatgagactcatgaaggactgaatcgatgagaatatgagatgtcacgtcattcgatcaggatgtccacggatttggggaggacctgggtttggtttttccttcttttacagaaattcatttactaattttgtgttttattttcttgacagtgtctaaatttgttaattatcacgacccgacctgcgtttgttgtgtaggtcttttaacgtggaagaagagggccttttacgtttatcattttgtactgagttcactaatttgttccatttgattgattgatgttttgtgttaatctttgttgttgttagtgtcgaatagttaattactaggggttccttcccccgttgctgcagggcagtgtgggtatatatataaagttgtaacaaccatacgcgttttcaaagctcgtatgcaattccatattttgccttttgctctt

SEQ ID NO: 17784 - DNA, 971 bp, Oryza sativa
  Clone ID: PAT_MRT4530_23403C.1
ggccgccccttttttttttttttttttgcggaaaagtatatatcattatccacaagatatgtgcccatgataaacctcagcatgtgtcatgttacttgaaaaaatatacaaagcattccatttctcaaattgaacagagtgcatgtaaactacatcagcagtcaaacatgacatcttcgatatccaagaatatttccagtggtggttcacaggtatggagagtaactgacgaggttcatgaccaaccacatatgacaaaagaggttcccaatgtagcaaaaacaccggttactcagtcttcttttgcttggttgattctccagtcttgctaatgatggtatctaagtgccttgatagtacactgtgcgccataccaatcttttcatcgacttggtcctggtacttctcatacaatggtggaactaacagagaaaacattacaccaatgtaaatgagcgtaaggaagttgaagagcattccaatgtatgaaaccacccataaaatcaatataacctttataaaaacactcctatctctcttgatggcaatatcatggccaacagccaacaccttgttgatccatacaagagcccgatctgcagctttctcaacaaccacatctgagacctctagtttagggagtggtggaagaggcctgttgagcagcgaggcggacttggcccagaagaagaggatggcgacgaggaggagcagggcgttggccatgactgacgggaagctgtaccccgcgcgctcgaagaggaaccacaccgccgtggcgcccgccacggccgccgcggacacgttcctccgccgccacagcaccaagtcggcgactgcgccgccgccgaggagggcgtggagggatcggcgggaggtggtggccatcgggatcgccgcggggagggttagggtttggggccgcggccgaagcgaggagaggaagtggggtaggtgagtggcccggccgg

SEQ ID NO: 17785 - DNA, 416 bp, Oryza sativa
  unsure (1)..(416): unsure at all n locations
  Clone ID: PAT_MRT4530_23404C.1
cggacgcgtgggnactttttttttttatttttttttttttttttttttttctttttgtgtttttctaaccaaaaaggccatagccaaaaacttttttttttgaaaatacatctcttattgacccaaactaatcaaattgcttccaaaaaagagcaaaatcatttcaaactggacggttttttaaaaaacttgttgaaggacagaaaaagaaatttgtcgacatctccgccgccggtgcctgtttttaaaccgggggggtcattttagaggagccaaatttaaaaacccacgcattaaacgccaaacttttttaaaaggggcacctaaattaaagtaactggccgcatgtttacaacccggggaatggaaaaaccctgattgtaacaaccttaaaggccttggaacaaatccccttt

SEQ ID NO: 17786 - DNA, 615 bp, Oryza sativa
  Clone ID: PAT_MRT4530_23405C.1
atggagagacagaggtcccaagacatcttcccggaacttgtcaaagatgaagatcttgtgggtattgaggacaataggagactgctgacagaatggctatattatgatgagttggacaataaggtgataacggtgtcaggaatgggtggactgggaaaaaccaccctggtcacaaatgtttatgagcgtgaaaagacaaacttctccgctcatgcatggatggccgtgtcacaaacctacacagtcgatgctctgttgaagaagttgcttaggaaagttggttacaaaggtgaaattgacaaaatggatgtttatgatttgaaagaagaaataactcgagtactcaaagataggaaatgcttgattgtactggatgatgtctgggaccaagaagcatactttaaaatatgcgatgcattccagagcaaccaacagagtcgtgtaatcatcacaacacgaaagaatcatgttgcagctcttgcttcctcagcatgccgccttgatctccagccactggatggcaatcaggcctttgatctattctgcagacgggcattttatagcaccaaggaccatgagtgtcccagcgagcttgtggaagttgctgcatctata

SEQ ID NO: 17787 - DNA, 585 bp, Oryza sativa
  Clone ID: PAT_MRT4530_23406C.1
atggagatggaaggaggtgataatgacttcgccaaagctgttttagctgggctggacaaatgtgaagagctgggatatgaagatgttgaattgtggagcgacagtcagagagcatgtggcgtcctgagtgattttgaaactatcaatatggatgacaggaatcggatggagtgcatgcttcttaggtttaagtcaactaggtttaaaagattggtctctgtgcaaaaaccaagggaaatcaaagattggtctctgtgcgaaatcttgttcatggttgatgatattctcatagagaaagttcattcacgctaccttctgcgtaatttgctaaagaagtggtctccatatttgagaggacaatccatctatagcatcacacgtacgaagctcacaaggtacatcattcgtacgaagctcacaagggacatcatccgccatccgataggagccgttccactccatgaagctgctgaacggttctctgttgacatgatcaaattgctcttccgccaaggcgcttcagccaacattggtcctaattcagattttattttgctgggagatttggtcctaattcatacttaa

SEQ ID NO: 17788 - DNA, 174 bp, Oryza sativa
  Clone ID: PAT_MRT4530_23407C.1
atggctaccattgatacaaccgttgctcacatcaagatcaagatgcctaagtgctggaatcatattcgaacacctattacattgctgatttcaaatgtccgccaaatatgtatacgagctccgttttgggtccatgagtatttgatgggacttgtcgtggacgcgttgctctaa

SEQ ID NO: 17789 - DNA, 306 bp, Oryza sativa
  Clone ID: PAT_MRT4530_23408C.1
atgctgcgacgaccagccgccacggcggcgggcagggccatccggcgagccgcgtaccactccgacggcggccctcctccccgcaagctccggggcccccgattcagccctctcaacaggcacaaccacgaggttgatgcgttgctcgaggaagtcaagaatacgccgattctggttcaaaatgttctccggtcatgggtgattgctgcagcggttatctcaggctattgctgggggtacaacagagtgatcaccaaacgtcctgtggctggctctgaaccaccaacagaaggtgaggtggagtag

SEQ ID NO: 17790 - DNA, 467 bp, Oryza sativa
  Clone ID: PAT_MRT4530_23409C.1
aacctcctaacactacataacaaacctatagggacaaacatgccatatgccaaaagctcgggccggcagaggaaacccagatgtctccactaataatacatacgatcatccaacagaatgtgacaggactacactactactgagaggtaggactgaatagacgatatatgtaagctggggcatcctaggatctgaaaatgtatctccgtgaacacaataatactggacatgaactgaatgcacgcatcgtcaacttgtcaaggaagaccctcacgatgctgaacgcggcctctacggggtgggtgaactgcttcaatggaaggaccgatgtcacatgataaaaacgtgcctcagcggataggctggccactatgagatattgggccatggtggctgtgccacccaccctatgcaagacatcaacagtacaagctgctgactccatctgagagacctgacaaacgttc

SEQ ID NO: 17791 - DNA, 1566 bp, Oryza sativa
  Clone ID: PAT_MRT4530_2340C.1
attcaagttgaaaattttgaattttgatatgaaattttccaatttgagatgaaaattttcaattttgagttgaaagctcgccactgcacttggtgatgaggaatgttaggtcccgatcttccgataggtattgataaatagtcgattcgggcggagtctcgacacaactcgatccggcttctgaacgaacacgctactgagctccgcaatcgcagcaccacatctcgtctggttatcaactgtgccgaaacctggttgacctcaccgagaaggctaatccgtggattgttttgcagattccagacagctcggtaggaatttttacgtgggaccaaaaccatctgtaagtagactccataagctttccaacaagtattcatgggccccgaaatttgtcacgcccggaaattcacaagtaatttctaaactaatttgtgcattaaatcctcgtccaggaatcagccgaagcccaaccatcctgaacaaccatacccggttgtacagatctatctccaaaccaggaatgtaccattccaaaccaggagctaatgaaattattatcagttatagcatcatttattatgtcttcttggatacttccaacgcactcacgaactttcgaaacgacaagctaacacgcaaaacgagaaaaaagactaataaaaaccaaataaacaatacatataaaaatcacccaaatgatcaaccgaaaccggtgaacggaaccggtggctctgaacggctctaaactaaaggacgactccacacagacgaacgaacgaagcacggggacacctcgtttgaacgaacgagcgaacgactcaacaacggctgcgactaaaccgatgagctagatacgaaagtctcaccgaaccaaagcgatcggagagagatagatgacgacggtgaaccggcggcaacacatggagacgatgacgacgctagggccaaacaagattagattagattagataggattaagaccctagggaaaacctcacagatgaacggccgacgacggacagcgatggaagatggccggtgacgagcttcgaagggcggcgaggtactgtccacggtggcgacgactttccggctacgaacggcggcaacagaggggtggacgtccttcggcttggcgctgcgatgccgaaggagggagcagctctgaccagggacagctgggacgacggcgaacggcggctgtagaacaaaagacggcggcaacccactggttcacggcgaggatggcttctggcgagatttcggcgcaagggaaccggctgccgggcttctcctcctccttgcgaatccaacggcggcggcggcgaccgaaggagacgatggacgacgacgaacggcgcggctggagcggtgcctgcgcttggagagagaaggagagcgcggggagagaaggtttccggcgacggcggaagacgggacttgaggagataggtagaggacgactagggggtcctttatataggcacgggagctcgggtccgggcccaaatcgacgggaaaaactcgggaaattctagggttctcgccggaggaaggaaagat

SEQ ID NO: 17792 - DNA, 804 bp, Oryza sativa
  Clone ID: PAT_MRT4530_23410C.1
atggcgaacaaggcgccggcgacgacctcgtggcggtggcggctgctgctgctgctgctcctcgcggtggccgccctgtgctggatccctccggcgatcgcgatggccgccgcggccgccgccgccacgacgtcctccggggggcggaggtcgctgctcgggttcgtggaggcgcaggggaactcctcctaccggtgctccccatccgggccctgcgtcccctgccaatactccgagaaggtcagccggttctatgctctgactcttgtcattcgatcttggggctcaccgtggaggggggaatcgatcttgggaggcctgatggggcaggccaacagggtttgtaagaacaaggatgtctcgcacagtgcactttatctttattggtcagaatcgacacccattaactcttatccccagtccccacccccgcaactccttatactgtcctatcaaagcgatgagaagtactgttgcagtgaaaccggctaccgcttgccattgaaatgtgtagaagtacaaaatgttaccaaagaaggaaataatactaagcaacggaaggtgctggacgatgcatccacgtcaggtggttcaaagcattacacaacttacaggagttgtgtaccattggaggatgaagagaagttatctgttcttggttttgaggtttttattctttcttatagcatggttatgatggctggaatgctgctaataagtggcccatttgtatactatcggaaaagacgaacagctataatgcagggggcttcaaggatcccaacaagccctcctaggttttaa

SEQ ID NO: 17793 - DNA, 395 bp, Oryza sativa
  Clone ID: PAT_MRT4530_23411C.1
aaagcgttgcggtgagagccgtcgcggtgcgggactcaaaccctgcacggcaatttttgcgaggggaagaggctcgcgcgggtattgacactgcttacttttgcaggacttgcctgtgtgggcctccctacccacaaaataccaaatctaaatttagctatagttaattaaatagaactctttttaaaaaaattcaaatttgatttgtaataaattatagtaatatttataataaaaacaaatattgtattaaaatatgtttaatataaaataaaattaaattgtagacttcgtttaatgtgagtattttagcattttttatattcgtattacatttgtattgatgttaatgatttaaagagtattgatataaagataagtaaaaaaaaaaaaaa

SEQ ID NO: 17794 - DNA, 1232 bp, Oryza sativa
  unsure (1)..(1232): unsure at all n locations
  Clone ID: PAT_MRT4530_23412C.1
gaccaacaaaggaacacagacgagatcgtcccttagggtatgccaaaatgacgttttcaagaagagaagcgacggaaaaaccgccgccgccgtccgtcggggctcaaatgagccaagactaggctttcacccggcaaccacccttgaggtgtgagacagcacgctgacgcaccgatgctccaccaccactcaagctctgccgacatctgggacccctgcaccggcgccccccgccggccagccttcatgcgccaaagaccacgccacacccaccggcagctcctcctcgcaccgaggtcgcctcctccaccgccggccacatctctcgcgccaagccggcctcctccaccggacgcgtctcttgcaccaatccagcctccctccattggccgcgcctctcgcgccaagccgaccttcatctccaccgctcgcgcctctcgcgccaagccggcctccgctgccatcggctacgcctttttgcgccaagccggtctccaacccctcctccaaacgatgccgcgccggccagatgcagccgtctgccaagccctcggctagccgtccgaggccgtcatacctccagtgatcgcagtcacggtcaccaccaccgcaaccgctgctgctgaacgcccagccacctcgtcgtcgccatcctcacctcgccgccgtcacccaccacggccagtcctcctcccgtccacggtcgctgtccggcccatcgcccgtgcatgccgaagctgtggacgccgcctccagctgctgccggcgccgaccgcgcaagccacttggaacaattttttctccacatggcacttccccgaggggatggcgcccggggtggagtggcggttatcccctccgcgcttgggggtcgggcccgtcccgatcaagactagagggaggaggctgccccnngcgccacgtagccctcccccgaggggggatcgggccccgggcagggcggnggcggcccccncctgggcctaggggcccgncccccccggccccgcccgcgccggccgcccccgcccccggcgccgcgccccgccccgccggccgcgcgcgcggcccccgcccgggccgccccgccccccccccgcgccgcgcgcccggcccccgcccgcccgggcgccgccggggcgncgggcgcgccgcgcgccccgcgcccccgcccgccgcgggnccgcccgcccccgggggcgccccgcngccccgcggccgcccccggccgc

SEQ ID NO: 17795 - DNA, 531 bp, Oryza sativa
  Clone ID: PAT_MRT4530_23413C.1
atggggcggcggtggcggctggggttctcaccgccggctcagaccaagcatgtgcgcgtgttcagcagcggcacggaccatcagctgctacgatcgttggtgaaccccggagaggaggtcatcctcaccgtcccgaacgaacaactggagcatgtcgtgcggttcctcctggtgactaggatcacgcgcatcatgaccagcgacgacgtcctggttaggtccctcgggaatgcgtatttcctcgtccccacgatggttaacctccaccccacgctcgcggcggcgcgcctggacggccgcgtgaaggtgtcgagcgcgtgcgccatctccgctggcgcgcagacctcctccgccgatgaccacagcagcttgtcggagatgctccttcctcgcgccgctgccatcgcagctcatgagaaagttggtcaaaacatcctgtgcgctgatgtggcatccaaagtgtcatccacgtgtgcaaaaaccatcgcaaaaacaactctagggggtaaagtgtccggtattgacagttga

SEQ ID NO: 17796 - DNA, 441 bp, Oryza sativa
  Clone ID: PAT_MRT4530_23414C.1
atggctgttggtggagaggaactagcgttttcggtacaaatctgtggcgtgcgggcgggagagattagcgagggggaagagggaaggcggatagtgggaggcggagacagtaaatcttaccggatttttggggccggcaaaatagtagatggggattttttttcggtggatttgtgtcaggaggggaagagatcttcgcgctcgagaggggaagagatggcgcgcgtgggagggaaagagatggcgcgcggcgcgggagatcgagcgccatcacccgggatcgcgcgggagatcgagcgcaatcgcccgggatcgcgcgggaagggcggagatcgggcgggcgctgggtggaggggaaaggggatctcgatcggctacggtggggaagggatcggccgcggtgagtgggtccacaaatcgcgttttttatcgcccaggtag

SEQ ID NO: 17797 - DNA, 426 bp, Oryza sativa
  Clone ID: PAT_MRT4530_23415C.1
atgacgtcagcggcgacgtcatctccggcggcggcttggacggctcggacggcgcacgctcgccggcgaacggcgacgctttggcacgaacggaggacaccaacgggtagagcgcgacgcggcgaactcaccgatgaccaaaacgtcggcggaagaccaacggatggcgacgacgtcgaggaaaaggcggcggagaagatcgggtcgacggtggcgacggtgctccggcgatcttcggcggcggcgaaggggcggacgaggacggcgacgacttggcgatcccgacggtggccttcccgagcgacgacgacgaccgaaacgccggcggcgcacggctggagcgacggcggctacagcggtgctagggcacatggcgctagagctctaccggcgacgagaggcgaaggcgagggtggcgacgggtag

SEQ ID NO: 17798 - DNA, 1305 bp, Oryza sativa
  Clone ID: PAT_MRT4530_23416C.1
tgtggacatggggagcatgctttagagatatttgaggagatgcagttctcagggttaagccctgattgcatctcttcggattacataatggaaggttcactccttgacctctatgtgaaatgtggtgatgttgaaactgcccttgtgatcttcaattcgagtgataggactaacgtagtactctggaacctgatgcttgtggcatttgggcagatcaatgatctagcaaaagaaattgaccttggagagcagatccattcattaagtgtaaaaactggcttcgagtctgatatgtatgttagtggtgtattgatagatatgtattccaaatatgggtggcttgaaaaggcaagacgtgttcttgaaatgcttaaagagaaagacgtggtttcctggacttccatgattgctggatatgtgcaacatgagtgttgtaaggacgctcttgcagcttttaaagagatgcagaaatgtggaatttggccagataacataggactagcaagtgctataagtggctgcgctggaatcaatgcaatgaggcaaggcttgcagattcatgctcggatttatgtgtctggttattcaggagatgtttcaatttggaatgcattggtaaacctttatgcacgatgcggaagaatcagagaagctttctcttcattcgaggaaattgaacataaagatgagataacatggaacggcctggtatctggttttgcacaaagtggcctacatgaagaagctctcaaggtatttatgcgtatggatcaatcaggtgtcaagcataatgtgttcacatttgtatcagctcttagtgcttcagctaaccttgcagaaataaaacaaggaaaacaaatacatgccagagttattaaaacaggtcattccttcaaaactgaagttggaaatgctctgatttccttgtacgggaagtgtggtagctttgaggatgccaagatggaattttctgaaatgtctgagagaaatgaggtgtcatggaatactattatcacaagctgttcacagcatggacgtggcttggaggctttggatttatttgatcaaatgaagaaagaaggtattaaaccaaatgatgttacattcataggtgttttagctgctagcagtcatgtgggattggtgaaggaagtccttagttacttcaaatcaatgtctgatgagtatgaaattcgtccaaggcctgatcattatgcttgtgttatcgatatctttggacgagctgggcaacttgaccgtgcaaagaaatttattgaggaaatgccaattgctgctgatgctatg

SEQ ID NO: 17799 - DNA, 755 bp, Oryza sativa
  Clone ID: PAT_MRT4530_23417C.1
atgcagcgcctctccgtgggatcggcaggcggcaagccccgcctcctcgagggcggcgcggcggcgggggaggaggaggaggaggaggagaaggccgggaaggcggggcgggcggcgccggacaggtccatccacatcatccccgtgctcacgctcctctgcttcctcgtcctcttccttctctcccacgacccggcttcctcctccctcgccatcgccaccggtcgcggaaacgacggcgtccatcgcccgcagcggcggcgtccaccgccggttaaagcaggagccgaggctggcccgcggccgaaggatggggatggcgctgcggcggcggcgctgacggctaaggctaaggctggatgtgacgtcagcgcagcgcagctagccgttggattcgttgttggaatcgaaggtgccaaaaagtcagagaagccgacgagggaggagtctctcatctttctcttttcctcctctcttttcttccttgggatctctccaactccaaccatagcaccacaagattacgttggcagttcaacagtgctactatatgtattatatcttgtgatcttcttcttatcttggccatgagaattggattagccatatgttcatacttcgattcgattccatccacttttggtttggttcatgctattggagtactcctatttgctgatgtactatttcttgtgccctacccttctcactttttcttttttggcgaggaagctgatttcgaccgttctggttag

SEQ ID NO: 17800 - DNA, 475 bp, Oryza sativa
  Clone ID: PAT_MRT4530_23418C.1
gatgaattggtgtttgttatcttcctttctgatttaggagttttatttgcaggatatgaagaacatggagaacttgagtgctgatcgaagtgttcatctgatctataaaaatgcttgtggttccatgaagagttggagctcattctggggtgtcaattgaagatacaagggaggtcacacttttccgtactcaagtaaagtccattatacaaggctatataaaccacttctcttgtaggctgtgatacatttcaattggcatgctttggctagtgcaatgatccaaagatgtttctacatgtaaacatcctttgattaagttgacatgctccctgtatttgttatgcgtatgatttgcattatgtctgcatcagtaatggttgaaaagatctatagcttaatacgtatttaaatcttagaacacgtaaccagtccattttactttgtattttgattaatgcagagacttgccctg

SEQ ID NO: 17801 - DNA, 3513 bp, Oryza sativa
  Clone ID: PAT_MRT4530_23419C.1
atgacgcgccggggagcggcctccctcgggaggacgctcgccgggttcctggcgcatgaagatccagccaaggtcctctccctatttgcggacaaggccaggcagcatgggggtcttggccccctcgacttcgcgtgcgccctgcgcgcgtgcagggggaatggcaggcgttggcaggtcgttccggagatacacgcgaaggctgtcacgcgtggtcttgggaaatacaggatcgtcggcaaccttctgattgacctgtactccaagaacgggcttgttctgcctgcgaggcgggtgtttgaggagctttctgccagggacaatgtctcctgggtggcaatgctgtcagggtatgcgcagaatggccttggggaggaagctctcgggctgtatcgccagatgcatcgagctggggttgttcctacaccttatgttctgtctagcgtcctgagttcgtgcactaaagcggagctctttgcgcaaggacggttgattcatgcccaaggttacaagcacggattctgctctgaaatctttgtggggaatgctgttatcacgctgtacttgcggtgcggatcattcagattggcagagagagtattttgcgacatgccacaccgtgacacagtaacattcaatacgttgatctcaggacatgctcagtgtggacatggggagcatgctttagagatatttgaggagatgcagttctcagggttaagccctgattgtgtgaccatttctagtctgcttgcagcttgtgcgtcgcttggtgatcttcaaaaggggacgcaactccattcctatctgtttaaagcaggcatctcttcggattacataatggaaggttcactccttgacctctatgtgaaatgtggtgatgttgaaactgcccttgtgatcttcaattcgagtgataggactaacgtagtactctggaacctgatgcttgtggcatttgggcagatcaatgatctagcaaagtcttttgagctattctgtcaaatgcaggctgcaggtatacgccctaaccaattcacgtacccatgcattttaaggacttgcacttgcactagagaaattgaccttggagagcagatccattcattaagtgtaaaaactggcttcgagtctgatatgtatgttagtggtgtattgatagatatgtattccaaatatgggtggcttgaaaaggcaagacgtgttcttgaaatgcttaaagagaaagacgtggtttcctggacttccatgattgctggatatgtgcaacatgagtgttgtaaggacgctcttgcagcttttaaagagatgcagaaatgtggaatttggccagataacataggactagcaagtgctataagtggctgcgctggaatcaatgcaatgaggcaaggcttgcagattcatgctcggatttatgtgtctggttattcaggagatgtttcaatttggaatgcattggtaaacctttatgcacgatgcggaagaatcagagaagctttctcttcattcgaggaaattgaacataaagatgagataacatggaacggcctggtatctggttttgcacaaagtggcctacatgaagaagctctcaaggtatttatgcgtatggatcaatcaggtgtcaagcataatgtgttcacatttgtatcagctcttagtgcttcagctaaccttgcagaaataaaacaaggaaaacaaatacatgccagagttattaaaacaggtcattccttcgaaactgaagttggaaatgctctgatttccttgtacgggaagtgtggtagctttgaggatgccaagatggaattttctgaaatgtctgagagaaatgaggtgtcatggaatactattatcacaagctgttcacagcatggacgtggcttggaggctttggatttatttgatcaaatgaagaaagaaggtattaaaccaaatgatgttacattcataggtgttttagctgcttgcagtcatgtgggattggtggaggaaggccttagttacttcaaatcaatgtctgatgagtatggaattcgtccaaggcctgatcattatgcttgtgttatcgatatctttggacgagctgggcaacttgaccgtgcaaagaaatttattgaggaaatgccaattgctgctgatgctatggtttggagaacccttctcagcgcctgtaaagtacacaagaacatagaagttggagagtttgcagccaaacatctattggaattggagcctcatgattctgcatcatatgttcttctctcaaatgcatatgctgttaccgagaagtgggccaatagggatcaggtcagaaagatgatgagagacagaggagtcagaaaggaaccaggccggagctggattgaagtaaagaatgtggttcatgcattctttgttggtgacagattacaccccttggctgagcagatatacaattttttggctgttataaatgatagggtagccaaagtaggatacaagcaagagaaatatcatctcttccatgataaagagcaagaagggagagatcctactgatcttgtgcacagcgagaagttagctgtgacttttgggttgatgagtttgcctccctgtggagaaatatacttcattgtatgccaactttcttcatcagaagagaacaaatggtcaagtagggtctattatcagtcactgattgagaaaactgaaagaaaggagcgagcaggagggatgaaaggaaaacaattggaaaccccaattagtcatctgaaatctggagcacgtagaaacattctcaagcctgcttctgctgctgcagctgtgatggagctgacatgcccaaaccaaaaaatggcttatcagcagggtattcgatgcctccttgaaagagaagctggtgcatattttgtgtgctttcagaggaatagtcgggagtatgtcggctgccacgcgatccgctgctgggctacctggaggaaggaaaccaggacgctgagccccagatcaagcccgtatgacagggagatccatctggaggagctgccaccacgagggctgcagtgcatagcttcccttcttgtcaccttccaggagtactctgggatggagacctacgagcgagactggcgaccagggttaaactttcggtttagccgatttgatcgttctgatggaaacgacagctccatcagagagttgacagggcaaatgctgcaggatatgaagtattcttaccgctccatactcgtttatgtgcttcttctttatgacaaaaccaacgatgatcaacttctcaagcatctgaagcgagaaattatccacggcatgcaacagtcgtgcagagatccagaaatgggtcgtgagatggatgaggttgctgctatgttttgttcaaagcaagggaaacctgtcgggaattatgcttcgctggtgaaggaagcacgggagcgtctggtggtgaagaagaaagaacaagaatcggctaccaacgaaagttttgatgtgatgaaaaagttgaaagtttga

SEQ ID NO: 17802 - DNA, 351 bp, Oryza sativa
  Clone ID: PAT_MRT4530_2341C.1
atgacggggagagaatctcgatctgagctctcccccctccccatgatgacctcgccgctctcccgccccgatctgcggcaccggcatggcgcgctggtggttgtggtcctgacgctcgacttcaccgacgccctcgtcgtcctctgcgcgctctctgcctcccatgtcctcgccttcctcttcactgcacggtttgtcgacttccgggcgcgcggtgcgtgctgcacggcgagcctccccgcgcgtgcgccactggggccgagctcgtggagcccttctcactgctcatgctcttctcccggcggcgacgatatgcggcgtgaagagagaacgggaggacggaaagattga

SEQ ID NO: 17803 - DNA, 3622 bp, Oryza sativa
  Clone ID: PAT_MRT4530_23420C.1
gacgaggatcgaatcctcctcctccaggctccaagccgaaacaaaccctagccccgtcgatctccctctcctcgcatggcggctcccaagcccatctgggtgcgccaggccgaggaggccaagctcaagtccgaggccgagaccgccgccgccgccaaggccgccttcgacgccaccttcaaggccctctccgcatccgccgccgacgaccccgaccaggacgacgacctccaccgcccctcttccccggcccaagcctctcgggacgcctactccgacgcagacgacgacgacgacgaccgcccccatgcccctcccggtccagtcgacccctccaagtcctccgccgccggccccggcatcgctggtggttccgctggtgcccccgccaccttcaccgtcgtctccaaggaccgggactcgcgcagggtcccaaccggcggcgcgcgcgtccgcgtccgcgtctccccggcagctggcgtcggcggcgacgacctcgaaggtgcagtcaaggacaacggcgatggctcctacgccgtcacctacgtcgtccctaagcgcggtaactacatggtccacgtcgacctcgacgggtcgcccgtcatggggagccccttccccgtcttcttcagcgcatccaacactgccgccaccgtcgtcacctccaccttcccgcccacgcttccggctgtctcctccgcctaccccaacatggtcaaccagaccatgcccaacatgccaaactacgctggcgccctctcggctgccttccccagccttctcggcctcctccctgctgcgtctactggtgcctctggtggggttgtgctgcctggtgttggtgcctcgcttggggagatttgccgggagcacatcaacggcaagtgcaccaaggccacagactgtagcaagctcaaccacccgccacagcagctgctcatgtccgtgctggctgccactacatctgtcggtgcgctcagccaggcgcccatggcaccatctgctgctgccatggctgctgctcaggccatcatggctgcacaggcactgcaggcacatgctgcgcagatgcaggctgattccaaggctgcaggaggggaggcttcaggttcaacagataaaactgataaaggtgatgttctgaagaaaatggttcagattagcaacctaagcccacttcttacggtggatcatattaagcagctatttggatactgtggcaaagtggttgattgcaccatcacagactcaaaacatattgcctatgtagaatactccaaacaagaagaagcaactgcagcgctggcactcaacaacatggatgttggtggtcgccccttgaatgttgagatggccaaatccctccctcccaaaactaatttggcaaatagcaatctgcccatgatgatgcagcaagctgttcagttgcaacagatgcaattccagcaggctctgataatgcagcagacaatagcagctcaacaggctgctgcgcgcgcagccaccatgaaatccgccactgaagcagcagctgcaagggctgctgagataagcaggaagttgaaagcggagggctttggtggggaaactgtcgaagagaaggatgccagagggaagtcaaggtcgccatcaccttctgcccgtagatcgaaatctcggtcaagatcacctatcaagtaccgccggagcaggcggtctagatcatactctccgccggttagacacacacgagggcgtagatcacgatcaccatcaagatcttaccactcaaagtatggtagtgatcgatcttatcgggatgatagagacaagtatggcaggtctgggagaagagagagcgaccgatctcgtgaccactattcatctagctcaagaagaaacagaagtagaagtataagtccaaggcataagaagtcctccagatctgattctcggtcacccaagcgacacagagaagaaagtttaagcccttcgaaatcacggaggtcagctcgagctggttcaaggtcaccaggacagcacaaaggaagcaaattgtcgccaactcgtgaccatcattcttctcgccgtagtaggcgttctagatccagatctcaagagaagaatcgcaacagtgataaaaaggacagcaaaaaatctgagatggaggataaaaaaaggagatctgatagaggcaatagaggtgacaaagatgaaaagtatctaaaggatccaatggaagataagaaactagatgtgtcttctgttgctcataaaaggagttcatccgcatcagaagatgaaatgctgaatagtaattccaagagatctaaacatgatgctgctttggagtgtcatgagaggaaggatgaggatcatattgaggaggacagaagggatttggattctgtgggatcaaaatctgagaagagaagcctaggaaatggtgatcatgaaaaacaaaatcatgatacaaataggaaaacagacaagagtcatgacagggatgattcttctcgtaaggacagaaaatacagagaggatgaatcaagacattctagagatagatgttcccgtcattcatcttcaagatcccatagaagttcaaggcattcaagggaaaagtatcatggagataccactgatcagcataaatcaaagaaatcagaagagggttccaagtctaggaaggatgattgtctccttgatgataccttgtcttcagatagaaggaaagttcagagcgaggactctcctcgtaggaagcataaccagttagcagctagttcagatgttcatggcatcaaccatgatactggagttaaggtgccaaatgatttctcagaagctgatcagggtatccaggaagccaagcaggtcgttcatgaaactgatatgtcctctgcaccacgccttgaggacccatttcttgcacaagacaaacaagataaacctattgttgctggccttaatgggctacatgaacctggagttgatggtgcatttgtgggcactgaagagtctgctatatgatattaaccagagtgtttacttgatggttgctatatcattgagttggctgatcacaggatctacttgatcagtggatgcagatagatgaattggtgtttgttatcttcctttctgatttaggagttttatttgcaggatatgaagaacatggagaacttgagtgctgatcgaagtgttcatctgatctataaaaatgtactcattaactcttcagatggagattttttctgtggagtaaacttctagatgtaacgctggagcttgtgaggtgatttagtactgtgaggtcaaaccaaccatatatttgtcgttgcaggcttgtggttccatgaagagttggagctcattctggggtgtcaattgaagatacaagggaggtcacacttttccgtactcaagtaaagtccattatacaaggctatataaaccacttctcttgtaggctgtgatacatttcaattggcatgctttggctagtgcaatgatccaaagatgtttctacatgtaaacatcctttgattaagttgacatgctccctgtatttgttatgcgtatgatttgcattatgtctgcatcagtaatggttgaaaagatctatagcttaatacgt

SEQ ID NO: 17804 - DNA, 1060 bp, Oryza sativa
  Clone ID: PAT_MRT4530_23421C.1
agcagcaagtgataccaggaaattcaactgctggcacagcatagatcatacatgcacatacagaattctcgaaaacatgctcacacaactactgattgccccggaacaacaaatcaactatacatacattgatacatcagtaattagtttgaccacacatcagcacaagctgcacaaaagaagcaaggaaattgattcctcagaactgcggtggtatatataggtcatgtagatatttcatattttaccaaaaagtttcaagtttttgcctcaaggatccagcatcctcacatcatgcttcttgcgcctacaacggtgatggctcttctgctccccaaaattattgtcaccaacaatccccatcttattcatatctgctatacaatctccgatttcctcgccccagaagaacagctgctgccttccgtcctcttcctcctcgtcgatctcatccccgtacccaagctccacatctccccggtatcccggctcgctaccatagccggaatccgccgcagccacctccgctgcggcgcccgtcccaccagaccccgatccagccccaccaacgggcgcggcggggccgaactccgtcgccatggggacgtccctcatccgcacctccccgacgtccgaggcccacatctcgccgctggagtcggtggcgccgccgccaccggcgccgcacgtgacgtggaagtcggagcaggtgccggatctacggcggtcgctgctgcggccggacaccgaccgcgaccccgcgccgcggcggcggcgcttgcgtggcccgagccaccggaacgacccgccgccgccgccgccgctggcggagaggggaggtgtcggggtctgggtctgggtctccggggcgtcggcgaagtgggcggaggggggagcggtggatcggtcggagaggcagggcttcttgtggaaggggtgccaggaggcgacgacctcggcgaggtagaggtgcggcgggtggtggcgcatcgacggcgcgcgaggggtcatcggcgacgacgggggaggggaagcatcggggttagggcggacgcgtggg

SEQ ID NO: 17805 - DNA, 2658 bp, Oryza sativa
  unsure (1)..(2658): unsure at all n locations
  Clone ID: PAT_MRT4530_23422C.1
gagaaggagaggagcggagcgccatcagccgtccgatcgagtgatccgatggctctcgctctctccacctctgctgctgctgcggctgccgccgcggcgcgggcgctcgcggcgagggtgacgacgacgaggggttacgccgcgtcggcggcgtcgtcggcgatgaggcgggcggcggcggcggtggaagggaagggcgctgcggngttactgcaaattgaacgtgaatgacaggattattcctagtgctactccgaaggcgagggctaacagcttgcaagtcccatcacaggtgtctgacgtccgaggcgctggcgaagaagtcatgtcgaaacgcaggacgcagtcgtcgctcaccacgacgccgacgccctctccctgctcctcccgacgtgcctcccggaagcatctcggtatctctcgcgccgcgccctccaggcactgcacgcagtccgccggcgcgacgcccgcggcgcactgcgccaccacgcgcccggccagccccgtcctcgtcgtggctgctccgacgtcgatcgccagcatccgcgccgccacgccgttgctcatgtcgaggaacgtcgcgtacaggttgtcgctgaacggcaggacgtctccggtgacgacccaccggtggaactcgccccccgctgggctgggcgacatcgtcgtgttggtgtcggcggcgtaggcggcgaggtagctgcggtagcacccgtcgagccaggcgccggcgcgggcgccgcagcccgcgacgacgtccgcgacggcggcggcgaggctctcgcggtacagcgccggcgtagagtcgccgaggcagacgctgagagcgagcgcgcggtcgccgccgccggcctgcgtggaggcgaacctcgtcgcggcggcctgggcggggaggtcgtcggtgggcagcgcgaggaggttcgcgcggaacgccgtgccgttgctgctgttggacgtcggcgccggcgaacagtcgatctgtgggaagtacctggctccggtggccgtcgacgtcacgcagacgagaaggaggcaagaaagcttggtgagcgccatgagcgatggattgcacgacaccaaggtcgccaggccggatacgaacacagcaaaatccagggcggcctcgccatctcgtcggacggcgccgcagttgccaccggggtgtccgacgagcagggaggcgcctagcacacttccagataaatcaacaaatgtgtcgccggaggcagaagcgatcgaagcaagggagtgggggagggagaggggaggggcgggggacagatccaccgccgccgctgtcgccacgacgacctccatggcaactacggcctcctgcgccgcaaaggtgtagaagccatccgctcctgccgccggccgcccgttagcgccgtattgtccactcccgccgctcccaccgtcggcggcgcgccgtccactacagccgcccccacagctccgggccagccgccgcgcgaggccaactccctgccctgccgcgacctgtggaggccgccgaggcactgccctgccgagcgcgtggaggcggacggccgctgggcctgacggcgcggtggtgtagacggccggccgcccagcctgagcccggcgcgtggaggaggggacatcctggaggaggcagcgcgacgtctggaccggcagctggccgcgggccgcctccacgctcctccggccgtggcggcacggcagggcctggccccggcctagcgcggagatcgcatgattattgctagcgctgctgctccaacggcgagggcaaacggacggagagctcctccaccaaggcttgccgccggagaggccaggtgcatggtgaacttggagcacgcagtcgtagctcagcgcgacagcgacgctctctcccagcccccatgcgttccagcagcatctcggcatcgctcgcgccgagtcctgcaggcactgcacgcagtccgccggcgcgcggcccgccgcgcactgcgccagcacgctccccgccagccccgtgttggcgccgtcgtcgaactcctgcgtcgccgccagcatcgtccgccccgaccccgaccggttcgcggcggcggcggcgagcgccgacacggcgccgttggccaggtcgaggaacgtcgggtccaggttgtcgctgaacggcaggatgtcgccgtcgaagaaccaccggtggaacgcgctctcgcggggcgaggtcgcgtcggtgtcggcgtaggcgaggtagcacccgctgagccacgcgccggcgcggcgggtgtccgcgccgcagccttcggcgacgtcgatgacggcggcagcgaggcagtcgcggcactgcgacggcgtggagtcgccgaggcaggagccgcgagcgaacgcgcggtcgtcgtcgtcgccgccaggcgcccgtccgccggcgccggcctgcatggaggcgaaacccgtcggcgcggcctggtcggggaggctggcgagcagcgtgaggaggttggcgcggaacgcggtgccgttgctgccagtggacgtcgccatcggtgccggggagcagtcgatctgagggaagtagccggtcgtgtagagctgagtaccgcgggctacaatggcgctcgcgccgccgacgacgacgaggaggagctgggcgacgaggaggagggaggaaagctttctgagcgccat

SEQ ID NO: 17806 - DNA, 538 bp, Oryza sativa
  Clone ID: PAT_MRT4530_23423C.1
cggcgggctcctccatctctctcttcgcgctcgcttctcctcctctagttactttccctcgagtgatgatgatggtcgtcgagatgggacagatccagaaatgcgagaacacttgtacaacacctacgattacagggacgtctcccttgcgccacagaccaccgatctcctcaccaagaattgtcttctcaccgagaaatactggagtgcgataccatcgcaacagagacgacgggtgaggtgcactaggcgatgcatcggtcgcattctcacatcatgatgttacgccggacgcctctacttccaataaaaggaagagggatccacggctgcaacatcgcagatgcatgacgagcgactgccccctccacgcggcgatggcggcgactacggggtgaaatgtgccaaatcactagcccctttacatctcttaaaggctactcacgatactgctaatttacttacggttgccatgaggaaatctaagtgatgttggtggtgtacaccttgtgtccgtgagaatgcccgagtaggaact

SEQ ID NO: 17807 - DNA, 702 bp, Oryza sativa
  Clone ID: PAT_MRT4530_23424C.1
atggcgctcaccaagctttcctgcctcctcgtcgtcgttttcctcgccggcgtgacgtcgacggccaccggagccaggtacttcccacagaacggcacggcgttccgcgagaacatcctcgtgctgcccaccgacctccccgcccaggccgctgcgacgaggttcgcctccacgcaggccggcgacggcgacgaccgcgcgctcgctctcagcgtctgcctcggcgactctgcgccggcgcagtaccgcgagagcctcgccgccgcagtcgcggacgtcgtcgcaggctgcggcgccgccagccgccgcgccggcgcctggctcgacggcgacaacctgtacgcgacgttcctcgacatgagcaacggcgtggcggcgcggatgctggcgacgacggcgacgcaggcgatcgacgtcggagcagccacgacgacggggctggcggggcgcgtggtggcgcagtgcgccgcgggcgtcgcgccggcggactgcgtgcagtgcctggagggcgcggcgcgagagatgccgagatgcttccgggaggcacgtcgggaggagcagggagagggcgtcggcatcgtggtgagcgacgactgcgtcctgcgtttcgacatgacttcttcgccggcgcctcggacgtcaaacacctgtgatgggacttgcaagctgttagccttcgccttcggagcagcactagaatga

SEQ ID NO: 17808 - DNA, 2954 bp, Oryza sativa
  Clone ID: PAT_MRT4530_23425C.1
gggcatatattcagctagctgagcatagcattgcaaatcacaaagaagcacacaaccggctagaatagtgtcactgaaagcactagaaacatggtactactaagttgctaacatcaggcaaccattctacccccccagacagacattatttgtaccactccaagcaccatgactccatcaagctgctatagcgaaggttactgcaaattgaacgtgaatgacaggattattcctagtgctactccgaaggcgagggctaacagcttgcaagtcccatcacaggtgtctgacgtccgaggcgctggcgaagaagtcatgtcgaaacgcaggacgcagtcgtcgctcaccacgacgccgacgccctctccctgctcctcccgacgtgcctcccggaagcatctcggtatctctcgcgccgcgccctccaggcactgcacgcagtccgccggcgcgacgcccgcggcgcactgcgccaccacgcgcccggccagccccgtcctcgtcgtggctgctccgacgtcgatcgccagcatccgcgccgccacgccgttgctcatgtcgaggaacgtcgcgtacaggttgtcgctgaacggcaggacgtctccggtgacgacccaccggtggaactcgccccccgctgggctgggcgacatcgtcgtgttggtgtcggcggcgtaggcggcgaggtagctgcggtagcacccgtcgagccaggcgccggcgcgggcgccgcagcccgcgacgacgtccgcgacggcggcggcgaggctctcgcggtacagcgccggcgtagagtcgccgaggcagacgctgagagcgagcgcgcggtcgccgccgccggcctgcgtggaggcgaacctcgtcgcggcggcctgggcggggaggtcgtcggtgggcagcgcgaggaggttcgcgcggaacgccgtgccgttgctgctgttggacgtcggcgccggcgaacagtcgatctgtgggaagtacctggctccggtggccgtcgacgtcacgcagacgagaaggaggcaagaaagcttggtgagcgccatgagcgatggattgcacgacaccaaggtcgccaggccggatacgaacacagcaaaatccagggcggcctcgccatctcgtcggacggcgccgcagttgccaccggggtgtccgacgagcagggaggcgcctagcacacttccagataaatcaacaaatgtgtcgccggaggcagaagcgatcgaagcaagggagtgggggagggagaggggaggggcggcggacagatccaccgccgccgctgtcgccacgacgacctccatggcgacgacggcctcctgcgccgcagaggtgtagaagccgtccgctcctgccgccggccgcccgtcggcgccgtcttgtccactcccgctgctcccaccgtcggcgtcgcgccgtccactacagccgcccccaccgctcccgagtccgagcgagaggaggagcgggcggagcgggcggcgcggtcgacggcgaggcgaggcgcacggcggcggtgtccccggcgtctcgtccactcccgccgctcccaccgtcggcggcgcgccgtccactacagccgcccccacagctcctgagtccgagcgggaggaggagcgagcggcgtaggcagcgcgggcggagcgggcggcgcggtcgatggcgaggcgaggcgcacggcggcggtgtccccggcgtccgccgcgagggaggagagggaggagaaggcgaggcgaaggaggagacgtgcgggccagccgccgcgcgaggccaactccctgccctgccgcgacctgtggaggccgccgaggcactgccctgccgagcgcgtggaggcggacggccgctgggcctgacggcgcggtggtgtagacggccggccgcccagcctgagcccggcgcgtggaggaggggacatcctggaggaggcagcgcgacgtctggaccggcagctggccgcgggccgcctccacgctcctccggccgtggcggcacggcagggcctggccccggcctagcgcggagatcgcatgattattgctagcgctgctgctccaacggcgagggcaaacggacggagagctcctccaccaaggcttgccgccggagaggccaggtgcatggtgaacttggagcacgcagtcgtagctcagcgcgacagcgacgctctctcccagcccccatgcgttccagcagcatctcggcatcgctcgcgccgagtcctgcaggcactgcacgcagtccgccggcgcgcggcccgccgcgcactgcgccagcacgctccccgccagccccgtgttggcgccgtcgtcgaactcctgcgtcgccgccagcatcgtccgccccgaccccgaccggttcgcggcggcggcggcgagcgccgacacggcgccgttggccaggtcgaggaacgtcgggtccaggttgtcgctgaacggcaggatgtcgccgtcgaagaaccaccggtggaacgcgctctcgcggggcgaggtcgcgtcggtgtcggcgtaggcgaggtagcacccgctgagccacgcgccggcgcggcgggtgtccgcgccgcagccttcggcgacgtcgatgacggcggcagcgaggcagtcgcggcactgcgacggcgtggagtcgccgaggcaggagccgcgagcgaacgcgcggtcgtcgtcgtcgccgccaggcgcccgtccgccggcgccggcctgcatggaggcgaaacccgtcggcgcggcctggtcggggaggctggcgagcagcgtgaggaggttggcgcggaacgcggtgccgttgctgccagtggacgtcgccatcggtgccggggagcagtcgatctgagggaagtagccggtcgtgtagagctgagtaccgcgggctacaatggcgctcgcgccgccgacgacgacgaggaggagctgggcgacgaggaggagggaggaaagctttctgagcgccat

SEQ ID NO: 17809 - DNA, 233 bp, Oryza sativa
  Clone ID: PAT_MRT4530_23426C.1
atttgatctgtgtgatctgagtgagcgagtgacactcctctgcaggagggatcttggcttggctcgattcggtggcatgagcaggactttgcggcaaggtactccaccaccacccacaacaaggccatgatccaccaacaccacaaaaccaacaccaccccgacgagctcaccgactcctgcaagcgacaacaactcacccgaacttctacaacgcctactccggaaaccaca

SEQ ID NO: 17810 - DNA, 320 bp, Oryza sativa
  unsure (1)..(320): unsure at all n locations
  Clone ID: PAT_MRT4530_23427C.1
ggggggtgggtgtttttttttttttttttttttttttggtgttagggcaattaaagttaaacagttgcccaagttctcttttttgatttcaacgaaaaaatggcgagccgcttgatattttccatgggtttcggtagggtcggggccatccatttggggccttgcaagggccctcactgggtctgacanaatcatcnanttgntccctccttcaatgagaaatggtggtcatcacacggtgccaagaccagctgctaatggatgattaacacgttggccttccttggtgccccgccgtttgcacccttgtcttggggggg

SEQ ID NO: 17811 - DNA, 294 bp, Oryza sativa
  Clone ID: PAT_MRT4530_23428C.1
cccatcgttcgtagacgcgtgtgcgtaccattttctcacctttacaaatctctgtgaggggggagctttacttctcctctctcaccatcccatttctctgttcttatcattaccatcattaaatcttgttcaacggttctttcaccaacaatgatacccttataaatatacacctctaaatcattttaggcgataaacatttttacatttctactcatcttctattgaacttgttcctatttattcactacctatttaacaccatttaattgcctattttccaacatatatata

SEQ ID NO: 17812 - DNA, 171 bp, Oryza sativa
  Clone ID: PAT_MRT4530_23429C.1
agagagagaaattatatgttttagaatgtaaggactgatgaggtcaccggatacatggtagaacacggtctgtaaaaaaaaacacaggcaatcaaacagaatcagggaactgttcaccttcatttgtttttgtggccaatgatcgattgatggaagcataatctaaacatt

SEQ ID NO: 17813 - DNA, 450 bp, Oryza sativa
  Clone ID: PAT_MRT4530_2342C.1
ttgatgaggaagatgacaaggtcactttcatgcacggggactgtgccacgtgtcctcctgctgccacgcgtacctcctcttcactctccagcagctcagctagtcagctctacagcgaaacggtgaaccttcgaccgagtctgctccattccctatcgtccacagcctctgatgaattcaacatccaaataccatcgcgactaccccttcttgccggccgcggcctccagctccgacggcgacggcgacggcgatggcttctacatcggcgagccaagaaacccagccgccggagctgactccaccgatgtcttcctgttcctcgccgttccggcagggtggctcgtcaggctggccgccttcgtcggcgagctcgtcgcctctgccatcctcggcctcgtctaccccgtcgccgctctcatcggctggctgcgcgccgtgccagcggcc

SEQ ID NO: 17814 - DNA, 607 bp, Oryza sativa
  Clone ID: PAT_MRT4530_23430C.1
cggacgcgtgggacaaaatccaggacaggccattgcgccggcctgctgctccccgaggatttttgtttgattatttgctgcctccagtgggttgggtgttcttggggggctctgtttcccggggtggtgcttgttggtgagcgtggtgttctccggcggcaatgaggggcagccatgtctgctccctggtttcctccctcgttttcctgtggctgggggttgctgctgcgcagaaggcctcttcttggaagacgctgagcggcaatgctccggcaatcatagccaagggaggattttcaggcatattccccgattcaagcgaatttgcgtaccagtttgcgctcattgctagttcgccagatacaatcctatactgtgatgttcggttgaccaaggatggtcttggtatctgcctgccggacataaagatggacaactgtaccaatattccagatttctatcaacagggtaggaagagctaccttgtcaatggcgtgtcgacggcgggatggttctccgttgattacaatggcaccgcgcttggccaagggtttttgaagcaatcaatcttttctcgctcgcctgggtttgatcccagcttctttcc

SEQ ID NO: 17815 - DNA, 1033 bp, Oryza sativa
  unsure (1)..(1033): unsure at all n locations
  Clone ID: PAT_MRT4530_23431C.1
ttttgtgtttttttttttttttgggttttttttttttttggggggggaaggtcttacagcggttttacaagggtggtcgactgaacttaaaaagcccaagcagtttgtatctttaataattactaacaccgggtacacaaacaagcgaaactaaattaatcaagggggtacatacatacatacaacaaatcccaccggtttgattaacaacagtaacggggatgataatttaagctggaaacaacaaatcatgcacctggctgactggaaccccccacccttttttacacacactcccttacatgcaaacgatatgaccaagtccaaccaggccagcagcagcagagcagccatggccatctaaggtcagtgctggggttgctccggaaggagcccagcgccttgatggctgccgcccggaggatgtactggtgatacgccgccgccgccagcgctccgatgaacggcnccgcccagaagatccagtggtcgtcccatgccttcttctggttgtagatgacggcgttgtactggtgcttcatgatgcccttcacgatgcccacgcccacgatgccgcccaggcactgcgccacgatgtacatcaccgcgcgaatcaccgacaccttcctcgccagcagcagcccgaacgtcaccgcggggttaatgtgccctccggagatgccggcggtgcagtagacgaggatgaagatcatgccaccgaaggcccaggcgatgccgagggtgccgacgccgccgcactggtcggcggacgactgcaccttgtacccaatgacggtggcgacggtgatgtataggaacaggagcgtggcgatgaactccgcaatgagcgcccggtagaaggaccacagccggagctcgccgacgtcgaacagcggcgccggcggcgggtcggtgtagtccttgggccgcacgtgctccggctcctcgctcacctccttcgacattgccgctcccttcagcaagctcaacacgctactcactctgagctagcttagctctgctctctcttctc

SEQ ID NO: 17816 - DNA, 1405 bp, Oryza sativa
  Clone ID: PAT_MRT4530_23432C.1
tccttcttctgcatgattctgcactcgggctggttttttttttttttttttttttttttttgcaatccaacagcaacaaaagcagatggcaattggtggtggaagttcttacagcggttttacaagggtggtcgactgaacttaaaaagccgaagcagtttgtatctctaataattactaacaccggttacacaaacaagcgaaactaaattaatcaaggtagtacatacatacatacaacaaatcccaccggtttgattaacaacagtaacggtgatgataatttaagctggaaacaacaaatcatgcacctggctgactggcaccccccaccctctctcacacacactccctcacatgcaaacgatatgaccaagtccaaccaggccagcagcagcagagcagccatggccatctaagctcagttgctggggttgctccggaaggagcccagcgccttgatggctgccgcccggaggatgtactggtgatacgccgccgccgccagcgctccgatgaacggccccgcccagaagatccagtggtcgtcccatgccttcttctggttgtagatgacggcggcgccgatgctccgggcagggttgatgcccgtgccggtgatggggatggtggccaggtgcaccatgaacacggcgaacccgatgggcagcggcgcgagcaccgggacgtgggagtcgcgggcattgcgctttgggtcggtggcggagaagacggtgtagacgaggacgaaggtgccgatgatttcggcgccgagggcggtgccggtggagtagccgctggccaccatgttggcgccgccgccgttggcgttgtactggtgcttcatgatgcccttcacgatgcccacgcccacgatgccgcccaggcactgcgccacgatgtacatcaccgcgcgaatcaccgacaccttcctcgccagcagcagcccgaacgtcaccgcggggttaatgtgccctccggagatgccggcggtgcagtagacgaggatgaagatcatgccaccgaaggcccaggcgatgccgagggtgccgacgccgccgcactggtcggcggacgactgcaccttgtacccaatgacggtggcgacggtgatgtataggaacaggagcgtggcgatgaactccgcaatgagcgcccggtagaaggaccacagccggagctcgccgacgtcgaacagcggcgccggcggcgggtcggtgtagtccttgggccgcacgtgctccggctcctcgctcacctccttcgacattgccgctcccttcagcaagctcaacacgctactcactctgagctagcttagctctgctctctcttctctacctctctcttctctgccggctgcctcggcccggggagcgagggactggccggcctcgtgcagagc

SEQ ID NO: 17817 - DNA, 235 bp, Oryza sativa
  unsure (1)..(235): unsure at all n locations
  Clone ID: PAT_MRT4530_23433C.1
cccacgcgtccgaaaaaaagttgcaggtggaggaggcgctagcaggcacatgcctgatccgcgagcgtgcgctatagctacggctggcaatgcaccgtcgaaggaaaagcataaccaaatccggaagatgtagaaagaaattaaggaattgaagttacaagcgtaatttatctaattatagccttgaggggggggttnagnttgntgaaaataaccatcaacatgtttcaaagca

SEQ ID NO: 17818 - DNA, 2431 bp, Oryza sativa
  Clone ID: PAT_MRT4530_23434C.1
atggcgtcggagatcgaggtgctcgaggacaccaccgccgccgccgccgccccggccgccaccatcggaggcggagaggtcgcgggcgcgggcgcgggggaggagggggaggcggcggcggatgcggaggcgctcaaggacgacgtgtacacgggcgcggcgtacggggacctcgagaagctgcaccgcctcgtggagcgggagggccggccggtgacggagcccgacgccctcggctaccacgcgctccagtgggccgccctcaacaaccgcgtcgccgccgcccagtacatcctcgagtatgtcctatccttttcagttgtttgctttggtgggatgacggttctcagcttgttgtctggacagcatggagcagatgtaaatgctatagaccatacagggcaaacagcactccactggagtgcggtacgtggtcatattcaagttgcagaactacttctgaaagaaggagctaaggtggatgccgctgatttatatggatatcagactacacatgttgcagcacagtatggtcaaacatcatatctttatcatattgttgcaaaatggaatgctgatcctgatgtccctgataatgatggaagaagtcctctccactgggctgcttataaaggatttgcagattctctcaaatgcttttcattaggttgcactcctttgcattgggctgctatccgcgggaatttggagtcatgcactgtgctggttcaggctggtaaaaaggaggatcttatggtgcaagacaataccggcttaactccagcccaacttgctgctgataaaaatcatcggcaagttgcctttttccttgggaatgctagaagagtacatgagagaggatgtgttatctcaggacaatatagcagtaatatgacattactatttgggttattttcatggttgggaattttccttgctactgccggattggttatgttctataagtgtagcagaaaagatcctggctacattgacaagaatacaagagatgcccaaaatcaaagagatgatgaacctttgttgaagaggggtctagacaaccctgaacttctggctggcaattggtctcagctatgtataacctgcaaaattgttaggcctgtacgctcaaaacattgctctacatgcgatcgctgtgttgagcaatttgaccatcactgcccttgggtgtctaattgcattggaaagaagaacaaatgggaattttttatgttcctgatcctagaagtttctgcaatgattattactggtgtgacggccgtcataagagtagtaggagacccagattctcctgcatcatttggtggatggcttaattattcagccactaaccatccttgggtggtgtcttttgttgtgatggatctctttcttttctttggcgttataactctaactgtagttcaagcatcacagatatccaggaatttaacaacaaatgagatggcaaatgccatgaggtatagttatctcagaggcccaggtggccgattcagaaatccatttgaccatggggtgcgtaaaaactgttctgacttcttgctgaaagggtacaatgaggatattgagagggtagaacagacattacaacctgatgaggaattgggaatgattcaaatgacaagaagtgcagtctcacagaatggcgagagcatgtcacttcatgctaatggcacagaccatggttgtgctgatccacaagggaactcaaaatcccatcgtcactcgcacggttcatcacaatgttgcagtcacagtaagagacctgacaagacccccttggggctaggattgggccttggtcgtaacaacccatctagccgctacacacgttcacttccttccattcattcggagagtagtgcttatttgcccttgtgattcttttggagaaggcgagctagatcgtatttcaacttgtaggtgtttattgcacaaccacagctttcttttggctatttcttcctgcagtatttgtcgcttggatctggtctcatcgacattgccagggtgtggtatatttggaggcccaatcaaccgactactgaaattgagaatatgaaggagatgcaagttttatgaaggcttcatgaacatccttagcctctcaggaacaccagcgaatgtctgtctaggcgtagcaatattttttgtgcaaaagtgcatctttgtacaatgtctcaacattttgtatgtacaagagggttagctgtccagatactatgatgttttcaagtacagctgtatattggaagaactgtaaatttatatagcgaaaccaaatgctggcaaatgtttgtttctctccattttaattttggcaacattagagtatagtcttggaggacttgcattgtcagcttgatcacaacttgtctttcaaacgtaacttagctatgaccgtatggat

SEQ ID NO: 17819 - DNA, 201 bp, Oryza sativa
  Clone ID: PAT_MRT4530_23435C.1
ggacgaatactgtaggaaaataaacagccaaaagatgtggatgtcaatgacatgagacggatgatagcattgactaggctgtaaaccaagtgaggacaggatctcttatatatagaaattcaggccggcatgtctagcatatattgcatgtgaccagcatagcaagtggcataagctaagcagatcgaacgactatacact

SEQ ID NO: 17820 - DNA, 812 bp, Oryza sativa
  Clone ID: PAT_MRT4530_23436C.1
acctgaatgagctccagcataacaatcagattgcgagggagtatgtaataggaacagtgcttgccattgactgtgctagcgatttacttcttattcagagcacaagagtccactttatgttgcgctgtgggatgcctcaccccccattacctattgcttctcagtttcccaaacctctcagtaaggttgtcatggtctcttggccacatcctacgaggaatcggactgcagtcactggagagatctcacacccgggtcgacagtttgatgagttaagcccagtgaatcctttgggttttacaacgatgctgtctgaggttcaaattcgatcagaacaaggaagctccggggggcctttgctgaatggtcaggttcaagttacgggcctcttgcatggtggcaatggcagtttttcattcttcatttctcttccgaatggggattccttgtatgatttgctggccctgattcaacattgctccgccccctttacctctttctggatgctgtgtgtatgggtgaacatgctgcgacttttttgagatagttgcaacttgctctacgtttgcgatgatctatgaatttttggtagaacctactttacctgtctgttcctggtaaagatgagaattttgtacctaagatattttccttaagctcaaagattcctggtcctgtttgaaaatgatcggatacggttatatcttaaagatgagaattttgtatctaagatattttccttaagctcaaagattccttttcctgtttgaaaatgaagatacggttatatttgccaaaaaaaaaaaaaaaaa

SEQ ID NO: 17821 - DNA, 250 bp, Oryza sativa
  Clone ID: PAT_MRT4530_23437C.1
acagcagtccggggatgacccgcgtgaggtctgaccagggcgaggcagtacgcaggcagcagtctgccgtcagatgtgccgggttgagcacaccagcagtgcagcatcttcccgccggccagtactaggctagctggctgtgcctcatagctagtaggatcacaccgttgctgtgttgcatgcaaccgagatagtgatcaaaacaataatgaataatgaaatgttttgaaaacaaaaaaaaaaaaaaaaa

SEQ ID NO: 17822 - DNA, 345 bp, Oryza sativa
  unsure (1)..(345): unsure at all n locations
  Clone ID: PAT_MRT4530_23438C.1
gcacgaggcggagcgcagcgcgcgggtgacggcgtcggcggaggccgaggcgtcggacgccgtcctgctgctgctgctgctgaagagaagagaggtgataccaagcttggtcttcttcttcttcctattcaccatggctagctnatgtattgatatggatgggatcagacaagctagaattcagatggaccgtccggagttcctgagaagctaataagttagctcgtgtgagaccgatcgatgtagctcgggagagaaagaggattttaggcacatatatgtgcaggtagtaggagtgcactaccatatatatgcatatatatttaactaagcacactatagacg

SEQ ID NO: 17823 - DNA, 489 bp, Oryza sativa
  Clone ID: PAT_MRT4530_23439C.1
gggtgtgtcttgttaagaacgggggttgtactcagtattgctcaatttttcccaaacccagaagagaagttcctgaagaatgaaggttttggtgtctagctcgtgcctgccgtcaagcgcctgtggtcgtcgccatagtcttccgctgtttctcgtttgtctctgtgtgtgctgggccttgcatcctgggacaaggattaatgcacgcacgtaaggaacgcccgttgggttatttctggtcgtaacacctgctcccggccacgcttacgtgaccgcctccgggcgcgcggtgtgaccgccgggtggggcccggccgtcagccgcccgtgccctcgggtgcagctgacgcgtggggcccacggcgccggtcggtgtgagcccgggtgtgtccggtccaccgtggaccacgctgcagcttcagaagatccgctcttcgtggaggttgaagccgacgtttgggaaagcgagcaaggtaagtcacatcatcct

SEQ ID NO: 17824 - DNA, 390 bp, Oryza sativa
  Clone ID: PAT_MRT4530_2343C.1
cttcaacaactccaaatatttcggtttagacgagttggacaacagttgcgtttgtcgtcgccgactattttcttcatcttcatgattggagttggtacaatgcatcttaaaaggtgtcaaacagtaaagctttatatagctgccccgctgactttttaatatagtcatggtgctgtttgggtttttaagcaattgattggatacaatatcgttgcttttcgccacccctccacagtcttcagatttggtaaaagtactcgggagatcatggcaaagatgattgaagcactcggctttggagtaatctggttcgagagaagattatcttttcgactgcgaaggtctcaggggctactgtggatattatgggtaccccatacccatacggca

SEQ ID NO: 17825 - DNA, 126 bp, Oryza sativa
  Clone ID: PAT_MRT4530_23440C.1
ttgctccccacacaaaggtagcgaccgagcggggggggacttgaacaccctgtggatttacacacgatggcccccgctaggcgctggcaccaccgaagatccaatgatgaatgccagcggactcac

SEQ ID NO: 17826 - DNA, 1177 bp, Oryza sativa
  Clone ID: PAT_MRT4530_23441C.1
aagcaaagtgcagcttaattaattattggctaggtacatgcctattgtggcgatgaaaaatgcatagtggatcgagtataatgcattatagcagtggtgatttgatatatatagtaggagtagggcgggtatgtaggtcaggtggatctatctatcgggttcgaaagcggtgcagtccaatcttgcggcctgtgctcctgacgtcctccatgatctgcttcctgtactcgccgaaggtgaagctccggtaatgggcatcgtcgtcgtggacatggctgctgcttgggatgatgagcgtgtggtaggaggggcagaggaagaaggccatggagaagcgctccagcgtggcgttggccatcaccctgtgctccacgctcttgtacacatcgttgctccacgcctgcaggaggtcgccgacgttgacgatgagggtgctggggctgggcttcacggccacccacctgccgcccttgagcagctggaggccgccgacggtgtcctgctgctggtgcacgatggtgagcaagtcgctgtccgtgtgcgggcacagcccgaagccccccatggccatggcgcacggtgggtaccggttcagccgcaggaagcacgtctcctcccgcgtcgtcaccatcgtctcgccctcgccggcgcccggcagccctctcatcaggatctctgccagcttctgcgccagctcgtacatcgccctcgacacctcctcgatcaccgccctggccctgatgctcgtgctgggcctgggcgtcgtcattgggatgtgataggcctccgaccacgacagctgctccaggcacttggccgtcggcgttccccaccggtagctctccggcgagaagccgagcagcctctcggtcaccttctcctggaagggccgccggaacacggccacctgtgcgtcgtgcagctcgcgcagcagcgcctgcggcacgccgtggttggtcacctggaagaagccccattccgacgccgcacgcaccatgtctgcgcggcacacctgctccgcctccatgagccccgcgaggtcgatcacagggagctcgcactcgtcgacgtcgatggcgcccatgtccatgtccaggcggtgctgctccacgaacaggtgcttgtacgtgctcatcaacggcgggttcgagttggagtcgtagtcgtgctcctccat

SEQ ID NO: 17827 - DNA, 240 bp, Oryza sativa
  Clone ID: PAT_MRT4530_23442C.1
atggcgccggtggccacgacggaggacgaggacgaggaggggccggttggacttgatcgtggtgtcgccggcggatgcggagcccaagttcatggtgttgttcgctgttacaacgtcaagacgtcaatcgccagcgctttctcctccactgcttccgactccgaccggtgggactgggattggctacacgcagtgatggcaacacagcagaagcggcagcgtgccatggcagcaccgtag

SEQ ID NO: 17828 - DNA, 1470 bp, Oryza sativa
  Clone ID: PAT_MRT4530_23443C.1
atgagggtatccgttctagtgaatgcaaccttaaggaataacctcaaaaagttatatgatgatcattttagaatagaggaaataattgaccagaaaataagagaggaatttaaatttccaactccaaaatgtctagatcgcttctcagacgttggatggaataacagcatagagcccaacccattagtcaccgggtgtgcttttaaaaagatttttgtgaagatagaaattgatggcttggagctcacacgtaagcaaggtccggtgaattctgagagagatgaaggtgcggagctgtactgtgagaggaagaaaagagtgaagtggcatcagctgtggccatcaagtgccaaggatatgaaggttgttccagtgccgcgtgcaagagcagctccaagaaggcacatatggataccagtgattctaattcttgttgccgtcaccgtgctatggatttacttataccctccacaggattatacctatcctgttagggattggtatcctgttagggactggtttcctgcagaacctgcccgggaactgaccgatgaggagactgccgctcgagttgtctttagacaaatcctctcaacgcctccattcccatccaggaaccccaaaatcgctttcatgttcttgactcctggcaagttgccatttgagaaattatgggagttattttttaagggccatgaagggaggtacactatatatgttcatgcttcacgtgagaaacccgaacatgtcagtcctgtatttgttggccgagacatacacagtgataaggtaggatggggcatgatttctatggttgatgcagagaggaggttgctggcaaaggccctagaagatacggacaaccaactatttgttttgctttctgacagttgtgttcccctacacaattttgactatgtgtacgacttcttgatgggatcaagacacagttttcttgactgctttgatgatcctgggccacatggagtatttagatactcgaagcatatgttgccagaagttcgagagattgattttagaaagggctcgcagtggttcgcaatcaagaggcaacatgcaatggtggtggttgcggatagtctgtattacacaaaattcaggcgtttctgcaagtgtttttttctcctttcgcagccaggaatggaagagggtcgcaattgttatgcagatgagcattacttgccaacactattccttatgatggaccctgctggaattgctaattggtctgtgacttatgttgattggtctgagggaaagtggcatcccaggtctttccgagctaaggatgtaacttatgaactcctcaagaatatgacaaaagagctcttgcagaggccttgcttgtggaatggactaaagagaccatgctacttgtttgcaaggaagttctacccagaaactttgaacaatctcatgtacttattctctaactacaccattttctaa

SEQ ID NO: 17829 - DNA, 693 bp, Oryza sativa
  Clone ID: PAT_MRT4530_23444C.1
gttatccctctgtagaatacaagcatacaggatgaatagagaatacatagaattccatttacacacattttttgtgcatggataagtggcaaaattctataactgggctataagagaaaactgatagtggcaaaatttgccagaatgaacaacgtttgtaggaagacaaagaaccctgaaaaactaagaaatttaaataatataatcctaaactatacccatggccacaataccctaatattgctgcagtagaatccaatacttcccctatttctatacccaattagtgtaaataaatttgcttctcccgcgatgtacaaaagaattttgaagcaccaagtgcttccaatatgtgaggattttcccgttagagcttagaaaatggtgtagttagagaataagtacatgagattgttcaaagtttctgggtagaacttccttgcaaacaagtagcatggtctctttagtccattccacaagcaaggcctctgcaagagctctttcttttcatcacttgttatgtggtagctgatgtcaaccgatgtcatattcttgaggagttcataagttacatccttagctcggaaagacctgggatgccactttccctcagaccaatcaacataagtcacagaccaattagcaattccagcagggtccatcataaggaatagtgttggcaagtaatgctca

SEQ ID NO: 17830 - DNA, 711 bp, Oryza sativa
  Clone ID: PAT_MRT4530_23445C.1
atgaaaggaaacaatgtttctcaactggctctcctcttgtcatatcttgttctaactactaggggagaagagctcaaacccattaacaatggagaaaatactagtcgaatcctgacaactttacaagttaataagactattcagatggaacctagttctttcccgatagggatggatatcaaatcgccattagtaggtgcaatctcgcaagcacaattgtctaccattgattgccccattggaacaattccaatagtgcgcaacaacaatttggccaacatgatggtacaacgtattggcacactggctaatgatgatttaccaatgctgggagcaggaattgaatattgggatgagatatatggcatgcaggcatcaataaatgtctatgaaccaagtgtgaagaaagatagcaaagatgttagtgcatcatggatacaaattagtgttgtcccaaaaggtaccaacggaattggtataggtgctgggtcttgtgtatatccaagaagtggtgatagctttgctaggttccatattcgttgggataatgaagaattgaacaagagttgcagtgatcacaattgccctggtttcatgcaagttagtcacagtgttggtcttggaggaagaatcaatcccatatctgtctataatggaccacaatatgtaataaatgttcttatttttaaggttccatgtctaagcatgtag

SEQ ID NO: 17831 - DNA, 817 bp, Oryza sativa
  unsure (1)..(817): unsure at all n locations
  Clone ID: PAT_MRT4530_23446C.1
ccacgcgtccggggcgcttccctctcggatcggccaatcggacgcacagagcacttgcagaagcaaggtggaagctgtgttaagattgttttctaggtccggtgaattctgagagagatgaaggtgcggagctgtactgtgagaggaagaaaagagtgaagtggcatcagctgtggccatcaagtgccaaggatatgaaggttgttccagtgccgcgtgcaagagcagctccaagaaggcacatatggataccagtgattctaattcttgttgccgtcaccgtgctatggatttacttataccctccacaggattatacctatcctgttagggattggtatcctgttagggactggtttcctgcagaacctgcccgggaactgaccgatgaggagactgccgctcgagttgtctttagacaaatcctctcaacgcctccattcccatccaggaaccccaaaatcgctttcatgttcttgactcctggcaagttgccatttgagaaattatgggagttattttttaagggccatgaagggaggtacactatatatgttcatgcttcacgtgagaaacccgaacatgtcagtcctgtatttgttggccgagacatacacagtgataaggtaggatggggcatgatttctatggttgatgcagagaggaggttgctggcaaaggccctagaagatacggacaaccaactatttgttttgctttctgacagttgtgttcccctacacaattttgactatgtgtacgacttcttgatgggatcaagacacagnttttcttgactgctttgatgatcctgggc

SEQ ID NO: 17832 - DNA, 834 bp, Oryza sativa
  Clone ID: PAT_MRT4530_23447C.1
tgaacacgaagccacaccacaacaacaatccaaacccacgcacacactcttttctctcctctccttcctgcctcgtgctcttcccattcacctccctctccctataaatcctctcctctcctctcctctcctccgctactaccagtctaccaccaccaccacctagactgctcctaacctctctcccttccctttcatccccgaagagtctagaagagagagagaggaatggtgctgtggtggggttgggggagacggccaagggcagcggcggcggcggcggcggaggagaggtgacgctggagacgctgaggaggaagatgtcggagttcgccagggagagggattgggagcagttccacagccccaggaaccttctcctcgctctggtgggtgaggtgggggagctctcggaggtcttccagcgggcggggcaggcgcccccgcggctcccggggcgcggggcgcgcgaggtccccctccggcgcggcgggcgcggccgccgtgctcctctccctcttccccccctccgccaccgcccccggcaacggtgcttctggtgatgacaacaactgcaatgctggtgccggtgccgatgccgatgccggcaaggaacagtgctagcaatggctcctcagacagttttagcagcctggctctggtctttggtcttgttcatcacaccataggatgtgtgttgaagcagtattctagtagagtgaaatgaaaccgtcctgttctctctactgagtttgatttcttgaagaaacttagctcaaatcctttgtattgggctacaaacatgctctgatagctatggcaatatgatcatta

SEQ ID NO: 17833 - DNA, 306 bp, Oryza sativa
  Clone ID: PAT_MRT4530_23448C.1
atggcctgcagtgcagttcggttcgcgcggaagcagcagatcgtgatccggacggacgagccaacacgacggcattgccgccatgtgcgcgaaggcctgcgattcggggaaggttcgcctggtttgccccatgggcgaaggaagtggcccggccattccatccagggcatcgacggaagcatgcgtggaggcaaggtggcctgcgagcgcagagtcggcggggcgcgcgcagggccgacggccacaaccggccggcatgaagggttggagggatgcatgctgccgctggcggggttctccttctag

SEQ ID NO: 17834 - DNA, 594 bp, Oryza sativa
  Clone ID: PAT_MRT4530_23449C.1
atgtcatcctccctctccttctcttcttcctccccctctctctctccctccggcctctctcttctcgggacgacgacggtagggagcagcggcggtggtggtgtcagtggggacggtggcggcggcggcggtggggagcggcaacggtggcagtggggagcggccgcggggcggtcgggagtagcagcgatggtggtggggacgaggcagtcgggagcggcggcggcggtcgggagcggccgaagcaccagcagaccagctcctccccgaagcatgaagcacgccgtcctcctcctccaggggggagggggggggagaggaggatatagggagaagggggaagaaggaggggagagggggagcagtcggaggaaggaagtagtgatagaaggaggttcattgaaggcagaggagggaggtgcgggaggacgagtagggagcgagaggaaaagactgcacgggagaggagagaggagcgggaataaacccggtggatcgggcggtttgtttgaggcagaaagaagggtcgccccagtttggtgtgtgctgtatgggagagccacgtgggggtgtggtaggacaaagtttcggtga

SEQ ID NO: 17835 - DNA, 585 bp, Oryza sativa
  Clone ID: PAT_MRT4530_2344C.1
atgccggtgccgcagatcggggcgggagagcggcgaggtcatcatggggaggggggagagctcagatcgagattctctccccgtcatcctcctcctccgctgccccggcgatggtccctcccagtccatcgctcgctgtcaccaaccccttccacttgtcaccgtcatccaccaccggcgcgaacgtcatgggccagtccatggccggtcacctcctcgccgccggggcgccaccctcgcagaaagcccgcgcgcgcccgccgtcgcagccgatgtcatcttcctcatggccggcttcccctccgacgtccgctccacctccctcacccctccacgggcgccctcgccggcctcgccctaagcggcgtgctcgtcaacatgaccacctccgaccccactctcgccacggagattgccgaggtcgcggccgccaaaggctacgctgccgtcgatgcctcggtctccggtggcgaccgtggggcctgcaaggcgacgctctccatcttcgccggcagtgacgcggccgtggtcacccgcctcacgccgctgttcaagctgatggggaatgcactgtacatgggctga

SEQ ID NO: 17836 - DNA, 346 bp, Oryza sativa
  Clone ID: PAT_MRT4530_23450C.1
gggagcaaaacaattggttggaatttatttatttagtttttttttttccggaaggcggccttagagggttttggcggatttttaacgttttggtagcttttgttttggattggggtggatgcaccgaacttattttctttattttgcttgagcctttgagcctttttttttgagatgcgatttgcatttgcttgaacattatttgggagagcacgggagatggaacttttttctgtaatgggggttaccattgagttaggattggtcttgaatgcaatgtaagcacattcttttttttgtgccttctttacaactggataggggtgtgggataataagcagctgtt

SEQ ID NO: 17837 - DNA, 1531 bp, Oryza sativa
  Clone ID: PAT_MRT4530_23451C.1
gataaatcgatgtttatgggttaacatctctattacataagttgtcaacttcctttcccacaatggtttcaaaaaagacatctcatgagacagtgaatgatttcagacccatttctctcatggggatcagtttaaaggttataacaaagttaatggatgatagattgcagtgtgtgattttgaagttaataagtgaaaatcagtatggtttcatcaaaggaaggataatccaggactgtcttgcttggtcctttgaatatattcatcagtgccagccgtccaaaagggagatcattatattgaagttggactttgagaaagcatttaatacaatagagcattctgttatcatctctgtcatgcaactcatggatttcccagtgaaatggcttgaatgggttaagatggttttttcttcaactcaatctacagtgctcctgaatggagttcctggtaagcccttcagttgcaaaagaggggtcaaacaaggacatcctttgtctcctttgttgtttgttttgggtgctaagctgcttaaagagtggtgaataaagcttttaatctggggttgttgtcaaaaccaattaatgaagctgatggtacatgcttcccaataattcagtatgctgatgacacccttgttctgctcaaggcttcacagaaagaaatcttttgcttcaaagctttgctcaattcttttgctcagtcaactggtctcaaggtcaatttcagtaaatccagcatatatcctcttaatctttcttctaaaaaagctgaacttctggctgaattgttgggatgtcctattggtactttaccttttcacatatttaggactgcccatgggcactaccagacctagagtggttgattttgcccctttggttgatagagtggaaataagactcacatcaagctcaatgtttcttcctcaggggggggggggggggtaggccgaccttgattaattcagtgttgtcctcaatcccaacctattatatgtgtcccttgcagttgcctgttactgtggttaaggccattgatactgcaagaaaaaactgcctttggaagggtaataaccaaggttctacaagaaaatcactagcatcctgggatatggtttgcaggccccaaaggacaaaggaggactgggcatagttaacctgagagtacagaacacaactctcctaatgaagcactcggtgaagttatataaaagtgccaatctgccttgggtgaacctagtttagaattcatattacgcagcaaaggtcccatactcaataaaggttctttttggctgagagacatcttggttttgttagacattttcagaggcattgcttagtgcaccattcagtctggtaattcagccctcttctgggaatatctatggaatgatgaactcctaagtgataaatatccaaatttatgtcatctagctttgcagaaggaggaatcaataagcaatatgtgttcaaggtctttggaggactcttttcttctgcctctgtctacacaggcctatgtg

SEQ ID NO: 17838 - DNA, 368 bp, Oryza sativa
  unsure (1)..(368): unsure at all n locations
  Clone ID: PAT_MRT4530_23452C.1
atggatatgtacacctagggacactggggcacccataaccataaccaccctgggtggggggggggaatgagttttaacagtatagtggttggcggcgcgttctaataggactccaaatcttactcttcatcgtgacatgctgacaactttagggttgttctataatngtcaccatagttgcactttcatatttcgacgttttacaacgtgggccgtcgctataccgggtcgctgcttacctacacgtgcttgcggcgccttcgcttttctctagctggccctatatccaattggctggccccggttgtccttccccgcgactgggcaaactgtgtggttaccgggcctcaccgtcttgcggcgcattc

SEQ ID NO: 17839 - DNA, 1022 bp, Oryza sativa
  Clone ID: PAT_MRT4530_23453C.1
tacgccgccctcgtggtcgccgttgtcctcgtcgtcgccagcgccgtcgcctgatccgccacccccatgcctcctcactccatcggcgtgtgctacggcaccaacggagacaacctgccggcgccggccgggcgacgtggtgcagctttaccagtccaaccacatcgacgccatgcgcatctacctccccaacgacaccatcctgcacgccctccgcggcaccagaatcgccgtcgtcctcgacgcccccgacgtccgctctctcgcctccaacgacgccaccaacgcgtcgtcctccgccgcgcaagcctgggtccaggccaacgtccggccgtactacccggacgtcaacatcaagtacatcgccgtcggcaacgaggtgaaagacggcgccgacaagcccaagatcctcccggccatgaacaacatcagagacgcgctctccgcggccggcctcggcggccacatcaaggtgtccactgccgttgaaatgagcttggtcgccggctcgccgctgccttccggaagcgcgttcgccgaccccccctccatcatgggtcccatcgtcaagttcttggcgagcaaacggatcgccgctgctggccaacgtatacccctactacgcctacaagaacgacaacggcgtcgacctcaacttcgcgctcttccggccaagctcgacgacgatagatgacaacggacacacctacaccaacctcttcgatgccatggttgacagcatatactcggcaatggagaaggagggagggtcagatgtgcccgtcgtcatttccgagaccgggtggccatcggctgacggtcgtggcgcgagcaaggacaacgccagggtgtacaaccagaacttgatcaaccatgtcggaaagggcacgcccaagaggcccgtggcattggagacttacatattcgccatgtttgacgagaaccagaagaagggagatcccatcgagaagcacttcgggctcttcaacccggacaagtcaccggtttactccattaatttc

SEQ ID NO: 17840 - DNA, 540 bp, Oryza sativa
  Clone ID: PAT_MRT4530_23454C.1
attctgaagcacaaaagttgcattattggatgatgagactcttattatgtaaacagattttgttttctttcttataattacatccgaaaattctcccatattttctcttctatgccccccccccctctcacaaacttaatttgtcagcctccaatttacagtcagaattcagattttgatccttcttttaaaatattaaaaacaaaaacaaaacccagtcgaattttattcacagggcttttctttaaagattttctttcactttagaaggagaaacatgactaaataatagcacctgattgattttcagacaagtagcatctctctgtcattgcttgaaagtagagccactgatgatcttgctgctcagtgaagctttgttgtctttcgtgaagcttgtgctcaagagggcagttgtaggatttgcttctgagctgttagtttgggtttctgattcactgggccgtgtccagatctttatatggccttctcgacaagccgtaacgactgattcttgtgtgaacatcaagccagagaggg

SEQ ID NO: 17841 - DNA, 332 bp, Oryza sativa
  Clone ID: PAT_MRT4530_23455C.1
atggggggatattgaaaaaacatgggggggtttattaatcttaggagggaacacaattatcttagccgggatctacttaatacactatcccaagttaccaaaacctaaaacggtataatggggggcccttggtcaaactaaaaacaccttggtttttcaagggcaccctccatcagggtattcaacggtgtcaaaacaggagttatacgcccatacccagttgttaaccgatcctgttaccaaatccggatggaaatagcgggggcccttgaccaaaacaattgtctggacaaagaagacaaaggtggctgactacgcgaaggggaccttct

SEQ ID NO: 17842 - DNA, 754 bp, Oryza sativa
  Clone ID: PAT_MRT4530_23456C.1
ctggtacctttggttgctcaataggcaagatgcctttcacatatcttggactgcctttagggacatcaaagccaaatatcattgattttgctcccttaattgatagagttgaaggaagactcccatctacagcaattcacttaaactatggacaaagactaacaatggttaattcagttctctcatcacttccaacctattacatgtgcactctgaaattgccaaaaaaggctatccaacacattgatcgagccagaagacattgtttatggagaaaaaaattcaaatatggaaataaaaactcactccctggcagcttgggatctagtctgtaggccaaaaaagaaagggggtctgggagtaatcaatctggagtttcagaacatagctcttcttctcaagcatttggacaaatttttttaacaaaaagaacctgccttgggtacagttaatttggaacaaacattattctaattcagacaaaccacctcaggctcacaaggaaaaaggatctttttggtggaaagatatcttcagattgattcccttctttagagcgttcgctcaatgcaccctggggcaaggggatactgctctgttttggaaagataaatggactgacagttatctggaatccgaatttcccattctattttcctttgcaaggaacgaagattccacgattcaaagtttcttacaagcatcagagctcagtcaaaactttcacatacctctttcaagccaagcaacgcag

SEQ ID NO: 17843 - DNA, 443 bp, Oryza sativa
  Clone ID: PAT_MRT4530_23457C.1
ggattagattaacggcgaggaacacgccgaacccgagcgcggagccgaacatacgggcgccgcccacgaaggcaggcgacgatctcgacggagtggccagaccacgacaagaccaccgcggggacacgcgaccactggagcaggcagaaccagatggaccaggacacagcagcgggagacgaccaccaccgccaggcgaggaacgacgaccaacgccggcaccagcccgacacggcggcaaccgccacagcagggacaacaccaacgacctcatggacaccaacgacccgagggcccaccacaagcagacgacgacgcccaccctcaacgccgacgagcgcagggcgcgcagcacgaactcgacgaggagggaccacaccgggatggcgaggcacgccaagaagccggaccagcgcgccgtccccaagggcggggcccaccgc

SEQ ID NO: 17844 - DNA, 1281 bp, Oryza sativa
  Clone ID: PAT_MRT4530_23458C.1
actttgaaaactaattataaagttatcgattcgatgtccacttcacccatgaacgattatcaagtgtcaggtattcacagatttcatcgccgattggaccgtccccgaggaggacaaagttgatcgtacggacaacaaacattggacaatggcctttgatggtgcatttaacagccaatgagcaagagctgaattcattttcacatcaccaaccgaagatcagtttcgacatgctgactagttagatttctgagcaaccaacaacaatggggaatacgaaggacttctcgctggacttagagcaaccgcgtcacttgtggtcaaacgactagtttggaaaggggattcagaaatagtcgctaatcaagggcacaaggatcacaaatgctcaaatcccgagttgtccaagtatctagcagaagttagaaagttggagcgtaggtttgatgggctcgaagtgtgccatgtctatcacaaagataacgccgatgccaacaaccttgcctgacgagcttttaggagagagcaggttgaacctgacacattcctagaagtattaactagtcgatccatcaagagttcaccagacggcaacattaatagcaccaccaacgttagctcaaaagctactactcagattgacaaaaccatcacggacattgagaccacttaggactggcgcacaccgctcatcgattttctcaacgctgacaagttaccggaagatgatacggaagcagaaaatataccaagttactagcccaagccctccaaacgatccttatgtcgttttcgtgttgggggcttgacatcctcgaatatttttcacgaggacaaggcgactacaaatttttattcatggctatcaacaagttcattaagtggatagaagcggagccaacaagagaaatcagagccgaacacgccatcaagttcatcagagggatattctatcgatacgggcttccatatcagatgttgacagataacggctcccaattcacaagcggtacctttcaggattactgcttcgaactcaacataaaaatctgctccgcattagtttcccatcctcagagcaataagcaagtcgagtgggccaatgggatagtgtatacaataggctcatgacctgccattcaagctgggttgaggagctcccttttgtttcgtgggccattcgtaccaccttgactacacccaccaaagatacccctttcttcctcatgtacggatctaaagttatgctccctttagagctactctatcggtctacacgag

SEQ ID NO: 17845 - DNA, 474 bp, Oryza sativa
  Clone ID: PAT_MRT4530_23459C.1
gcgccgcgcggggttgttggaatacacgccctcgacgcctccgccccgggccgggtcgccggactacacgccgttgtcccccccgccacgggccgcgtcgccggagtacagccccagcacgccgcctccgtcccccgtgccgtccgacgcaaagtttggcacgtttccgctgtggggccgccgccgccgccaccatccctaccaaaggggcggctccagcattgcctgctcgccgcgcgcggttcaggttgccggcggccaccatcaccaccctcgttgggccatcctgcacggatactaggctcttttagttgtaggcccccccttgtaacaggacaactccgattcttgatgtaactaatgtctggcccaactaatcatgtgcctctatctactatatttacatcatcttgtattatcatggctgtaactatatgtctatatcaaatgcaatagaaatctgagaacgttgtg

SEQ ID NO: 17846 - DNA, 599 bp, Oryza sativa
  Clone ID: PAT_MRT4530_2345C.1
aactgatgaggacacaactagctcggatataaccatgactaccttatgtattaatcaaccaaagcatcaacttcaaacggacctagccgctgatctagaaggaatttcggggcccatgagtacttgttggaaagcttatggagtctactttcaaatggttttggtcccatgtcaaaattcctaccgagctgccgggaatctgcaaaacaagccacggattagccttctcggcgaggtcaaccgggtttcggcacggttgataaccagaggagacgtggtgctgcgattgcggggctcagtagcgtgttcgttcagaagccggatcgagttgtgtcgcgactccgcccaaatcgactgtttatcaatacctatcggaagatcgggacctaacatccctcatcagttggtatcagagcacgattgcccgttaggtaatttatctttctataaccagaaaattaccacacaaaaaaatcatccctaaccaagcctcttgtttcaacctgttctctcgtgagtcttgttattttttgatccattagaactttgtttcagttgcttgtctgtattcctttgcatagcctgtaaaccatcgcatc

SEQ ID NO: 17847 - DNA, 474 bp, Oryza sativa
  unsure (1)..(474): unsure at all n locations
  Clone ID: PAT_MRT4530_23460C.1
ccagtacatcctccgggccgggcgcccatcaaaagcccctcggctccttcaggagccaacggcgtgatatcaaagggagtttcgaaccaagcccattgttggggggataatgggctggaaaggncgtttgatgaaagcaatttggcccatgaatgatgagtttctacccgtgtttatgatttctcccctttttttcaaaaaaaattaagtttcgccgctggtcgttttgttttcagcaagctgctcctccctcctgcttgtcgtgtgtgtgaagtgaacatccatgtgtttgtaatctgtttttaaatcgagggatgtctcatgtgtttagcctgtactcccatttaatttacgacgataagcatcgatgcccccctctcctatctggaatatatcaatcattttatccaaaaaaaaaaaaaaaaaaaaaaaaaaaaaaaaaaaaaaaaaaaaaaaaaaaaaaaaaaaaaaaaa

SEQ ID NO: 17848 - DNA, 362 bp, Oryza sativa
  Clone ID: PAT_MRT4530_23461C.1
gaccggaccggaaggccggggcagacccacgcgttcgccctcatagacgaggagaggcgacaatggaggggcaggaggaggacgggcggaacgagacgaccaggtaccaggggaggcagccgaaagggacagagccgcaggccgccgcagacgacaaggacaaaagggagccaccagcagggccgctggccgagccaggggagcgtacaagaaccctcaccggaccggaccgcgatcaggccagtcgagagcgcaggaatacccttcctaaacatgaccaagacgaccggcatgggggtcagcaagagctcacccaagggcgccacgggcggaacccaggggatagcctgaagcttcggcag

SEQ ID NO: 17849 - DNA, 2406 bp, Oryza sativa
  unsure (1)..(2406): unsure at all n locations
  Clone ID: PAT_MRT4530_23462C.1
atggcgatggcggcgtcctcctgcgcgtcctgctccgccgccgcggattctttctcctcatcggcgtcctcctgctgctgctgcggctcctcgcggattcagcggcggcgaggggtgcttctgctgtgcttcgtctccggggtacacgccgtcgagcccgatggtgatggggagtccgcggcgcgccgcctcgccggactacacgccatcgacgcctccgcggcgcgccgcgtctccggactacacgccctcgactccgactactccacgccgcgccgcgtcaccggactacacgccctcgaccccgactcctccgcgccgcgccgcgtcaccggactacacgccctcgacgcctccgccccgagctgcgtcaccggactacacgccatcgactccgacgcctccacgccgcgccgcgtcaccgaactacacgccatcgactcctcagcgccacgccgcgtcgccagactacacgccctcgactccgactcctccgcgccgcgcggcgtcgctggactacacgccctcgacgcctccgccccgggccgcgtcgccggactacacgccgttgtccccaccgccacgggccgcgtcgccggagtacagccccagcacgccgcctccgtcccccgtgccgtccgacgcagagtctggcacgtctccgctgtggcgccgccgccgccgccaccatccctaccagaggcgcggctccagcatcgcctgctcgccgcgcgcggtccaggtcgccggcggccaccatcaccaccctcgctgcgccatcctgcacggatactaggctcttttagttgtaggcaccaccttgcacagctttcaccccccaactcgttagctgacgccggtcgcggtggagaaatactgacggcgtcgcagccgccgctcacccgcaccccacgaggccgaggcggcgtgcaagccacctccacctccacctccacctccaaaacaatggcgacctcgggttcctcctcctccccctcctccccgtcctcccccaagcgccagcgagtggcgccgccgccgccgcggcgcacggacatgctgatggcgctcccgccggacatcctcgacgaccgcatcctcgcgctgctccccttcgacaagctggtccgcacctcctgtctctcccgcgcgtggcgccgccgctgggagtcggtcagaaacctcgagatcgagctgccccgtgcctactccggcggcggccgcgccctgtggcggtgcgcgcggcccgtccgcttcttcagcgcccgcgtcgcccgccgcgacgtcttccgcgccgcccgctggctccgcgccttggcgcggaagggcgtccaggatctaagtctggagttctcgttagccggtaagcagcgcccccttcccggacccgccctcttctcctgcgccgcactcgtccaactcgacctcgagcaatgcgacatgccggcggcgccgccgggctttctgggcttccccaaccttgagcgcctcgacctcgtgtatgtcaccctcccgttcgccggtgccggcacgcagctcgaacacctcatcgtcgcggcggagaaactcgccgtgctaaatttgtcacccgtgatcaccatcaacggcggcggcgtggacacgtgggccatcagagcgcccaaactccggaagctctacatcaccatggagatgggtgacgacaacggctgccgaataccaatgccgctccccatgctggaggaggtgaccatctcattcgatcgcctcttcggaacccaagacttcctcgatgctttccagaatatttctactgtcaataagctctttttcatcagtgataagttacgacttacctcatttacacagttcaacattaatatgctggagggaattacatgcaagtttgagaatctgagggagggcggcctgatcatagattttggccagcgctcaagtgttctatcgttagtttctttactgaagtttgccccgcacattgaacacctttatattaggactgatcattccatattggaccccgtgagttctgaagatgagatggatgaagactccctgaattctgaagatgagtttgatgaagactccctgaattctcaagatgagattgatgaagactccctgaattctgagataagcagcgacttgcttgcaagcctcaaatatgtgaccctgattaatatgaaacatcctgtccttgttgatgttgccttcgtattatgggagaaatacttcggaacttgctactgttcagattctagatgaaactaatgtctggcacaactaatcatgtgcctctatcctctttatttacatcatcttgttttattatggctgctactttttgtttttttcttntgcttttgatatttgtntttttttctttctttctttctggatatttat

SEQ ID NO: 17850 - DNA, 955 bp, Oryza sativa
  Clone ID: PAT_MRT4530_23463C.1
tttttttttttttttttttttttttttttttttcgttcaaaaaattgtagattgaaattcaaggatagtagtatcacataatacagttggaacaaacgattatcactgacaccctacacccaaaaaaaatacaaaaatatgaatgtattttcacagaaacaaatcaacaagtggctcacaaatctgaaagaaagaaaaacaatttaatacactcaaatcattgcccactagctagctagctcctctagtacttgacgctacaccggtcgccggagtcgaggcggccgccgccgtcggccgtgacggggatggtgagcgagcaccatatcctcggcttctgccggatcttgatgctgccgaacctgtacctcaccttgccgtcgacggccacctccaggctcacgctgcccttccccttctccttccccagctcgccggcggcgtcgccggcgacggcgacgcctgtcccggcgaactcaaacgtcacgtcgtcggagctcttccgccgctggtagaactcggccggggtggcgccggtggcgtggccgaggcgctcgccgcggaagcggagctcggagtcgagctcgtcgtagtagatgttgacgcggaggctggggttgtagaggttgagcctgacggcgagcttgtaggagacggcggcgccggcgacggtgaggttggtgaggtcggcggaggcgacggtggcgcggatgtggtggggctggaagatggcccagtagatgagcaccacgaagccgccggtgacgatgaaggtgaacaggctgccgcagcaggtcctctcctggttgccgccgcttgacatggcggagctaacggcggcggcggcggaggaggaggttgctagccggagtcgctggtcaacggctcgacgcggaggcgaagggttggagaggggcctcgtgccgaattccgcccgccccctcgtgccgaattc

SEQ ID NO: 17851 - DNA, 1766 bp, Oryza sativa
  Clone ID: PAT_MRT4530_23464C.1
tcccaagaatcgctgctatatatagtaggttggaaatgattgacagcaaagaccagtcagtatccataggcatttaggatgcgtttgactttttgaaaggtgatctcttagcagcggttcaatggttctggaacctgaacacttctaatttgcaagatttgaattcagcgcacatcagtctcctccctaaaaaggagacacctccagcgctgatcattatagacctataagcttaatgcttagctttgcaaaaatcatcaccaagactcttgcaaataaattggcaccgagactcaaagtgtgtttgtcaggaaaagagctgttcgcgataattctctttgtccaaaacatggtaaaatttttgcataggcacagaaaacaaatgcctttttgtcaaagtcaacatttcaaaagcttttgactcggtaagctagcctttcttgttggaagtcctacaacgttttggcttcggaacaagattgcaccattgggtatcaaatttgcttgcctcctcttcaaagattctcttcaatggttcaccaggagagactgaagaattgcctattctcacgccagtgtcaaacaaaatgagccgttttcgctgttctctttatgctgatgatgttgccagattttaatttcatttgccaaagcatccagtctgcacaccaacaatgaaaagaccgaaatattcccaatagcttgtgagggtgtggatgttcaagatataacgcaagttccccaggggtcaataaaaactttcccctgctcctatttaggtttgctgctgcacatgcgcaaactgaggaaagtggactccactcccttgattgacaaatgtggtgcacgcttaccaggttggaaaggaaagtttttcacttcagcaggccatgaaactcttgttaaatcacttcttaccggccttccaataaatcatatgacaggaatccaaacacctaagtagtgggttatcaaacgcattgatcgttttcgcagagcgcttctttggaaaggagacgaccccaacaatgtcagcccaggatatagcctagttaatggaacacagtttgcatgccgaaaaatttaggaggcctcggaattttagagcttaacaagttctctcgagccattcatcttcgctagttttggttcagttggaaggaggaaaacaagccttggttgggctatgtcgacaagagtcttttccaagctgctacagagatcatgctaggagatgggaaaaaaaaggattgttttgggataacaactggatctcaaaccaatgcccaaaacaccttgctccaaggcttttcagcttagcaaaacaaaaaagaaatacagtgcatcacgagctgactggcaataaatcgatcttctcctttcagcagattactacaattaaggagatccatgaattgatttctctaggcaccctcattcagaacgtgcaactccttccaagattgccaaacgatatcctttggaaattctcatctaacgggatttacacctcaaaaggtgcatacgtgttacaattttagggcatcttcgtcaccaccgattttgcgaaaatctggtcagctcctactgagccaaaacatcgttttcttggctggctcattctacaccaaaaaactccaaccgcgcaaaatcttcttcatcgccacaggccctgcgattggatttgccctctttgtagggaggctttcgaaggcactgctcatatgttcatagaatgttctttcacgatcaacgtgtggaacaag

SEQ ID NO: 17852 - DNA, 272 bp, Oryza sativa
  Clone ID: PAT_MRT4530_23465C.1
cccacgcgtccgcccatttcgtccgtgcttccccccccccccacccttctagccgggccaccgtctctacaaatccactaaaccccctcctccgcctcgccgacgccatgggctcgccggcggacgactcgttccccgcttgtggagatgatgcaatccgagacgtgtacggcatcggtggtggtggggaggaggacgaaccgcccctcttccaatacctactcgaactaggacctcggtccccttccgactacctagacctccccccctcg

SEQ ID NO: 17853 - DNA, 571 bp, Oryza sativa
  Clone ID: PAT_MRT4530_23466C.1
gttattatgacgtgcgatcacggaggggaggtcgcgctggaagctcagatcgcgctggacgttgtcaagttcagtgttgtttgcaatttgcaaaagcttggatgctaatcctagtcgcgtgcgagatcatgactgagcccgttcgtgaggctatataaggcgcagcgatatgatatctaacgaaggacacagtgctgcagacgcacacagagctgttcctctctcagcgccggcggcattagcttttcgctcaactaggcaacggcagcgagcagcaacgattggtgacaggtacaagcacttgtacagtgccttgtggatgaatcatcgtctgacgatgacgacgatttttttttttgccgcggcacaaatcgtccatagctattggcactctgtcaatgcaccaagatatggtgggtctgtcatgggacataaagtggttgatcgcaatagagaagcacggcacttgagattataccaagactacttggacggaaagtcatcagcattgctaatgttgttagagagaagagaaagatagccgagagagagggagattaaatagatgaat

SEQ ID NO: 17854 - DNA, 1188 bp, Oryza sativa
  Clone ID: PAT_MRT4530_23467C.1
gagagactagactagtagtaccaattaatggcggcgctctcctcctgcttactcgccgccgtccgacctcatcctccacctgcacctcgaccgctctccccttccttcatcccctctgccctccgccaccgccaccgcctgagccaagcgccgcccctcgccacctctctcccacgaccacgaccaccatggtgccgcttctccgcctgctcgccgacaccgccaccatggagatggcggcggggatggaggtggcggcgaggctgacgatgacgggtggatctggcggcgaggctggcgacggcggccggatccaggcgttgcaggccgatttggcccccccgcatggcgacggtgtcggggcggctgtgttggaggttgcggcggttttgcgacggctgctgctagcgtcagtggctggtggcggcggtagcagcgacggcagccggcttgcggcgaccgtgcctgaggaggcggcggcgacgtcggcattgaaggcggggaaggagtcggatgtgaggatcaaatcaactggcacgctcacgaacctaaaggcgagattttggacctgcacaggagttaagcagatcttccaggccagtctgttggacacgacaggaaattgtgatcctttatgctccgttgatgaagttagctcacagtattttgaagctaactacaagccaaaaaatgatcttcttaaagctttaactataatagcaacagctttggctggggcagctgcaataaaccattcctgggttgctgaacatcaggacattgcaatggtgctagtgtttgctctcggttatgcaggtatcatatttgaggaatcactagcgtttaacaaaagtggagttggattgctcatggccgtttgcctatgggttatcagaagtatcggggctccatctactgatgtagcagttcaagagttgagtcatacaaccgccgaagttagtgaaatagtctttttcttgctcggtgcaatgaccattgttgagattgttgatgcacatcaaggatttaagctagtgactgacaatatatctactcgaaatccaagaactcttctctgggtgattgtatacgctataattctcaatgacataatttcaatggatgggttcctgttgttgatgccgtgttaccaaaatggcctagaaccacactctttctgattctatt

SEQ ID NO: 17855 - DNA, 101 bp, Oryza sativa
  Clone ID: PAT_MRT4530_23468C.1
ccttcttgtataaggtatctctgctaacttacattggtctctgcgtctataagctgaaactctgcgacacagctggcctcgtgagatacctgtctgcacaa

SEQ ID NO: 17856 - DNA, 559 bp, Oryza sativa
  Clone ID: PAT_MRT4530_23469C.1
gaaaccaaggcacaggcccacaatatttttggaaaattcaggcttacaatttgcctcaaaatttaagcaacaggatcatgatcccaggcagggggtttgccacggagtcttaggtccgggacatgcttaaaaaatgataaaacaatgggggttcccagttttgataaacaaggataggggtaaacttcctttttcatccggggctacagggcaccagaatcactccttcattttccaccaaaaaggtaccccagggaaaatccacccccaggggcagcatggaccttggtcaaagggcaatccgtaaaaaagtttccagggttctggccatcagctttatgggagttgttattgctccggctgccctgaatcccaactggaatttgcttgggggcatcaccctttgcaggggatggtttctcaacaggagcacccacacccccaattggtgctggtgctggccctggtgcaggtgcaactgcaggggctggtttaccaactggcttaggggcctcattgcctccaaaaaggtaacccaaaaaactttggccaccaccgg

SEQ ID NO: 17857 - DNA, 737 bp, Oryza sativa
  unsure (1)..(737): unsure at all n locations
  Clone ID: PAT_MRT4530_2346C.1
ccggccgggactcatcaccatgcctttcgcgacagaactcacaaagcgtctgggcatcagagtgcccgtcgtgcaaggcggcatgatgcacgttggcaccgccgacctcgcctcagccgtttccaacgcaggcggcctgggcctcatcaccgccctcatcttcccgacccccgaggaacttcgcaaagagatccagcgctgtcgcaccctcaccaagaaccccttcggcgtcaacatcaccctcctcccttctatggtccctcccaactacgccgcttttgcccagaccatcattgacgagggtatcaaggtcgtcaagacagccggtaactcgcctggacccgtcatcacgcagctcaagaaggccggaatcatcgttcttcacaagtgcaccaccattcgccacgcgcaaagcgccgtanagctcggcgtcgacttcctcagcatagatggattcgagtgcgctggtcacgttggagagagcgacattaccaacttcatccttctcagcaaagcgcgccaaacgctgggtgtgcccttcatcgccagcggtggcttcgcagacggttatggactcgccgccgctctgtgcctcggtgcttgtggtattaatatgggaacgcgnctttatgtgtactggtcgaggcgcccgtgcacatncaggtcaaggaggagattgttcgcgcccaagagaccgacacgacacttcttcttcgacgatggacaaacaccactcg

SEQ ID NO: 17858 - DNA, 219 bp, Oryza sativa
  Clone ID: PAT_MRT4530_23470C.1
atgcggttatgcaggagggtggggcgagcggctatggagcaaggtgggatgagcggatgtggaaagcaggcagcagaggctacagatggccttcatcttctcttccaagaggagatttttagaggacttgattttgaaaaaattaaggagaggtttcaagccatgggtgaccggcgaatagagttgcctaagccttctagagtccctaaaagggcttag

SEQ ID NO: 17859 - DNA, 1731 bp, Oryza sativa
  Clone ID: PAT_MRT4530_23471C.1
tcctcggcgtgctgcgcgcgctcggcgtcacgtgggcggcggcggcgaggccgcagaggcagcagccgcgcctggcggcgcagacgccgcgagggcccgcgcctggggcggatgggcgccgcgccgccgccgagctgagggggatccccggccggatcgcggggaacggggcctgcgccgtcgcgtcgctctacacgctgcaggggaagaaaggcgtcaaccaagacgccatgatcgtctgggagaatttctgttcaagagaggataccattttttgtggtgtttttgatggccatggaccaaacggccatttggttgctaagagggtgagagatcttctgcccattaagcttggtgcggatttggggacggatgaaggacgacagacatccactagcagcatcaaaagcaatggagatgaaacaggatcccctggaaacatgggcagagatgctgagcagaacggagagtacccagagatcttcacagcattgagaacttcatttttgagggcgttcaatgtcatggatagagatctcaagttacataaaagtatagattgttttttcagtggaacaacagcagtggcagtgctcaagcagggacggaatcttataattggtaacctcggggactcgcgggccatcttaggcacaagagataaagataatcagcttatggctgtccaattgacagttgatctcaaacctaacattccaagtgaagcacagcgaatcaggcaacgcaggggcaggatatttgcacttcctgaggagccagaggttgctcgtgtttggcttccgaagtacaactcccctggactggccatggctagggcatttggagacttctgtctcaaggattatggtctaatctctatgcctgaagtctcgtaccaccgtatcacagaaaaggatgagtttgttgtattggctactgatggggtttgggatgtgctgtcaaacactgaagttgttagtattgtcaacagagctacttctcgggcctctgcagcacgattgctagtcgaatcagctcaccgtgcctggcgtgcacgtttccccacttctaaaattgatgattgtgctgtggtctgcctattcctggatacagacgaattaagtgaaacatccagttctatggcccgcgatatgacaaatgctgtagaagttagcagtgggcagcactccaatactatccaattgagcactggagtatcttcagatgttgttactgcagttctaacagatggtgatgatctgtctgctgttgatgcagttgcaaagctggttactctcacggatttgccgaacaatgcttcaggcgcaacgcaaagcatcaccaccaagtgagccttgtttgttccccggggattgagcatttgtgggacgatcctgcacagttgtgatgatgcgggtcgcgcattcagaattctcttgccgagactgatgcctgtttttgtaagagcacatcggaagttgcagcttgctatttttctccatgcaagtgtggataggatctgcagttttttcgccttttgtaaagtaccaaagtcagtttagcgtcatttgttgtatttcttttgctataattttgttctcgctatcgttggtaaatcatagtaaatcccctataggcagaagaagccttttgagttttcaccattttattctgtaatattcattcgatttctaaaaaaaaagggggactcccagcctatggctgcctatt

SEQ ID NO: 17860 - DNA, 3475 bp, Oryza sativa
  Clone ID: PAT_MRT4530_23472C.1
atggcgctctccgccggcgatgtgccgacgatgtacacagtcctcgtcaactcgctcagcgccgacgaagcagtgcggcggccggcggaaacagctctcgcgcagtgcgaggcccgcccaggattctgctcatgcctactgattgcacttcagctagctgtactaatttccaagattgcacgcctagattacccaaaagaatggccagacctcttctctctgttggcacaacagctgcagtcagctgatgttcttgcttcacatcgtgtattcatggttctgtttcgaactctgaaggagctatcaactaaacggcttgctgttgatcagaggaactatgctgagatcactagtcacttgtttgagtatacctggaacctctggaagagtgatgtgcagactatattacagaatctttctatgctgtcacagcggagtgatatagattccattttagagcaatcaaatgatcttatgttgatctgcgaccggtggttgctttgtctaaaaataatcaggcaactaatattttcaggatatgcaagtgactcaacaaccgcacaggaagtctggcaggttagggaagtttgtccaacagttttaactgccattcaatccctccttccttattattcctcctacaaagataagcaagcaaaactatgggattttgcaaaaagagcatgcactaagttgatgaaagtccttgttaccttacaaggcagacatccatattctttcgttcaccaagctgttcttccagctatagtcgatttctgtttgaatatgatcacaaatcctgaacagggtggagcatcttttgaggagttccttatacaaagtatggtttttgttaaatcagtattggagtgtaaagaatacaaaccaagtcccacaggtcgtgtgatcaatgaaagctcacagcctttgagtctggagcaacggaagaaaaactttggagcagtggctagtgacatgctgaagattgttttgcctggtgaccgagttatgttgctgtgcaacattttgataagaagatatttcatttacacagcaaaagatttggaagaatggtcagagaatcctgaatcatttcatcatgagcagaatttggtacaatggactgagaaacaacgcccatgcgctgaagccctctttattgttatctttgagaactatcgagagcaattagctccagttgttgtttccattcttcgtgaagccatggctctgtctccaccactggaaacagatgttactgctggaatgcttttgaaggatgctgcttatacagctgctggtcatgtttattatgaactttcaaattaccttagttttaatgaatggttccatggatctctatccattgaaatttcaaatggccacccaaatatgcgtatcatccgtcgaaagattgcattgctacttggtcaatggatttctgagatcaagggtgacactaggaaattagtctatcatgctttggtcggattgctgcaggacaatgacatagctgtcaggctagcagcatgctcttctctgtgttatctttttcaagaatcaagcttttcagaactagatttgtttgaatgtcttcctacatgctggacaatgtgtttcaagttgacagaagatgtccaagaatttgattcgaaggtgcaagtgttgaatttcatttcagtccttcttgaacatgctggagacaaggttattccatttgcaagtcagctatcacattttttccagaagatctgggacgaatctgcaggtgaaagcctgcttcagattcaattgctagcagcacttagaacctttatttcttctgtcggataccagtcgcctctttcttaccatatgcttattcctatactccaaagtggtataaacgtggatagccctgatgctctcaatcttctcgaggacagtgttctgttgtgggaaacaacccttttgaatgctccttccatcgtatctcaactgctggatctcttcccttatcttgtgggcattgtgactagaagtttcgatcatctggaggtcacaatcaacataattgaggattacataatttttggtggatcagaatttttgaaaaggcatggtgcaagcttggcgaacattcttgatactattgttggaaatgtaaacgacaagggtcttctcactgcactaccaattattgatcttcttattcagctctttcctcaggaagccccaccgctaatatccagtgctcttcagaaacttatcttcatatgtttgaatcaagacgatgaacataatccttctaggacaactgtccgtgcatctgcgggagcgattcttgctagacttctggtgatgaacacaaactttacaggaaagctattatcagagcctgcccttctgacaagcattcaacaaacagggatttctgtaaacaataatctgctgctctctttggttgatatgtggattgacaaggtagatgatgcgaatgttatacaacagaaagaatatgcaatggctctttctgtaattttaactttacatgtacctcaagtcattgacaaacttgatgacatattaagtgtctgcactactgttatcatggggggccgtgaagtgaagactgaggatgatactagtggtgatattacaagctcttcttggcttggcaatgataattcaggttattctaacacaagcaaagagttgagaaagcgacaagtaaaggactcggatcctatcaagcaagcttctctagaggacatgctaagagataacttaaaagcatgtgcagcactccacggggacgcgactttcaatgctgccatcggcaggatccatccagcagcatttgctcagttgcagcaggccctgaatattgcatgagatgttcatagatcctagtgaattctttgttgttttgagcaaggtaaagagcgagcggtgcatcatgagccactggagtgcatgtgattcgaatacagttatgctattggatgcacagcattttccagtcctgctgttgatgcactgtactgtcgaaggtaatatggaattatggattgttgattttacaggtgtagattacatttgagtatcaaaaggtggggtagttctacagttgtttaccggttactgtcagtggcaatgttcttccgatgttttggggggttgtgtgttgtttgatcatccacccagcccgagaggtttcatttcaccgtgcgatacgattgcggaagattgctctgcacaatttttgtgtttggtgatatgggggtttggtcgtcagtctgaggttggcagagtttttagatctgctcttccagagtgagtaaaattgtgcatgggatttattctcggcccggttgaaaaaaatgcatgaccgggcatcgtgctggtaacactgtaattgttaaaaagtattttgtaacagaataggcatgaggaagtaatgcagtactgttttgagatggaaaaaacccccccc

SEQ ID NO: 17861 - DNA, 435 bp, Oryza sativa
  Clone ID: PAT_MRT4530_23473C.1
atggcgggcagcacgccttcttccgtggcggtgaaggtgcgggggcaggaaggcctggagggcgccaaagagggagtccatggggaggtagatggcggcgaccgcggcgtagttggggtgacagggaacaccacgcctaaggtagtagttggtggtggaggaggactaggtggtgagaacagagtcgtggtcgtgggggatgacgcccttgagcacgagaagggcagcgaggtcggtggaggtggaggatgccgacgaggtgatgatgatgagcagggccacgatgtccgaggcacgcttgagagtctgagagatggggaagagagggaagaaggagagggagaggagggagccaaaaccggtcactatactgtcgagggaccaaagctaacacttaggcatggtatagtgagtgggaggatgggatacacctga

SEQ ID NO: 17862 - DNA, 535 bp, Oryza sativa
  unsure (1)..(535): unsure at all n locations
  Clone ID: PAT_MRT4530_23474C.1
acctccaaaaatatcctggttttggacatctttcacattttatagaacaaacccccaaatcaaattgataaacagggggggggcatggttgccttggaaggcttcccatatgggaatgaaaagaataatttttaaaattaacctgccaaccccaaggaagccccccccccgttgccggggggcccccttccaaaaaacaagggcctttttgacggccccgaaaataaggaccagcccggggaaaacgccccggttgaaaacctcaaggcccggccatttgttgcccttaatccccgaaaacttctcccgaacaaagctgcagccctggacctccataaaaaacggcccgtactggaacaccccttggttgatgctccccgccgccgttttttgcccgaaccccggccggggtaaccctcccctcgggggggcacacctggaacccggggggcccgggggggtcgggaactaaaattttttccactccgccgccgggggggncaaaagttaacctccccgggggcccttttccggg

SEQ ID NO: 17863 - DNA, 148 bp, Oryza sativa
  Clone ID: PAT_MRT4530_23475C.1
cccactcgtcctcccactcttccgtgactctcgtgtcatgagaaaggtcaaaggatgcaccttggggcccggcatttaacatgtttgggacacgaacacacttcactacctccacaacaagtctatataggtccgggtccaacctgtc

SEQ ID NO: 17864 - DNA, 209 bp, Oryza sativa
  Clone ID: PAT_MRT4530_23476C.1
gcgaagctcaagcccagcctcgtcggtgagcccgtggttcggcacctaccgcgtgctatacctggggccgttctccgtcgagccgtcgagctacctgtacctcgagtgtcccggcgactactgctgggacaccgagaggctactcgcctacccagagacgttggataagaaccgggagctggaggtgatccactacatgtgggcgatgc

SEQ ID NO: 17865 - DNA, 3899 bp, Oryza sativa
  Clone ID: PAT_MRT4530_23477C.1
atggcgtcgactgcaggtagaggagaggatgatgagagggagaagaagaagaaggaagggagcggcaacgacggcgacgccgggaagctgccgttcctggggatgttcaggtacgccgacggcgtcgacaaggcgctgatggcggtcggcacggtggcggcgatggcgaacggcatgtcggagccgctcatgaccgtcgtcttctccgcggtcatcgactgcttcggcggcgacgacgtcagtaccgttctccaccgggtcagcaaggttgttctgtattacatctacttgggagtgggaacatcaatggcttcttttctccaggtgtcatgttggacaatggctggagaaaggcagtcggcatgcattcgatccttgtacctcgaagcgattatcacacaagacattgcattctttgatgtggagatgacaactggagaagctgcttctagaatatctgcagataccgtactgatccaagatgcccttggtgagaaggtaggaaaatatatacaggttttgacagcctttgtaggtggttttgtcatcggattcataagaggctggatgctggctcttgttgtgatggcttgtatacctccaagtattttctcttttgcattagtctctcgattacgggctcaaatatctggaaagacgcatgtatcatatagctatgcggggaatgttgttgagcagaccattggatctatacgaatggttgtctccttcaatggtgagaagagagcaattacaatgtataatactctcataaaaaaggcatacaaggccactatcatggaagggattatcagtggttttggaataggctctatcttttttgttgtttactgcagttactctcttgcattttggtatggtgccaagttagtcattagcaaaggctacactggagggcaagtcatcaatgtcgtatttgcaattttgactggttcaatggctataggtaacgcatcaccctctatttctgctattgcagaaggccaatctgcagctcataggttattcgaaataatcaatagaaaaccaaatattgacatcactggaacttctggaataatattagaagatatcaaggggaatgttgaactcaaggatgtgtgctttagctaccccgcaaggcctgaacagttgatactagatggcttatgtctacaagtacctaatggtactacaatggcaatagttgggcaaagtggaagtggtaaatcaacaataattagtttggtagagagattctatgacccacaggatggtgaagtgttaatagacggaattaacatcaagaccttgaaactccactggataagaggaaaaatgagtcttgttagccaagagccattgctttttatgacctccatcaaagataacataacctatggtaaagaaaatgctacagatgaagaaatcaagagagcagctgagcttgcaaatgcagcaaacttcattgataagttgcctaatgcatatgacacaatggtgggtcaacatggtgctcagctttctgggggacaaaagcaaaggattgccattgcaagagctatccttaaaaatccaaaagtcctcctgttggacgaagctactagtgcattggatgtagagtctgagaggctagttcaagaggcactaaatagggtcatgatagggagaactacactcattgtggcccaccgtttgagtacaatcaagaatgccgactgcatagcagtggttcaccaaggaaaaatagttgatcaaggttcccacgatgagttgatcacacacgtccgtggagcttactctcaacttattcagttacaacagactcatactgaagaaatgcatgatgtacaatatagtgaggtgtcaacttcaagacttaaaagtagaagtttgtctttggaacaatcaatgatcaatgattctcctagaaatagaagaaaaaactctttagcaaaacatattggctcatctggatccgatggattgcacaagcatggtcttacagatgaacctgaagataaagaatgtggtgacaacaaggatattaataaagcaccaatcaggcgactttttaatctcaacaagccagaagcacctattctactattagctattataactgcttttgtgcatggacttcttttcccgatatttagtataatgatgtctggtggtataagaactttttactatccaccacaccaacttcgaaaagattctaggttctgggctttgatgtgcattctaatggcaatcatttctctggtatcgattcaattagaatatttcttatttggaatggctggtggaaaacttatagaacgtgtccgctgtttgtctttccaaagcatcgtccatcaagaagtttcttggtttgatgatccttcccattctagcggatcacttggagcaaagttgtacattgatgctttgaacatccgacgccttgtgggagataacttagccatactagtgcagtgcattgtaacgcttattgcaggatttactatagcatttgcttctgactggaagctcacattgaccatcatgtgtccgatccctttggtgggtttgcaaaattatgtacaattgaagttcttgaaagggttcagtgaagatgctaaggtgatgtatgaagatgcaagtcaagttgtaactgaagcaattggtagcattaggactgtagcgtctttctgtgcagagaagagagtgattaaaacatacaaccaaaaatgtcaagcttcaatgaaagaaagtattagaagtggaatggttggaggcctaggtttcagcttttcatatttaatggtgtatctcacatatgctctttgtttctatgttggtgcacagtttgtacatggggggaaatcaacctttaaagatgtcttcagagtttactttgctttagttttcacagcttttggaatttctcaaacaagcgcaatggcatcggattcatcaaaagcccatgaatccgcagcttcaatattagcaatcatagacagaaagtccaatattgactcaagcattgatgaaggaatcatactagaaaaggttaatggcacaatagaattgaatcatgtgaacttcaagtacccatctcgcccagatgtccaagttttatgtgattttaccttaggcatcccctccggaaagactgttgcacttgttggagagagcggcagtggaaagtccacagtaattgctttgctggagcgattctatgacccacattctggcacaatctcactagacagagtagaacttaaaaacttaaaattgagttggttaagagatcaaatgggattggtaagccaagaaccaatacttttcaatgacacaattcatgccaacatagcatacgggaggaaaggacaagtaaccgaagaagagattatagctgttgctaaggcaagcaatgctcatgagttcatatcaagcttgcctcagggatataacactactgtcggagaaagaggaacacaactatctggtgggcaaaagcaacggatagctatagcaagggccatcttgaaggacccaaaaatacttctattggatgaggctacaagtgcccttgatgctgaatcagagcgcattgttcaagatgcactagatcaagttatggtaagcaggaccaccattgtggtagcacaccgtctgtccacgattaaaggggcagatgtgattgcagtcatcaaggatggttcaatcgctgaaaagggacaacatgactctctcatgaggatcaatggtggagtctatgcatcgttggtagacctacactcaaagacaccataaaaagatggatttttttctcccctaggtttgttcatctccaaggtgggaaaatgccccccaaatattatgccttaaagccccagaaaattccttcc

SEQ ID NO: 17866 - DNA, 223 bp, Oryza sativa
  Clone ID: PAT_MRT4530_23478C.1
gcacgagggagagaactagtctcgagtttttttttttttttttttttttttttcagaagcaaaacgattgctctgtatatccagaaattcagacatagatcgatccactacttgcaaaatcgatgatcatgatgtattctgcccatactggggcttttcgtgtatgattaccattagcagccttgcagataagcagtgggcagccgtagacaactacatgggc

SEQ ID NO: 17867 - DNA, 1059 bp, Oryza sativa
  Clone ID: PAT_MRT4530_23479C.1
atgaggcagagggctgataatcttagagagaaggttcgcacactgtttcggacttcgggtgacgttgttgcaaggatgaagttagtggattcaatccaacatctaggagttggtcacctgttcaatgaagagataagcaccacactaagtgatatccatgcaagtgaatttactagctctagcctttacgaggttgctcttcgatttcgcttgctcagggagcatggcctatgggtatctccagctacattcaacatattcaaggatgatgatgggaggtggtggaaagaccttactggatatgtggggctaagttatcttagggatcgtttggtggagagctacacatggtcccaaatgttgttctacgaggaaggattagcactcacacggataatttttaccaagataattgtattgatggttataatggatgacacatatgattcccatgccaccatccaagaatgtcggaagctaaatgaagccatacaaagatgggatgagagtgcactatttctcctgcctgagtacctaaaaaagttctacaatgaattgttgaataacttcaaagagtttgaggatcaagtggcaatcaacgacaagtaccgggttgcttatgctaagaaagaggaagctgaatggtcacataataattacaagccaagctttgaagagcaggtggctttgtctacaaagacttcgacggtgcaattgttatgtgtgtctacgacggttggccgggcgaggaccgaggccatgctcaaggagcagcagaggtccggcacggtcaagaagccatatgacaaggcccgcgtggtccaagtggcgacggcccaagacggcgcgtgcgcgtgcatgcgcgagcaaagggcgcgggtcgattgggagcacgggcatcggcctctcgctccggctggcagcggcaaaagtgcggcagcctgcatggacatatgtccgtgcggtcggcgtacgtcggcgctggcacggacatggcagcgcggcggaagacgaccgagccgactcggcgacatcggcgtcgagcgtgacttgatgtga

SEQ ID NO: 17868 - DNA, 399 bp, Oryza sativa
  Clone ID: PAT_MRT4530_2347C.1
aatggaaaaagtacgaattacccccccgaactatcgcggtcatccgaattacccccccgaaccataaaaccggacattcttcacccccaactataaataccggacgaattaccccctcgacccaatccgcggtagttttggtctacgtggcgtacacgtggcagtccagtcaacattctctttataaaaaaatgtgggacccacttgtcttacactactctctcctctctctactctctctctctctctctcacttctctctctcacttctccaggcgatggcggatgcggagaggccagcacggcggctaggcagcggcgagcgcggcggagaggcgagagcggtgaagaggcgagcgcgacggcgaggcaaaggcgagcgcggcggagagacgaggc

SEQ ID NO: 17869 - DNA, 579 bp, Oryza sativa
  Clone ID: PAT_MRT4530_23480C.1
ctatagggaataggcccgaggcagaaccggcacgaggcaagcaatgacgttattaatctccatagttcaaccaccatccctcctggcaatccaattccaacccctccagaacaacagattcaagaggaataatcctgccatctcagcaagagcaagaactgtcagagctagggcagcagagctcccagcaggagttgtggtgccaagggagcagcccaagctgagtgagccattcctagggttcaccaagactgcagaggtttggaactctagggcctgcatgattggtctcattggggttttcattgtggagctggtgctgagcaagggtgttcttcagacaattggactggaagtggggaaaggactcgatcttccactgtagttcttcaggaatttgtggttgatgttcagggactagagtgacctgtttttctcttcagaaagattggatatgtcaattaatgctatgcactaaatatgtactcctatatgctaagccccttacattccgttgttatttagcatattctgtcgttgccacagtaatcaacaagattttcatcgcaagatattcct

SEQ ID NO: 17870 - DNA, 400 bp, Oryza sativa
  Clone ID: PAT_MRT4530_23481C.1
actgatgtcacttggtcattactcaatgagggtgtgttttagtggcatggcgttttatctgcgcgacgctgttctcctattgaacttgcgcgctcttatagcttcattttggaagcggataaaaacttatgccaagttacgaaaggcacttagttcactcgacggagcacttccagatgctacatatgatgaaatctgtgcatacgacgatgagtgtgccatctgtaggggaccaatggctcgagctaaaaagttatcctgcaaccatctatttcatctagcttgcttgcgatcatggctggaccaaggattaatggatggttactcatgtccaacttgtcgaagacccttctttctgtcatctcaagggcacacaagatctacagcagaggtaggaaac

SEQ ID NO: 17871 - DNA, 468 bp, Oryza sativa
  unsure (1)..(468): unsure at all n locations
  Clone ID: PAT_MRT4530_23482C.1
cccacgcgtccgcccacgcgtccgcccacgcgtccgatccaattcaaatttgaatttgaattcaaatattttttatatatagtatttctatatatctaaagtttatagacatcaagtttacagacccaaagtttataaacccaaagtttataagtcaaaagtttacatacccgatttaaatttgaatttgaattatatctcattcaaatttgaatttgaattcaaatattttctatatatatagtatttctatacatctaaagtttatacacctaaagtttatagtcccaaagtttataagtcaaaaagtttacatacccgattcaaacttgaatttaaattcaaattttttatatatagtatttctatacataaatttttctaactttttgttttttttaaatttttgtgtggtgtactgaagtagggaagagaaaaaggggaggaggaaggngagaagagggacgt

SEQ ID NO: 17872 - DNA, 767 bp, Oryza sativa
  Clone ID: PAT_MRT4530_23483C.1
caggaattcggcacgaggttttttttttttttttttttttagagaaggcctagggtttcatacccaaattcaaatgtgaggtccatcaaaaaaagcatacccaaatcacaaacttcacatgtaagcttatattccccacaaattcatagatctgtgatgaattcttgaaaaaaaaaaccacaaacaacccctcaaattggacttcatacactaagctgcatcttcctttgtctctttctttgagtccctaaaatgaattttagttcggatgtttacaattgagtaagctatctccttttctaacatttttgcacttttttgagcaaggatgctctacatcttctacataatcttctctcaaatctctcttcttccatcatgtactactctcttccggttttcagtttttctcgttagttgcagcgcggtattgattgtttcattacttgttaacccttatcaatgttgccaaacataagtttttacttctttggctttagtctaaccatcctagttttgtattcacttagttttccctgattcctctctagatgtagtaactctctcaaagcttggccctgcactgacggggctccggacgggcacgggaccaacactgagctgccgctcgggggccttgagctctctcggctaggagaagtatgtacgaggacgaggacgtgggtggagattaggaggacgatgaggagcgggaggaggtcgaggagccaggggtggagcgcgacggtgtcggcgacctgcgccat

SEQ ID NO: 17873 - DNA, 2742 bp, Oryza sativa
  Clone ID: PAT_MRT4530_23484C.1
atggcggcggtggactgcccctacctcgccgcgccatccaccgcggccaccggcggggcgattggagttcgggtggaggcatgagtcggttgacttccagtgactgataattgatgggcatccaagatgccaccgtggatgttctatggcctgagccagttgccaggatcttcgggttgttgccatcctcgttcctcgaggcctgatggtgcttcagcctgctggcttgcggttccgaggcactgcaagacccgcgaatggtagcatgtcggaggttctctccatggtagatagagtacgagaagttttaccccatattccctgacgagctaattattgaggatctgatgagaacaaataatataaacgctactgtaaataatcttctgctgatgcaataaaagataaaccagcaatacaacatataagcacgatgtttaccggctataagttcatatatgaaaggatgtatagttaagttaaagacgaacctgggtgtccaagcacctcttggttcttgtaataagtgttttttttagtttatttcttcccaatgtactaaaatgccccggctttgtatagtaatcacagctgtataatattatgctcaatatggcgtaggatagcatgtgtagaagatgttatcatccaaataaaagtgtgtttgtcatcccaataaaaaaaaaaaaaaatgagagcccttgaattccaaaaaacttataagcaagcagcaggatctttttctgagtggagaggcagactagtcagaaattttggttttgtcattgacttgataagcttattgatgtcacttggtcattactcaatgatcttctggctccgtggtatggcgtttcatctggttgacgctgttctcctattgaacttgcgcgctcttatagcttcattttggaagcggataaaaacttatgccaagttacgaaaggcacttagttcactcgacggagcacttccagatgctacatatgatgaaatctgtgcatacgacgatgagtgtgccatctgtagggttggaccaaggattaatggatggttactcatgtccaacttgtcgaagacctctctttctgtcatctcaaggtcacacaagatctacagcagagagagagataatatggaagagaaggcagctaatgtggaaatcagcagtgcaaagactaaatgggagcttagaggagcaaaaacagcaggtgcctctgaggaggctgctctgcagtttgtgccaatgaagaaacaaccaactgcatctgttgcttactcagactcctgttctcgctcccccaacttcctgaccatcaaaaacgcattatctcctggccgcttgctaccagctcttccatattgcaactatgcaagggagaattctaccttgattcgtggcagtgaggcagaagaggtttggttggttgggctggaaagggccgaaagagacgcatacactcatgcgtgcagaggtgctggtcttgattctagctgggcaccaccatggtcgagccctgggatggacaatcccagttcttccagcgccgtgacatcagtggggcttagtggagttcagatgatgatgaggcagttgacttcagtgacctagctgggcaccaccatggtcgagccctggagtctatggcctgagccagttgcaggatcttcggttgttccatcctcttcctcgaggcctgatggtgcttcagctgctggcttgcggttccgaggcactgcaagacccgcgaatggtagcatgtcggaggttctctccatggtagatagagtacgagaagttttaccccatatccctgacgagctaattattgaggtacacttctatttcctctcaactctagttttagctattaccttacgcactggatctgatgagaacaaataagcacgatgtttaccggctataagttcatatatgaaaggatgtatagttaagttaaagacgaacctgggtgtccaagcacctcttggttcttgtaataagtgttttttttagtttatttcttcccaatgtactaaaatgccccggctttgtatagtaatcacagctgtataatattatgctcaatatggcgtaggatagcatgtgtagaagatgttatcatccaaataaaagtgtgtttgtcatcccaataaaattatttgtcgatgagagccaatgaatagtgaaaacgtctaaacgtgtgctgctgttcttgtgtgcctccttcattggatatgaaacgctgacagctgtttgatggacatctgataaactgtctttaatcttcgttttctacctcctagtgggtttttttttttgtaatatgttactggttttgtaaattgcataatatctccttaatatcggagtctgccagatccgcccgccgagtcggcatccccgtcgagaggggaccccgcccaccactgcagcgccgcggcgctggccgcggtggatgccgcggcgacgtagaggctgttcaccgccgccatgcgccgcgcatcgaagacaggtcccccacccctcctccacaaccctatggcctcctcgtcgtcctcgtcgtcgccgccgccgattcgccggcgatgcgggggaatcgcggggttgcttgcggctcgggggaggtgtcgacgacggctttatttcgggggggccgcgacgccgtgagaaaaggggggattgaggggaggaagaggaaggtgggggggggagccagggggacaaaattattgacgacg

SEQ ID NO: 17874 - DNA, 672 bp, Oryza sativa
  Clone ID: PAT_MRT4530_23485C.1
tgcaggatttgctaagtcagtatgggaactgcagcattagcacttaatacattgttgtactgcctatataggtcaagccagtatctttgtacaattggctgaagaaattggttttatcttaggatgaagtctaaggaaaatgggagcattcagaaggcaggaaaagttgatcactcccaaagaggcagaccaaactgggttcttgttgcaggaggagttttacttagcacactgtcagtcagacttgggtgcaaattaaagcaaatgttcgatgcaaagaagcaaaacagtatgcccaaagtaaaaagaaggcctggggcatgtgatctgcactcgaatctctaccggtttaatgaccaaacaagctgctactgttgtatgtcagcggttgcagatggagtggaaatcaggcaggctcctgggagtcctctaccaaaatcaactgacctctcccctcttcttcttgtggagataccagggccagaatcaagcaaagagaacagtggtgtcatgtggacatcatcacctgatcggctcgaagatcctcgtaaaccatttcagtactcgaacagttctggctctccctgtttttcagaatcaggttctgacatctataacaagagagaggttatacagaagctgaggcagcagctgaagagacgtgatgagatg

SEQ ID NO: 17875 - DNA, 1103 bp, Oryza sativa
  Clone ID: PAT_MRT4530_23486C.1
cccacgcgtccgcccacgcgtccgcccacgcgtccggcccgctcggtcatcggagcgagaaagctcgccggcgacctcaccgtgcacatggcgcgcgccgccatttgcctagccgtcttcttcctcctcgccgtcatttcatccgctgcctcagatgacccgttgacaaccgtgcagcagccaattagccaggtaagccatggcgccaccatggaggaaaagagaagttcgccggtgaagcaagacgaaggcgaggagaaggcagccagcaaggccgtccaagccggtgatcggcgagacggcgagcttgacgtcggtagaggatcaggccaagatgctgagcatcaccgaggtatagagatcaagaaattagataatgatgacgatgatggcagtgattgggactctgttgatgactccgattcggaccacgattcagactctgatcatgatcatgactcggactcagatcatgattcggactttgatcgcggctcagattcggatcatgattctgactctaaccatgacatcgatggtgatgacaacgacgacgatgacgacgataataatgacgacgaacacaaaacaaacaagacaatgagtaagaagaagaagcgctcagcttctggtgggagaagggtaggtccaggtggtaacaagagctaattaagaaagaaaggaaatgctatgggggtgtttgggagagaggggctacatagggacttatatttttgtgagagggactaaagtttagccccactttaatccctccaaccaaacaccacctatatattgcaataatggtgtgtgagcttggtgcaacgtgcttcctccacaaatcgatggatggcgcgttcttatctttatttaacttgtataattatgagtgtgcttagggcatccacaatagttatctatatgctctctacaagagattcatgtcagcatatcttcctacttggaagatattaaatgaagagagagagagcaaaactatctactaacttggagatagtctatagataaaacgaggcaatagatcgatacccatgtagacatactattaaggaggtttactattaatatagtctattgctgag

SEQ ID NO: 17876 - DNA, 555 bp, Oryza sativa
  Clone ID: PAT_MRT4530_23487C.1
atggcgttcatgagttcagctagcgaagaggaatccgctggtctcaaggcccccacggatgcgcgcgtgattcgtcagcgctatgaaggcgacgggccgatactctcggacgacgcgctactgccagctgatccaggcgcggccgccggcgcagcggcggaacaacagcagcagcaggatgaggcacggagcgtgcggtgcgagtgctgcggggtggcggaggactgcaccccgacgtacatcggccgcgtgcgggagcggttcgacggcaggtgggtgtgcggcatatgcgcggaggcggtgagcgagctgcggaggcgcgacccggcgctggcggtgcgcgaggccgtggcgtcccacgcggcgctgtgcgccgagttcaacgccaccgtgcgcgtcaacccggcgctctgcctcgtgcgcggcatgcgcgacatcgtcaggatcagctgccgcggccggagcggtgactccgcctcgccgtctgcagctcccggcggcggcgccggcgccaggatcggcaggacacgaagttgcgcgctgccgtacgtttga

SEQ ID NO: 17877 - DNA, 287 bp, Oryza sativa
  unsure (1)..(287): unsure at all n locations
  Clone ID: PAT_MRT4530_23488C.1
ccgacgcgtgaacacagcagcagccgttgttacggatgcagcacctgcgtctgaatcgggggccacatgcgatggaactgctcgaactgatcannangctccatacccggctgaacttcttaggtttccgccgctacaaccaccgtatcaccgaccacagtagcgcataagatccactccctctctagaaagaagacggcctctaagcatacatccagcgtcaggacctcctcgagccccaacataccataagagcgagccaagtgggactgtcgtgacaggacgat

SEQ ID NO: 17878 - DNA, 2509 bp, Oryza sativa
  Clone ID: PAT_MRT4530_23489C.1
gaggggggagagagagagagagcagagcttgaactgaccggccggtgcagtacaaataaaaattatacgagcaatcatgtggttgctgccgctgatctgcttcgtcttggccttgctgctcgccgccggcgccagcggtggtggtggtgccgcggctggaggaggaaatggcggcggcggcgagcggcgtggggtatacgtggtgtacttgggcgccgtgccaccgcggacctcgcccaacatcctccagcagacccatctccgcctcatcggcgccgtgctcaaaagggggcagccagtggagagcgtggtggtgcagcagtacaagtacgccttctccggcttcgccgcgcggctgtcagcggcggaggccgccgcgctccgccggaagcccggcgtcgtctccgtcttcgccgaccctgtctaccacctccacaccaccaggtcatgggacttcctccagcagcagacgacggccgccgtcgacgtcaagactggcggctccgcccaccgccgccgccgctcgccccgcgcccgcgccgccgcagcatcagcgtcgacgtcgtcgtccccgacggccgacaccatcatcggcctcctcgactccggcgtctggcccgagtccccgagcttcgacgacgccggctttggccctgtccccgccaggtggaagggcgtctgcatggccggcgatgacttcaactcctccagctgcaaccggaagctgataggagcaaggtactacgatgtcggcggcgaggcgaagcggcagtcagcacggagcagcgggagctcgccgcgggacgaggccgggcacgggacgcacacctcgtcgacggcggccgggaacgcggtcaccggtgcgtcgtactacggcctcgcggcggggacggccaagggcgggtcggcgtcgtcgagggtggccatgtaccgcgtctgctccggggaggggtgcgccgggtcggccatcctcgccgggttcgacgacgccgtcgccgacggcgtcgacgtcatctccgtctccctcggcgcgtcgccctacttccgcccggacttctccgacgaccccatcgccatcggctcgttccacgccgtggccaagggcatcatggtcgtctgctccgccggcaacgcagggccggacgccgccaccgtcgtgaacgcggcgccgtggatccttaccgtcgcggcgagcacgatcgaccgctacttccaatcggacgtcgtgctcggcggcaacaacaccgctgtcaagggtggagctataaacttctccaacttgaacaaatcaccaaaatatccattgatcaccggtgaatcagccaagtccagctcagtttctgataccgagtcagcaagtcactgtgagccggggacgctggatgcgagcaagataaaagggaagatcgtgctgtgtcaccactcgcggaacagcgacacgcccaagacggagaaggtcggggagctcaagagcgccggcgcggttggcgccgtcctcgtcgacgaccttgagaaggccgtcgccaccgcctacatcgacttccctgtcacggagatcacctccaacgccgccgccgacattcacaagtatatctcctccaccagtgagcctgtcgtgaccatcacgccgacgatcaccgtgacggagtacaagccggcgccggtggtcgcctacttctcctcgagaggcccgtcgccgcagacgcccaacatcctcaagccggacgtggcggcgccgggggtgaacatcctggcgtcatggatcccgacgtcgacgctcccggccggcgaggagaagccgtcgcagttcaacctcgtgtcggggacgtccatggcctgcccgcacgtggccggggcggcggccgccgtcagggcgtggaacccggcgtggagccctgcggcgatccggtcggcgatcatgacgacggcggcccagctgaacaacgacggggcggccgtgacgaccgactcggggtcgccggcgacgccgtacgaccacggcgcgggccaggtgaacccggccgccgcgctggacgccgggctggtgtacgagctcggcgaggaggactacctccagttcctctgcgactacggctacgacgcgtcccagatcaagctggtcgccgcctccctccccggcggcttcagctgcggcgccggcggcaacgccagcgacagcaaggacctcatctccggcctcaactacccgtcgatcgccgtcacggggctcggcaaggccggcggcaccaggacggtgagccgcgtcgtcaccaacgtcggcgcgcagcaggaggcgacctacaccgtcgccgtcgcggcgccggccggcctggacgtgaaggtggtgcccggcaagctggagttcactaagagcgtgaagaagctgggtttccaggtgtccttctccggcaagaacgccgcggcggcggccaaaggggacctgtttgggtcaataacgtggtcggatggaaagcatacagttcgtagcccattcgttgtcaccatctga

SEQ ID NO: 17879 - DNA, 1011 bp, Oryza sativa
  Clone ID: PAT_MRT4530_2348C.1
atggcggcctccccccttgccgcgctaggggatggatctggtggttttgagctcaaaaacgccggatctggaggaggcggtggcacttggccggggaggaaaaggggagggacggcggtggaactgggccggggaggattggaggagagggaggtggaggcagtactccgatgcggaggggaagcatgcggcggtccagaagacgaggaggtttcgaccaactcgccgccggcagcaccgccaactgctaaagtcggagggcctggcagccgacaaagatacgaggagcacccctcggtcgacatcctcgccgaggagccggcgtccacaagctgcaggctgcagcgcggacgagcgaaggagccaaggcggcagcggcggcggcggcggcggcgcgtgggaagaggagggagaggcggagataagcctgagcgcgagttcgggccgctgagaagcgtaacaccctactcctatgttctggtggatctgtgcgtgaaggaatacagagagctggagagcgagcccgagttcaggccggaagtgacctctgacaagcagagcacacgcctcctgccccgctcgcccgcttttccggtggacgcccatttcaaccttcatttaatggccagcgacttccttgccatacttgcgctgaaacctggaatggctctgaccgggactgacataccaactctaggagttagcacgccggctccggctagggacgagagccaggaagctctcatcattccgacgggacggggcgaggcgtgcatgggagacggcggcggccttccctcacccggatctgccggcggctatcctcccccgccccgatctgccggcggcggccctcccccgcctggatccgccggtggccaccctaccctgccccgattcgccggcggcgctctcccggcggccggcgcctcctcgttggatccgggaaaggagtacgatgtcaacggtggcggcagcggcttgagaatgacggcgacagttggaggataa

SEQ ID NO: 17880 - DNA, 1293 bp, Oryza sativa
  Clone ID: PAT_MRT4530_23490C.1
atgaaggagaaggacacgagcaagcagctgctgccgacgcgggcgtcgtcgtcgtctcgctttggcgggaaagtgggcagcaatatcgcggtcgtgcttctcctcgtctccttgggcttcgtcctcggcctcacctcctccaacgccatgttcctcaaatccttctacccctcctctctcatgccatcatccatggcgccattgcggctagtgctatcgtctacttctacttctccgtcgccgccctcgccaccgccgccgccgccaccgccaccgccgcagcaacctgcaccgatgcacagcatgggagatgaggagctgttctggagagcgtccatggcgccgaaaagccggcggcggctgccggacggcgtggtgccgaagaaggtggcgttcatgttcctcgtgagaggggagctgccgctgaggcccctgtgggagaagttcttcgaggggcagcgaaccgatcactactccatctacgttcacgcccacccgtcgtacagcttcaccggctcgccggagtccgtgttccacggccggtacgtcccgagcaaggcggccaagtggggggacgcgtcgctggtggaggcggagcggcggctggtggcgaacgcgctgctggacgccggcaactcgcggttcgtgctgctgtcggaggcgtgcatcccggtgtacgacttcgccaccgtgcacgcctacctcaccggcgccaacaccagcttcgtcgacagcttcgagaacggcggcagccggtcgcggtacagggagttcttcgccggccgcaacatcaccctcgcccggtggcgcaagggcgcgcagtggttcgagatggaccgcgcgctggcgctggaggtcgccgccgacgacgagctctgcttcccggcgttccgcgacttctgcgtcgggcgccgcgagtgcctcatcgacgagcactacctcgcgaccctggtcaccatgctgggctggggccgccgcaacgccaaccggacgctgacctacgccgactggtcgcggccggtgaaccggcacccgcacacgtacacggcggaggaagtgacggagaaggtcatcggcggcatcagggcggacaagcggtgctcgtacaacggcgccagcagcggcgggatctgcaacctgttcgcgcgcaagttcccgccggagacgctgcagccgctgctccggttggcgcccaaggtcccggcccgcggccgtcagaagccgtccctcactagaatcattaagcagaaggcgaggccatggcgaatagcaccaccgtccaagtcgccctga

SEQ ID NO: 17881 - DNA, 294 bp, Oryza sativa
  Clone ID: PAT_MRT4530_23491C.1
atggccagctttgtgtgtgcgatgctgtgcacagtgctcttgctggggtccaaaagtggcattgtttgtccacatagacagattgcatgtgtggagaagaaaagggatggggaccatgtttttgtggagtcctcgcatcctctgttggtgcctgatgaggacatcctccactattacccgctggcaaagacgccaaagtcgggcggcgaccgggggggcctcggtgaggacatcctccactattacccgctggcaaagacgccaaagtcgggtggcaaccgtgtgagcctttga

SEQ ID NO: 17882 - DNA, 265 bp, Oryza sativa
  unsure (1)..(265): unsure at all n locations
  Clone ID: PAT_MRT4530_23492C.1
gtccggaattcccgcgtcgacccacgcgtccgcacacacaatgcacacaggattgagggagaagaagataaggagagagagagagagagggggagggagggaggggtatcnnagcancttatctagctttgccagccctggcgaggagctctccttgccttgccgacgctgttctcctccttggagtggtgttttcttatattgcaccctttgttgggggggggcgccaaccattttttactacctcatctcccccttttcctca

SEQ ID NO: 17883 - DNA, 948 bp, Oryza sativa
  Clone ID: PAT_MRT4530_23493C.1
atggggagggggaagattgtgatccgccggatcgacaactcgacgagccggcaggtgacgttctcgaagcggaggaacgggatcttcaagaaggccaaggagctggccatcctctgcgacgccgaggtcggcctcatgatcttctccagcaccggccgcctctacgagtactccagcaccagcatgaagtcagttatagatcggtatggcaagtccaaggatgagcagcaagccgtcgcaaatcccaactcggagcttaagttttggcaaagggaggcagcaagcttgagacaacaactgcacaacttgcaagaaaatcatcggcagttgatgggcgaagatctatctgggctgaatgttaaggaattgcaatctctagagaatcagctggaaataagtctacgtagtgtccgtacaaagaaggaccacgtcttgattgatgaaattcatgaactgaatcggaagggaagtctagttcaccaagaaaacatggaattatacaagaagatcagtttaattcgtcaagaaaatgctgagttatataagaagatctacgagactgaaggaccaagtgaagtcaatcgggattcaccaactccttacaattttgcagtaattgaaaaaacaaatgttcctgtgcaacttggactcagcacactaccacaacatagtgacgccgaacaatcaactgctcctaagctagggtaacacttagctctatacagctgaatccatgaccagaacaacattgctttgctacacccttgtatgctgaagggatactatctgctgtcaagagttgatactcagatcaagaaaaaaagaacttttcatgccatagcgattgagaaatggacttgtatactggaaataaatgccacagtgaattgagctgcggaatccacgccatgagtgccttatgattcaatttttgcatgtatttttcat

SEQ ID NO: 17884 - DNA, 773 bp, Oryza sativa
  Clone ID: PAT_MRT4530_23494C.1
gcaatctctagagaatcagctggaaataagtctacgtagtgtccgtacaaagaaggaccacgtcttgattgatgaaattcatgaactgaatcggaaggtctctatagcattttagtttttgtaatcctccatgaaggatgtttattattattattattactttagtatactgactctacttggttgcagggaagtctagttcaccaagaaaacatggaattatacaagaagatcagtttaattcgtcaagaaaatgctgagttatataagaagatctacgagactgaaggaccaagtgaagtcaatcgggattcaccaactccttacaattttgcagtaattgaaaaaacaaatgttcctgtgcaacttggactcagcacactaccacaacatagtgacgccgaacaatcaactgctcctaagctagggttacagttgaatccatgaccagaaaaacattgttttgctacacccttgtatagctgaaaggatactatttgctgtcaagagttgatactcagatcaagaaaaaaaaaactattcatgccatagtgattgagaaatggacttgtatactggaaataaatgccacagtggaattgagttgtggaatccaggcaatgagtgttttatagattcaatttttccatgtatttttcatatattaaccagagcgggcttgtgtaaaaaatataaccaggcaaggaaaattagctgtattgtgcatatggagcaaatttcaggcgttactaccattaaaatcatgacatgct

SEQ ID NO: 17885 - DNA, 362 bp, Oryza sativa
  unsure (1)..(362): unsure at all n locations
  Clone ID: PAT_MRT4530_23495C.1
tgctgtctcaacatggcggcgcccgggatgtccantaccgctgcttcatctgcggcctcgncctcgggccaccgnacgaccgctccctccgaaagccgccttctccaccttacgggcgaagatcctcngactccaatgaatcatccaaactcacaggggaagacgagggggaggtcaccctggggtttggcttccgatccacccttcctccctcccgaagcaagtccgaatgcgnccgacgcccatcccaangggcatgnaacgggcaatggancctccgnaccggncngcaaacntcnaccggtctaacnnaagncccnantcccccgcccgncctccccggcngggnnggcttggttttt

SEQ ID NO: 17886 - DNA, 1310 bp, Oryza sativa
  Clone ID: PAT_MRT4530_23496C.1
atggagatctccttcgacgcgtgggtcggggtgcagcggcacgggcaggacctcgcggaccgcctcgcgcagggcttctcgggcctcctcctccacgcgcacccgccgcagctccactggtccgcccccgcgctgccggccaagctgatacccttcgagatcgacctccccgtcgtccccttcgtcgtcggagggaggcgggccgggggcgggaggggcgccgccgacctccccgccgcggccgtcgcgtcgttcgtcgagatcggcgggcggctcggccaggcggggtccgagctcggggcgtgcgtcgggggcgccgtgcagcagctggcgcggcagatccttgtcccgttcctggcggagagcgcgcggggccggaagtgggaggcgattccgccgcagcctgctgctgcggcggcggcggcggcgacggtgaatgagggggaggtggctctcgcggtggagagagctgaggataaggggctcgcatcggagagggtcggagacagagggcctctcgaggtagctgctgcagcgtggtttgcatccagcggaagtgccattgcgactagcatcggtgttgcggaaggtggtttggatgaggaagatggtcggcagttctggactagtaatcaccttggaaacaccgctggacaacttggctagaccatctttatctgttcaattgaatggaggttttgagttatgacgtctattcctgtaagctgtacatatcgctgtatatattgcacggtgtccatactttcatgtttctggagagagctgccaacctataaattgtattatgtggacgttggttgaatctccttttagtgccccttattataggttttagcccagcaccaaagtcgcaattcaataggtaaggaagtaagtagctggagctgttgcaggtgcgaatatgttgcgtccattttgtcgtcatcgcttgtaagtagaatgtatgtattgctgtagcacaccataatatgggttcctgttgccattgttggtcaatggtctggtcgacattgtagccctcgttgtcacactgttttctgcgagggaaatgattttgtacttttgtcctctggagtttgaactgtccttttgtcaaaagattaagattcaccttcaagagcaaacaagacacaaggttcacccctatgtttcaatggcctgacaattctctttcatttggagttgcacaagccttagcgtggaaaagatctggccttatggtgaggcccagcattcaagtcagctcgggcgatccaagtggaatggacaagtcggcagttcaggactag

SEQ ID NO: 17887 - DNA, 431 bp, Oryza sativa
  Clone ID: PAT_MRT4530_23497C.1
acgtcttggaccctatttagcggccccccctttttttttttggtgctataagctctgggggtactataaacaatgaacttatcaatttaatcatcctaaaccccaaatataaaaagggggatttgaggaattattactagctgcccaaaataatttggaatatatatcatcaatacaatgctagaactaagattcttttattctttcctaaatatgatcatgtggtatgggcaaagatgcctgcgcatccagacactcattctgatggactgaccgtgctgagactacgacatgttaacagagtttggccttaacgctccctgaacagactcaatgtctgactgagtacgccatgttcacgtccacttcagcacattcctagcactctgctgcttttctgcagcactcttcagggggggggcatcaatttg

SEQ ID NO: 17888 - DNA, 530 bp, Oryza sativa
  Clone ID: PAT_MRT4530_23498C.1
tccttgactgccttgaagctccaacgccgtggcggtcgctctataactatggatcccccgggctgcagaaattcgtactaacactatcccatttcgcgttctcaccgaaaccaaattttaaaaaggaaatgatcggaatcgcccatccagcccgtccgaattcaaattaatccgaattggtccctgcttccccccccccctcctgggtgttgtgctttctttttccccccccctggggcccggggaccccccccgcgtaaagggttttcataaaaaaaaaaagggggttttcccccccctttccgggggggcttttctcccggcaaataaaaaccctgcgccgcgccgtcctctctttctcaaaaggaaaaagggggtcctcttcgggggggttatctccctgtgggggtaacaaaaggcgggggttgctctcttccctcccttcccttttaaaataaaaaaagaattattttttttcttgggtttctctctcccaccactctcctctaaggatgggggggttcattttg

SEQ ID NO: 17889 - DNA, 300 bp, Oryza sativa
  Clone ID: PAT_MRT4530_23499C.1
atgttgggatcaggggtggaggaaggggaacgagaaaagatgaaggagttcgttagctctagggagatggcaatgggaggtgatagccccacgagtggggacctggtgttgacggtggggacaaagcagaaagattggttaagtggtgatgaccggtggtggtggatccaatggtattggtggggagctgccagagacatggaagacgatgacatgcgaacagctcacgccagaaagaagagggagggggaaaggaggggcctcaccgacaccattgaagccttccgcccagtcaactag

SEQ ID NO: 17890 - DNA, 2913 bp, Oryza sativa
  Clone ID: PAT_MRT4530_2349C.1
atggagcgcgcatcggtgatcgggggcaccatggtctcgctcatggtgaagctcagctccatcgccgggccgaggtattcgctaatggcgggcgcgaggagtgatgtcatcttcctcggggccgagctcgagagcatgcacgccttcctcgagaagctctccggggtggacggtccggaccctcaggtgaggtgctggatgaaggaggtgagggagctggcctacgacgtcgaggattgcatcgacgagttcatgcaccgtgtcgatgtcgtccatggtgccgtgacctctaaccatggcttcagcagccttaggggtttggtgagccatgccacccggctcgtggccgtggcttggatgcaccaccgcctcgccagtgagctcaagggcctaaaggcccgtgccatcgaggtgagcgaacggcgatcgaggtacaaattgggggatgacatagggatgctaggaggctcggccatggccaccgacccacgggtcagtgtcctctacgccgacacaccagatctcgttgggattgatcgaccagcgagtgaaatggtcaactggttaactgatgatgtgtgcactctcaaggtgctctcaatcatcgggtttggtggtttgggaaagacgactctcgccatggaggtgtaccgtagagttggagggcagtatagttgcaaagctttcgcaactgtatcacaaaagcttgacacgaagaagctcttgaaggacttgttatcgcagattgcacaaaatgaggttgaccacatgggcacttgggaggaaggtcaactcattcgcaagcttagagagtgcctactgaacaaaaggtacttcatcataattgatgatgtttggagtaaatcagcatgggagaaagtgagatgtgctctacctgagaacaatcattgcagcaggctgctaacaactacaagaattgactcagtagcaaagtcatgttgttctcaccctgatgatctcatctacagaattgaaccactcaaagcatcagattccagaaacttgtttttcaagagaatttttggctatgaggatgtatgcccaccacagttgaaggaagtttcagaccagatcttgaaaaaatgttgtggttcaccattggcaataatcagcatagctagcctgttagctagcaagcctgtcatgttgaaggagcagtgggaaaaggtgcttatatctataggttctgcattagagaagaactctgatcttgaaggaatgaaacaaatactttccctcagttactatgacctcccttactacctgaagacatgtttgctatacctcagtttgtatcctgaggacttcaagattgagagggatagcctgatccagcaatggattgcggaaggattcatcggcgaagaaagaggccagtctgtggaggatgtagcagagagttacttcaatgagctcatcaacagaagtatggtccaaccaatggatataaattgtgatggtaaagctcatgcttgtcgggtgcatgacatgatgcttgagcttataatatcgaaggcaattgaagagaattttgtcactttgttaggtggtcatcctgttgcagctaaaccgcaaggaatcactcgccgattatctatccaatgtgataaagagattaccaaaacaaaaggaggaatgaatctgcttcatgctagatccctaagtttatatgtacaagcttgccagttacctccattgtccgattttcgggtcttgagagtattaaatcttgagggatgcctaggcttgtgtgacaatcatctgaaagatatcagcattttgtttcacttgaagtatttgagcctttgtagaacatggatttcaaaactcccaccagaaataggagacctgcatagtttggaaacattagacataagggacacaaatatagaagaactacctggaaccattattaggattgtgcaactgaagtatatacttagtggtggccatacatggggaaaaataaagctacctgatggtatagggagcatggcatccctaagagtcatatctggattcaatatttgttgtagctcgaccaatgcagtgcaagaacttggtactctgaaaggtttaagggagcttacaatcaactggactgatttcagctccggcgatatgaagcgccaagaggctatgatgaatactcttggcaaacttggcacaagtaacctccaatctttcgcgatttgcagtcgcaacttcggttccctggagttcttagattcctggtcgccaccaccaaatcatcttcagagatttcggctgtctgcatactactttctcccaagagttccaaggtggatggcatcactctgcaatctcattcatttaaacattaacattgaaaaactatcaaatgaagacattcagatccttcaggatttgccgtctctacttcatctcgacttatggttgaaatcacctcagaaggaggacaagatagttattcatggagtaggcttcccatacttacaagagttaatcttcagttgtgaaggaacctctttgatatttgaaccagcagctttgccaaaacttgagaggctacagatggcagttcatgtaaaggaggcaaaatcatatggttaccaatttggtattgagcaccttagatcactcaagaaaatttacatccaattattgtgtgccggtgcaagtgctctagacatcaaggatgctgaagatgcaatccacacaattgtgaagtttcatcctggtcatcctaggatagatatccaaaagtgtggtatggacatgcacttagaggagagaaataagaggcagcatcccgaagaaacgaatgtgcaaaacatgaatgctagcaaagaagatatgaaccatgccaacaagaaaagaaaagaatatcaaagctctagtgcacaataa

SEQ ID NO: 17891 - DNA, 2333 bp, Oryza sativa
  Clone ID: PAT_MRT4530_234C.1
tctcgtctagctcctcctccctctcactctcacctgcgtttgtcgccggcggcgaggaagaagaagaagagagagagagaagatggtggggatgttgccggagacgaatgcgcaggcggcggcggaggaggtgctgggcgacgcgtgggactaccgggggcggccggcggcgaggtcgcggacggggaggtggggcgcggcggcgatgatactggtggcggagctgaacgagcggctgacgacgctggggatcgccgtgaacctggtcacctacctgacggcgacgatgcacgccggcaacgccgaggccgccaacgtcgtcaccaacttcatgggcacctccttcatgctctgcctcctcggcggcttcgtcgccgactccttcctcggccgctacctcaccatcgccatcttcaccgccgtccaagcctcgggggtgacgatcctgacgatctcgacggcggcgccggggctgaggccggcggcgtgcgcggcggggtcggcggcgtgcgagcgcgcgacgggggcgcagatgggggtgctgtacctggcgctctacctgacggcgctgggcaccggcgggctcaagtcgagcgtctccggcttcggctccgaccagttcgacgagtcggactccggcgagaagtcgcagatgatgcggttcttcaactggttcttcttcttcatcagcctcggctcgctgctcgccgtcaccgtgctcgtctacgtccaggacaacctcggccggccgtgggggtacggcgcgtgcgccgccgccatcgcggcggggctcgtcgtgttcctcgccgggacgcggaggtacaggttcaagaagctggtggggagccccctgacgcagatcgccgccgtcgtcgtcgccgcgtggcggaagcgccgcctcgagctcccctccgaccccgccatgctctacgacatcgacgtcggcaagctcgccgccgccgaggtcgagctggccgcctcctccaagaagagcaagctcaagcagcgactcccccacaccaagcaattcaggttcttggaccatgcggcgatcaacgacgcgccggacggcgagcagagcaagtggacgctggcgacgctgacggacgtggaggaggtgaagacggtggcgaggatgctgccgatctgggcgacgacgatcatgttctggacggtgtacgcccagatgaccaccttctccgtgtcccaggcgaccaccatggaccgccacatcggcgcctccttccagatcccggcgggctccctcaccgtcttcttcgtcggctccatcctcctcaccgtgcccatctacgaccgcctcgtcgtgcccgtggcgcggcgcgccaccggcaacccgcacgggctcaccccgctccagcgcatcggcgtcgggctggtgctgtccatcgtcgccatggtgtgcgccgcgctgacggaggtgaggcggctccgcgtggcgagggacgcgcgcgtcggcggcggcgaggccgtgcccatgaccgtgttctggctgatcccgcagttcctgttcgtcggcgccggcgaggcgttcacctacatcggccagctcgacttcttcctccgcgagtgccccaaggggatgaagacgatgagcacggggctgttcctgagcacgctctcgctggggttcttcgtcagctcggcgctcgtcgccgccgtccacaagctcaccggcgaccgccacccctggctcgccgacgacctcaacaagggccagctccacaagttctactggctcctcgccggcgtctgcctcgccaacctcctcgtatacctcgtcgccgccaggtggtacaagtacaaggccggccgcgccgccgccgccggcgacggcggcgtcgagatggccgacgccgagccatgcctccactgatccacaccgtccatccatccatccatcagacggctacgatttcttcttcgcatcttgtactatatatatactagtatactactagtacgtacgtacgtacgtgtgtaccaagcgaggcgtgtatgcgtatacgtatacgtgtacgtgtgcctgcgtgtagtataatggaattaataacttgttagaggggggaaacagtaaaaaaaatgacgaaattaatggtggggattagggagagatttttaagggtggtggtggtggggtcggggtgtcagtgactcgaggttggtgcattttgtgtcgtgtgggagagtcttcgtggtgtggtaaaaaaaaagagaacaccacggcttcatcagtgtacaatcatccgatcgaaaggaaaagatgaaaaaattgcgtgcttttcattaacctacaaaaaaaaaaaaaaaaaaaa

SEQ ID NO: 17892 - DNA, 1599 bp, Oryza sativa
  Clone ID: PAT_MRT4530_23500C.1
atgcgcctccacctcgccctcctcgccgcgctcctcaccctcgccgccgccgcccagccgccattctgctcacactactacctgctcgactgcggcgccgcggcggccaccactgacagccgcgccctcgagcggctccctgaagcagggtacggcctacccgtttctgccggcgcaaaacttttttcctagccgaccgtggccgacaataagtccttttacttgcaccccattgcccgcaactgtcctcaccagatttcaaccctcggaggccagggtgtcgattcttcggcgggctccacctagatcttgatcgcggtctgcacctgcaagccagcttacagtaccagatgatttggccccagccgcagccgttcgcactgggagtgaatagtagaaccgagtgtacagtttattgtaggttacattgtcaagatattcaggaggaagggttgtgatccccaaaaagtgtttgatgatctttcgggacattgcccttgaaactagaaccggatactgtactgtgaggctgtgaaaggggacactaatatatatggtctacgtctttttgtttgtgttgagaggtaccctaaaaacaccttcaatcggtattggcagccattcccagacagtaaacatgcagtcagtagtacccacaatgtcacatcggctgatttttggaatcttccacctcctggggtgtttaatacagctttggtggcagaacaagatgcacccttggtgctgcaatggcctccaatacctctccagaatgatagctattatgttgctctttattttgctgatacagtctctgagagttcaaggacctttaatgtatatataaatgattacagcttctatgaaggcctaacagtaacatcagctggtctttctgtctttgcaacacaatggattctctcaggcttgaccagagttattttggctcctatttctggccttcctccacttatcaatgctggtgaagtctttggacttttcccactaggaggatacacatttcctcgggatgcacatgccctggaagctattaagagaagccttcaaaatatacctgatgattggaatggagatccatgtatgcctcatggatatgcttggactggagttacatgtgataaaggccaaataccacgtgtcatctcactgaacttttcaagtatgggcctctctggatatctttcatctgatattgcaaggctcaccgctctgactgatatatcttttgcaaacaatagcttgtctggacctattccaaatctcagcaacctgaggaatctcacaagactgcacctgcaggacaacaaattaaatggaacagtaccgcagacactggggataatcacatctttgcgtgaactgtcatttttcctttgtgtatttctcccttcctaccctccctacacatcttcattctccttttcaaactctaaaattggtgcaattggggccaactacctcttgccagtccactttcttttgattctcaattgctcaaagagagtggtgctgttcaacacagttgccctgattcacaatttaatgtttttgaaaagtgaaaatggagtgataaaatag

SEQ ID NO: 17893 - DNA, 215 bp, Oryza sativa
  Clone ID: PAT_MRT4530_23501C.1
tgatacgccctcgccacgtaaccgcgtttccgcgagaattttcccgcgcgtgctgagacaccaccgccggcttccgcgctcgaggttttatgaagcacatatgtataaatatatagccgcgagtaggaagatgagagttccgcgtggcacatttcacactcccacatcccacatacaccagagctatcccacgaccgctttattatatgcggccc

SEQ ID NO: 17894 - DNA, 486 bp, Oryza sativa
  unsure (1)..(486): unsure at all n locations
  Clone ID: PAT_MRT4530_23502C.1
aaagaacaagataagtgttcctcttgctgttcattttaacttcctcaatttgtataaacttacaagttacaacaatgttatgtacggctcgtataatacaagactactcaatcaactaaagaatagaagagaactagttgccacttgactcatcaaatgactgaaagaaaccatattgaagatcacatactcaatttgccaaaaacctgcatcctgaattgtcaaatgatacaaacaagacagccttcaaaactagaatggtgctgctaacgttgctcggcaaaatgaaattgtttctttttgtgacagatgctgatgatgtactcccagtaaccgcattgttcaatttagctgtatcaaaaaatctggcagcactgcagcttggatgcacacttnantccttggtaccatcacataagagataagaaagtgccatggtattgaaatccaaaacaaatttgtctgancaggaagncaggaaangct

SEQ ID NO: 17895 - DNA, 2064 bp, Oryza sativa
  Clone ID: PAT_MRT4530_23503C.1
atggcgccgcccgtccccactgccgccgctcgcctcgtcctccgccgcctcctctccacggcggtcgccgaggcggaggcggcggccgtggctcccgccgccgagaaggccgcggcgaagggcgccaagacggcggcggcggcgggggaggagaaggacgcgcggtcgctgtaccggcggctctcggcgctcgggggcgcgggggaagggagcgtgtcgcgggtgatgaacaagtgggtgcgcgaggggcgggaggcgcgcgcggcggatctcgccaagtacgtcaaggagcttcgcaagtacaagcgccacgcccacgccctcgagatcctacagagggatttcaatgccagttgtaaaacaaaccttcacttgttgtctttcgaatggctgaggatggatgaagctctgaggagagaagcagcgaagagtggtgagaaggtggagttgatggaatggatggttaacactaagggtatgaacatgtcatacactaaccatgccatacgtttggatctcatttataaagtgcgtggcattgaagcagcagaacaatactttgctggcctccctgatccaggcaagaaccataaaacttatggtgcacttttgaactgttattgctctgctaaaatggaagacaaagcaacagacatctatcgcaagatggacgaactaggaatctcatccagtactcttcctatcaacaacctgatgtctctttacgtgaagataggccagcataggaaggttacaagcctgtttgaggagatgaaagtgaagaatgttaaaccggataacctcacatgctgcctgctgatgagtagctatgcagcattgaacaagatagatactgttggagaggttctaaaagaaatggaagaaaaaaaagtggctctagggtggtctgcatatagcacactcgcttccctctatgtgaatgctaatatggttgaagaagcggaatctgctttgaagaaactcgagagtctcatcgatgttcaagctggcaggcagccttttgatttccttatgagcctatatgcatcagtaggcaatctgagtgaggtcaacagagtgtggaacctgataaaggctaattttcagaaggtgactaacaccagctacctcggcatgcttcaagctctttataaactcaatgacgatgatcgcatgaagcagatttatgaggattgggaatctaattatgaaaattatgatgcgaggctgacaaatatgatgacccgagcacatctaagaaatggcttgaccaaggaagctgaattactatgggagaaggttaaggaaaaaggtgcagaatttgattccaaaacatgtgagttgtttctagagcattacatggggaaaggggacatgacctccgctttgaactgggttgaaaatatgaccaaacttcccaggaagaaatcgaagctagatcaggagaagatcagctgtttcttgaagtatttcgaagagcacaaggatgtggaaggtgccgaaaggtttctcaactgcttgagaacgtcaggatgcattgatggcaaggcatatgagtccctcctgcggacctacttggcggctggcaagacaagccgttcgatccgccaaatgatcaaggaagataagattgagatatgctatggcatcgggaaattactcaagaggattgccgacaagggacgctgaaatgtttatcctcggtaattttactttgtcggtgacacgtgattcttcggcgagcggcacaaagcagattcgtttgagtgaactgttctcccttcttcctactgctccatgtagaggatgatatacctcatggctaggatgctgttccagccttttcttgcttttttttttcaagaagcagaggcatgctagggtaaagggttttttcttcaagtgcaacgtgtagtcttgtctgaggaggcttttctccaacacttcttttttgcttactttctgaacgaaatggcttctccagacatacagtactgaagcaagaatcctactacagaaaaaaaaaaaaaaaaaaaaaacctgcagcccgggggatccactagt

SEQ ID NO: 17896 - DNA, 313 bp, Oryza sativa
  Clone ID: PAT_MRT4530_23504C.1
gggttgttgattagtccagtgaatattgtcgtagccacacaggtaaccaaaactgcacgaagaagctgcacaacaatttcacttggttttagttttcttattgcttttgcttatataagagttagggcatattacaaatagtaattattagctttaaatcttttttttacctaatgatttaactggaggaaaagttcaagctagctacggcagataatcagttttgctttaattatcttgatcagtctgtaagtgataacctgttttggttatgtttaattccttcattattaactttggttggaagttcaag

SEQ ID NO: 17897 - DNA, 423 bp, Oryza sativa
  Clone ID: PAT_MRT4530_23505C.1
atgaggtttgaggggtgtggggcgacacgaaccgtagctggcccgatcgacccaccctgcccaatgggtgtgtccgccactagtggaggaggacacgaaggaggcaagaccaacccctatatgaggaaagaggccgatgttagatatggccaatataacagtattgcaccacgacaaccttttaggccacggaattcaccaaggcctaaaaatatggaggaccatgtgaggaatatcattagggaagcttttggaattgtgccgatgaatcgtgctagggtttaccaaaagtcatatcctgattattttgatgatattccatatccttgtggttttagggttcccgaattcactaaattcaatggtgaggatagtagggaccacatgggaacatataggccaattcttagcataatgtggtga

SEQ ID NO: 17898 - DNA, 490 bp, Oryza sativa
  Clone ID: PAT_MRT4530_23506C.1
cccgccccggaatccccggggacgccaccacgcgcgtttctttatcgcattgcgagttatccccgcgagccaccttaaaatggtggaggtggagctactaaacttcctcgaccagggccggctcgggaaggtgacctcctccaccaagactacctcctcccaggagaccagatcaacctccccgagagccagccagctccactgcaccgaaggcgacgtgaggcggtaccaagacgaagagcacgctgccgccctaccggggcttggccaagagacctagtagtcgccccaggccaagaaggcttgtacgccggaccgaccaacccatgacaaaagagccagaaaagccatgaccgcaaatgcggttcatccaacttaattcatgcggtcacacatagacccaactgaacacaacggatctcaaggtgcatctgcgtcccagaaaattgatcatggttccatgctctatgcaagattagaataggagtct

SEQ ID NO: 17899 - DNA, 316 bp, Oryza sativa
  Clone ID: PAT_MRT4530_23507C.1
gtatcaaaccaaaaaataacttccaacggaggggatgagatttatatttcctacaggcaaaaaaggaaaacgctttggccgaccaccggtaaccttgaacaacaaaactggcggggggtaaaatggtttttccaaagggcacaagagctctattgcgctaacgggaaaccaccccccaggggaaaccccggaaactgaaaaataagcccacggggacatgggaaacctttccacgggggggggaaccccgggggaaacgccaaaggcccccacttttttcaggggacggtagaaaacatccaaagtggggcccggg

SEQ ID NO: 17900 - DNA, 413 bp, Oryza sativa
  unsure (1)..(413): unsure at all n locations
  Clone ID: PAT_MRT4530_23508C.1
ttccattgtagcatgcttctgagaatncaattaaanctgccggaaanactatgangcaaagaagncgaagctagcncaaaagggtgaananaagnctnccgaagcatgagngccagaggttntgtcatgaagaatgnngcagnnccctgggtncttntattaaagancctgtcatgaagaagtctctgctcntgcttnnttcnggcgggaaatagtgtgtnncgctctcaanctntatgcagcatgtntcataaggatnaagncnaacatttttgaataaatgngctgtcatnttgaaagaaaaaaaaaaggtgtatgcgtgtgtatggcctagtaatgancatatggtacggaantncggtcgcganataaggcaccnttntttctccaanaaaaaaaaaaaaaaaaaaaaa

SEQ ID NO: 17901 - DNA, 386 bp, Oryza sativa
  Clone ID: PAT_MRT4530_23509C.1
aagcttccacgtacaacagccacacctatatcaattctcaagacttctaaaccacaagggaacccctgttctaggctgcgatttttaggtcagcttgttggggtgaccacagtacaattccctttatttcgtatcttcccaagattgtgtgtgtcagatattcgttgaactcgacttcaaaagatttgaagtattcatgttttcttttactcatgcgatggctttgtcgatctaactaggtattgattcttggggagattaattactacttcagttaatttactagctactagaatatttcatgcatgtatgtgttcaggtgatgattagttttacttatatttaattatcctgtaccctccgttttctggaaaaaaaaaaagctt

SEQ ID NO: 17902 - DNA, 845 bp, Oryza sativa
  Clone ID: PAT_MRT4530_2350C.1
ttagtcgatcttggtgtagaaccatagagacatgaagtctttaacaatgtcgaatagaattttccgacttcgatcagtcagtttgttgagtcgtacactctctctagcccccagcattgttgtcagagaatcgttctcggaggataaggctcttggacccttgacatggtcttttgtctcttcaggatccgacaaggccttatcggctctgggcgtccccagccgaagttcccttaggttcctcggaggccttgctgcgtactcgttcgatatcatgtgatctgacatcttttggtacgccacggagcttgaggcttgaatgatctcgatagaccaagttgttgacaacgatggttccgatcttgtcggggcacatactctggtcaagttagatcctccatagccgaagttatcgagtagtatgttgtcggagaatccatctcttaaacccatctcgtcgaaaccttgaagcaccaaaagatcccctaccagtacaatatttggggtagcatatctaactgttgtcgacatggcggtctgtagttctgactcgtagtcgacaacagggtagtcttcctcctcgaatccgtgcccggcgagatcagagatagcgctttcgtctctcctgacagtatccggagacaccgtaggggactagccgtgcttatccctgaagccgctttcgtctctcctgacagtatccggagacaccgtaggggactagccgtgcttatccctgaagccgctttcgtctctcctgacagtatccggagacaccgtaggggactagccgtgcttatccctgaagtcgatatccggcgtcttgtcttggcttatgttggctt

SEQ ID NO: 17903 - DNA, 258 bp, Oryza sativa
  Clone ID: PAT_MRT4530_23510C.1
atgcgcatgacgggagaggaaggagcggcggccagagctgcacgaccttggccccgccgccgacgaagactcctgctacgccgccgcatcgatctgcacgagttgcaatcttcatctacagctttgccttcaggccagttaggatttactatcgcagcagagacatatgacaccaccacaaccttaccaagtcccaacctttcttctgaacaagccttccacacattcgtcgtgcccgttacagcagcagcaagtgta

SEQ ID NO: 17904 - DNA, 768 bp, Oryza sativa
  Clone ID: PAT_MRT4530_23511C.1
atggctgacgagtcatggaggacgccggcgatagtgcaagagctggcggcggccggcgtcgaggagccaccgagtcgagagttcttcaaccaaccgatcgaacggaagcgaaaattcagcaacttgatcgacggcaagaacttccaggtggaagggtatggaactgaccgggtggtaacccaagatcagatcctggactggtctgatcggctgtttctcagagttgaacccaaggaggagcgaaatcttgccttctggcctgaccatcctgaatctttcagggatgttctgaacgagtacgcatcaagaaccaaaagaataagagacgatatcgttcaggctatgtccaagcttcttgggcttgatgaggattacttcttcgaccgactcaacaaagctcctgcacttgcaagattcaactactaccctccctgtccaaggcctgaccttgtgttcggcgtcaggcctcactccgacggctccctctttacgattcttctcgtcgacgaagatgtcggtggcctgcaaattcagagggatggcaagtggtacaatgttcaggtcactcccaacacattgctgatcaacttaggtgacaccatggaggtattgtgcaatggcatcttcaggagcccagtgcacagggtggtgacaaacgccgagagggagaggatctcactggccatgttttacagtgtgaatgatgagaaagatattgggccggcggctggtttgctggatgagaatcggcctgcaagatacaggaaa

SEQ ID NO: 17905 - DNA, 1734 bp, Oryza sativa
  Clone ID: PAT_MRT4530_23512C.1
ccccgctcccggccgcctcgccgcggcgcaccccagaacgcccacctgcctagctcgtcggtccatccccttccaagggcagcctggtcaccctgcctgcgggcccgaccggggttgaagcttcccccgccggccgtgaggcaagaagaaaattaagcaaagaaagatccaagaacaagaacactaatggctgacgagtcatggaggacgccggcgatagtgcaagagctggcggcggccggcgtcgaggagccaccgagtcggtacgtgcttggggagaaagaccgttctgacgagctggtcgccgccgagctgccggagcccatccccgtcgttgatctcagccggctagccggcgccgacgaggctgccaagctcagggcggctctgcagaattggggcttcttcctgcttaccaaccatggagtagaaacctctctgatggatgatgtgttgaacttggcaagagagttcttcaaccaaccgatcgaacggaagcgaaaattcagcaacttgatcgacggcaagaacttccaggtggaagggtatggaactgaccgggtggtaacccaagatcagatcctggactggtctgatcggctgtttctcagagttgaacccaaggaggagcgaaatcttgccttctggcctgaccatcctgaatctttcagggatgttctgaacgagtacgcatcaagaaccaaaagaataagagacgatatcgttcaggctatgtccaagcttcttgggcttgatgaggattacttcttcgaccgactcaacaaagctcctgcacttgcaagattcaactactaccctccctgtccaaggcctgaccttgtgttcggcgtcaggcctcactccgacggctccctctttacgattcttctcgtcgacgaagatgtcggtggcctgcaaattcagagggatggcaagtggtacaatgttcaggtcactcccaacacattgctgatcaacttaggtgacaccatggaggtattgtgcaatggcatcttcaggagcccagtgcacagggtggtgacaaacgccgagagggagaggatctccctggccatgttatacagtgtgaatgatgagaaagatattgagccggcggctggtttgctggatgagaatcggcctgcaagatacaggaaagtgagcgtcggagagttcagggctgggatctttggaaaattctctcgacgagagagatacatcgactccctgaagatctgatttgtactagtagcatgattgttgcaagctcagcagctttcagtagcaagtattcctgggaaaataaatatgtttttttccttgagggaattgctaaaagcatgtcgcaagttttttttgaacaaaaaactttcaaatgtaactataatattattaatggtattgtaattagacattattaatattatagtattattatattgtaattattgtataattgtaatgtaattaccatattaacttccccccttaagggattttctgaaaacatgtcgcaagttctcgtaaagaaaaacttttaaatttaactatggtataattgtaatataattacatatgtaataacccctccgtttcatattataagactttctagcattgtccacatttatatagatgtgggcaatgccataaagtcttacaatatgaaaacggaggaagtcttgtaactacggtactgcattcttttcaaattacaaaaaaaaaaaaaaaaaa

SEQ ID NO: 17906 - DNA, 379 bp, Oryza sativa
  Clone ID: PAT_MRT4530_23513C.1
tgtttttttttttttttttttttttttgacaccaactggattcttgtccttggtaaggtttaatggccaaagcggagaaattttagtttttgccctatgtacagacatatggacactttactgatggaaacctactgggtgaaaacaggatgatgggacgtgttaatttaccctgtgtaccattgtgagatagtcattgtggaatatgaaatttactccagagatactgtcctttcccttattaacagctatattccggtcccgtaaggcataagaactgcttgaactgctggtatgttcctcgctatacgatggaatacaggggctcgattttcatgctattggattcagctactgctacatgaaccgcgcagaggat

SEQ ID NO: 17907 - DNA, 1074 bp, Oryza sativa
  Clone ID: PAT_MRT4530_23514C.1
gacaaaacccttacaattcgcgaaagctcagctgcttctgcttcttcttcttctttcggattcgagaagaggatgtccatctcgctgcgcctcgcggtcccgacggcggcgccgcccgtgctgccgccgctgcggcagtctgcggtgcgggcggcgggctcccccgccgccgccgctctgcggacgggcgcgctcaggggatgcgcctcgctgccgctgaagccgcagccgctgctgggggcgggacaggcggcgagcggtcgccggggtggcgccgccgtgtgccactcgtcggcgcacctgagcgcgcggacgatgcaatgggtctccgccggggccaccgcagtgctattgcttgctaaaggcacagccatacacaaatctttccttgtgccactgtttgctttgctagcaccttgcagtgtaatctcatggatcaagagtgactatggtcattggactgcttttcttgctcttttggtgcgtttgttcttctccattccaggtgagctggagcttccattgtcaactatgctgctcgtgagtgttgctccttaccagttgatgaatctgaggggaactcaaggtggtgcagcactgtctttggcattggctgggtatctcgcttttcagcacttcaccagggttgggggtttagggaaagcatttgatcagggatcaataattgcaaccttggccatcatctgcatcacagttatccccttgatgatgttgttctgagtcagattaagctggcaagccgttgttcattgtgggcattgcaggagctagtagggagtacagaaaaaataatagctttgtaatgcaacaccctatcagactttgtggccttgataaaagtaataatttatgagatggctacagaaatgtttactgaaaaaaaaaaaaaaagggatttgctcattttctcatttcttaatctctttcgcaatcttgcaaacaattgatgcttgtatggcctatatacaattatacaaacttataaaggcatgccgaaccttacaaaaaaaaaaaaaaagggcatgccgatggccaaaaaaaaaaaaaaaaaaa

SEQ ID NO: 17908 - DNA, 262 bp, Oryza sativa
  Clone ID: PAT_MRT4530_23515C.1
atggcgtcaaatggacatgaagggttcactcatgaggaagaaggccaaaggaagaagacgatcaacctggagaagaagccgtcggcgctgggcgggcagaccaaggaggaggagccgctgcagggaaagggaggggagggcagagcggcggtcggcatcgtctgtgccgccgtcgctatcgacgatgcggacgacggtggcgatcgcgcacggctggagacggcggtggtcgcggctggacagaggacggcggcaatggggg

SEQ ID NO: 17909 - DNA, 744 bp, Oryza sativa
  Clone ID: PAT_MRT4530_23516C.1
atgtccatctcgctgcgcctcgcggtcccgacggcggcgccgcccgtgctgccgccgctgcggcagtctgcggtgcgggcggcgggctcccccgccgccgccgctctgcggacgggcgcgctcaggggatgcgcctcgctgccgctgaagccgcagccgctgctgggggcgggacaggcggcgagcggtcgccggggtggcgccgccgtgtgccactcgtcggcgcacctgagcgcgcggacgatgcaatgggtctccgccggggccaccgcagtgctattgcttgctaaaggcacagccatacacaaatctttccttgtgccactgtttgctctgctagcaccttgcagtgtaatctcatggatcaagagtgactatggtcagtggactgcttttcttgctcttttggtgcgtttgttcttctccattccaggtgagctggagcttccattgtcaactatgctgctcgtgagtgttgctccttaccagttgatgaatctgagggaactactccgtaagatcttacttttttcaaaagttcttgtgctcatgctccaattcccatttcctgtgcacaggggaactcaaggtggtgcagcactgtctttggcattggctgggtacctcgcttttcagcacttcaccagggttgggggtttagggaaagcatttgatcagggatcattaattgcaaccttggccatcatctgcatcacagttatccccttgatgatgttgttctga

SEQ ID NO: 17910 - DNA, 651 bp, Oryza sativa
  Clone ID: PAT_MRT4530_23517C.1
tacgacggagcgggaccagccgttccacaccaccaataagagcatgtccctgatctgtccacgatcagatgccctgggccaatgcgccccattaccgagtccggctgcgcgttggtcggatatctcggtagtgggatacgacgataccgaagacagctcatgttatatcccccgttaaccaccatcaaacaggattttcgcctgctggggcaaaccagcgtggaccgcttgctgcaactctctcagggccagcggtgaaggccaatcagctgttgcccgtctcactggtgaaaagaaaaccaccctgcgccataccaacccctctcccgcgcgtgccgattcattaatgcagcggcacgacagtttcccgactggaacgggcagtgagcgcaaccaataatgtgagttactcactcatagcacccagcttacactttagctcccgctcgtattgttgtgattgtgacgaaacaatttcaccaccaggaaccagctagacaggatacccaagttaatcgaactcactataggaaacggtacccctccagtacgtccgatccggttcgaacccaggcgcgttcccagttttcttaaaaaagggaacttaatgaattaagttgaacactttgaggcacacaccaaaaaaaaaaa

SEQ ID NO: 17911 - DNA, 344 bp, Oryza sativa
  Clone ID: PAT_MRT4530_23518C.1
actaccaaggggggctctgttttgctttaaaacaggcatagtggcagggaaaatattacggccaccacagggctggcctggggttgcttccaacaaccatagtgggccacaaaaaaaggggtttgggttaatggaaacctttccctttaaaaaataccacccacccccctcatcgatcttggcttcttccaaaaccgatgagaaaccccctatccaatggggggctatataaaaaaaatttgggaaccccgatggacctccttctaggggtccaaggaatccccattcctaacctccttggggggtggggctccaaaaccataacaaactttcctaaagcaaaa

SEQ ID NO: 17912 - DNA, 195 bp, Oryza sativa
  Clone ID: PAT_MRT4530_23519C.1
ggccacatggatcctggggctcctagcggcattgtgagagccttgcttaggagaagtgaaatggtgaggtattttgaagggcttgcatttggtttcagatctacagttggaaaagttctcaggttgggctaagttagcgtaggatttgttacctatttttttgaaagtaagatttaagttccctatttaatagtc

SEQ ID NO: 17913 - DNA, 262 bp, Oryza sativa
  Clone ID: PAT_MRT4530_2351C.1
aaaaaaaagaacacctcagggtacttatcgctgcaggcgggaaccgaccggaaatggggggaggcacagatgcaaaaggtggggctgggagcaacttttacatgacggggggtcttttctttgcatttacttgggaagcaaaaaagggtttatggggggaggtaaaaaagggaggcaactaaaaacaagaacgggggggtcaaagggggaagatctagacccaaaagcccccccaacaacccaaagttggaggggctcgctc

SEQ ID NO: 17914 - DNA, 309 bp, Oryza sativa
  Clone ID: PAT_MRT4530_23520C.1
atggcaagtaatgaacgagaaggttcatcatcctcaacacccgtgcaaatgtatgaggcaagttgggagccaactggggatgcacctggatggacccaagctccacgccacagcatcggagtctcaagctgcgcaagcggtagtgaggaccgcaacaacatgaggaccctcaagcgtacttccgctttcaggggttcaatctttatcaaggaaccagagcgaaagccaagcttgggagggggggacatctctcccctcactgaggtaagtgctctctcacaaattaaatatacttttcatgctctatga

SEQ ID NO: 17915 - DNA, 201 bp, Oryza sativa
  Clone ID: PAT_MRT4530_23521C.1
aatgaggggggcttgtgaggggtgccaccaagctttgcaatgcaatgcagtgctgccttgagggaggcctgctgaatgatgaatgctgccatgatgttgatgggtgagaaatgaaatgtgtgggcccccgtgggagaactgatgatgaatgagaatgcctggatggatgttggttggattgaaaaaaaaaaaaaaaaaaaa

SEQ ID NO: 17916 - DNA, 448 bp, Oryza sativa
  Clone ID: PAT_MRT4530_23522C.1
gttctcgcttgttgtggaagaaaaaaaaaatgtacttgtggcccgcccatttgtataaatgtacagaaccagaagtttaaaaaagatggcggccaggccctgcgggactggagggttggggcacccgggaaagtgaaacggccgggcgatcatccatgtatgcacggagaagggtcgaactagtttgttaccttggttttttttaactatgaaaaaacatttccccttttgaaaagcgtgttattttttagtgttgggaggtcacacaccgtcttggtgggcgatcagtttaacccttgaattctcgctacagataggggggggggggagccctcctctttgtgggggactttaacgaagaggtggactgttgtggactatcagacggggaacaatacattgtttattttccggggagggaaaggcgttttcttggggggggggggat

SEQ ID NO: 17917 - DNA, 759 bp, Oryza sativa
  Clone ID: PAT_MRT4530_23523C.1
atgcggcggcgacttggtgaggcgccgacgaggatggagaggtgggagaggagaggaggtccgacggccggcgaccggcgaccagcagtggagaagagcagcggcgaggcgggagcaggctggggagaagaacggtggcggccgggggagagtgcgaggcgcgcggcggccgacaagggagagcggcgacgaagcatgtcccttcccctctgctgtcttcctcctcccggcgttcacctccatcgccaccgccatcgaagatgccgcctcctgctctcgcatcgcgcgccgccatgtcctcctcccatggggccgccgctgtggatgcggagtggcggcgcctacgactctggcctcgtcggcggtggcagatccgggcagggaaagggccgtcgcctgctcgcctcccgcatcacgccccgcctgctcgctattcccttcgccgacttggccaccgcctctctccctcgagccgcgcagcggcgcgctagtatggactcgggcgccgccactcgcgccactgcttcgtcgagcaggccacctcgacaccgccgccgacgactccccgccgctcggcctcgtcgtcggtggcggctccgggcaagcatagctcccccacgccagtcacagctccccctgccgccaccttgctcccctgctcccgcgtcgccgctgtgtcaccggctgcggacctcctctcccgcctcgccccgtctaccgacggcggtggcctgcccaaagccccagagagaagattga

SEQ ID NO: 17918 - DNA, 572 bp, Oryza sativa
  Clone ID: PAT_MRT4530_23524C.1
tttctttctcatctcacatcgactctatagctacctacgcggcatctttgtatagagctagagctagcacacaagagagagggagagaggtgtggtggatgaaggaggagggcgagccggaggagcacgctctccagcctcagcggcaagcgcggcgcgccatctgctccggcggcggtggcagcgaggactccggcggcggatcccgcaagaagctccgcctctcgaaggaccaagccgccgtcctcgaggacaccttcaaagagcacaacaccgtcaaccctataagcaagcaaacaaacaatcaaaaagcagaaggcggcgctggcgaggcagttgaatctgaagccgtagcaggtggaggtgtggttccagaacaggagggcgagaacgaagctgaggcagacggaggtggacagcgagctgctctaaggcagacggaggtggagggagtcaaagtggacttattaaatcaacgtggacaggttggagagggaggccgggctctggggcgtactgtagattttgggccgttctctatggcccaggatgcggtgtccgactccaactaa

SEQ ID NO: 17919 - DNA, 805 bp, Oryza sativa
  Clone ID: PAT_MRT4530_23525C.1
ccaccaataggaagagggcgcgccctgaaaaaaccgccgcaaatccccgcgacgagtaacggcgaaccacagccacacatgtgtcgcggggacttagagaagggggtggagcaggtctgaaaggccgagcggcacaaagggcgtggggagggcctctctggagaggaacacagcgcccaacaaaatggcgaaatgccagaccgggggatgttttgggtaaccgcgtaaaaaacagaagaataccggccacgagctttatatcccgggggggggaacaagggcccacaaaggggttgaaacccgggggaaaggagcgggcgggaaggggttttaaatagggtttgaaagggggaaaaggcgcggcccgggaaaggaaagaaactccgcccgaagaggtcccgcccccccatcaatgggcgccgggcgaaattttggggaaaccaattccggccggtttgaatgggaaaaaaaaaggggaaaattggggggaaagggggagggggatcccggggaatattttccccccacttaattgcacccgggggcggcggaattcggcggattcggcggcggcggcggtgcttggcgcgggcggggcggcgggagcggcgggaggatggggatgacgggtgggccccacccgtcagcgagggtggcgggcgggcccacccgtcagcggcgcgcgcgcggggagaaggccgagtgggccgcggggagaggagagagagagggggagggagatgggctgaaccggcccaagagagggaaggggacttttagggtttttctttttataaaacctttt

SEQ ID NO: 17920 - DNA, 174 bp, Oryza sativa
  Clone ID: PAT_MRT4530_23526C.1
ccggccatccccggaaacgagcggccggtggacgcggcggatactcttcttcctcctcccctctcctggtcaggtcactggccagtggtcacagctcgccggagaggaagacaagcttgtggtggtcgccggccgattggcaatcattcggcaacgacgaccgatgctggttca

SEQ ID NO: 17921 - DNA, 282 bp, Oryza sativa
  Clone ID: PAT_MRT4530_23527C.1
atgggtttcgtctccggcattgatgacttcgtcttccctcccgggcaggcgttcctgttcagcagccttgacttcatcaccagcgacttcggcaagatttatctcctcgactcggattcgaaccagttgggaagaggccgggtctccgccccgttcggtatcccgaactcggccaagatctaccccaaggtcatctcaaccgagttggccactgttaacagtgaaatttggtaagcccggagtagtcatcccgataatagccgatgccgataccagccgatt

SEQ ID NO: 17922 - DNA, 3864 bp, Oryza sativa
  Clone ID: PAT_MRT4530_23528C.1
atgggtgaaattaaaggacttctgagcagtatctgtgcgagtatgtcgagtcaaggacctgaatttgggggaacggctggagctagtaccagtggcattgcaaggggggcagcagggttggcagcttcagcagcagcaacggtgagcaatactacaacagtggctggaagttcttcagtaccaccgggttttagtccccaacctaacaccgctggagttcagaccggggctggtgcgatgccactgacttcgggagctcagctaaatcctgttaatgctggaagcatgacctcaactgtgacaatcccatcctttctgcccagaaacacacagggtgccatgacttctgtaggaaatgtgaacttccaaattgaaccaaacactgtgaacccatcttttggcccagttttcaccactgctactagaactcatgtgttaccagagggaagaaatttcaattttcctgagagagagtcacaagaggatgtggggatgaaccattatgggattgacactaatcagccttggagatatccaactaggcaaccagggggtactgctgtaggcataggagcagggatgccaaacccgggaggagatcgttttactgaagctaatgcccatgaagctgtggaactactgcagaatgcaaaacagactggtagtgtaatgcagtacattgacaaattcgaagactgtgtttctttagtgaaaagggatcatccttacttgacggagtcttacattttgagttgttttattgagggattgagggctgacattaagcatgatgtgtatgagaaggcaagtattgctaagagactaagctaccaatctggatttaatagaaacaaacctcaattccagcctgcccagtccagtggtaccagatttgtcaaccagaaaaacacaactcaaggggtggagaaagaaaagaaaacttgctggtattgcaaggaaccatggaattaccaacataaatgtaaagttggcaaggtggtacatatgatggaggaggttgaagaagaagaggaaccccaagaaactcaggaggagaatggagagactggataccagacagctcctagaaggagggctgtagcattggttgacagtgggagtacaaattctttcatgaactatgattttgctataaaaagtgggtgtgaaattttggaagctggcaatagaagaatactggtagctggtgggggtatgatctcctcttccacaaaaactgagcagctgtcatatactgtacaaggtcatccatttgaaagagtgttccaattaattcccttgaaaggatttgatgtgattttaggggcggattggatttatgaccatagtccaatcagtctggacctaaaacagagagttctttgggtaacatgtaagggccagcaagttaaatttgtagatcatactcttccacaggggaagataatgattaaggctggaaaatttgggaagatgcttgataaggggataatgggtttcttcatagaagtgttgtctaaaacagaagagaagaaggaagaaaccattataccagaacagatagcagttttgcttcaagagtttgctgatgtatttgctgatcctaagggtttacctccaaagagggattgtgaccatgcaataccactgaaggtgggagcagaacctccaagcttgagaccctacagagtcccacatcaacagaaaaatgctatggaagaaattattaaggaattgctggattctaaagaaattagacctagtctcagtccatattcatctccagctgtcatggtgaggaagaaggatgggaattggaggatgtgtgtggattatcggcaattgaatgccaaaaccgtcaagaacaagttccctatgcctattatagaagatttgttagatgaattgaatggtgccaaggtgttgacaaagatggatctacggtcgggttaccatcaaatcagaatggtggaaggtgatatccctaagacagcattcaaaactcatatggggcattttgaatatttggtgatgccattcgggttgacaaacgcaccagctacatttcaagctctcatgaatcaaatttttggcaaacttttgaggaagtgtgttttggtcttctttgacgacatactgatttatagcagagatctgagggaacatgaacagcacttgcgcatagtgctaaacatactgaggtcacataaattgttcgccaagcgaagcaaatgcacttttgctgtaggaagtatagaatatctggggcatatagtgtccggagaaggtgttgcaactaagcctaataaaattcaggatgtgctggattggccagtacccaaaaatgtctcaaaattaagaggattcttgggattaactggatactataggagatttgtgaaggggtatggaaccatatgcagaccacttcatgatctgttgaagaaaaacagctaccaatggggtgtagaacagcaaaaagcttttgacaatcttaaagaagttatgacttcctgtccagttttggctttacccaatttcaatcaaccttttgtcctagacgacagatgcatgtgtattgagtacaagaagggaaaagaaaacaaggcagctgatgcattgtctaggagggatactgatggagacaagtgcttggcaatcactctggtatatccagcttgggtggaggatgtgaagaacagctacatgggggatgagaaatatgcaatgttagtaactggagaggaactgaatgaaggagcagaggggttcactttacaatctgggttactgaggtataaaaacagaatttatgtgggacaatcaactgatatcagacaaaggctgcttcaatcctttcacaattccacctttggagggcattccggaatgaaggtgacataccataaacttaagaagattttttattggcctaaaatgaagaaggatgtggatagacagatgactgaatgcccaacctgtcaaatagctaaacctgacatattcatgtacctggattgctggccctttcaaattcctgagatggcatggccacacatttcaatggattttatagaagggttgccaaaatctcatggaaaagatgttattctggtagtagtggacagacttcatggcatgccagtggctattgtgtcagaccgagacaggatttttaccagcgaactattccagaatgtttttaaagcaatgggtactgcattgcggtttagtacttcctatcatcctcagtctgacggccaaaccgagagggagcctaaagaatggtacaaatggttgcctactgcagaatggtggtataatacttcttatcacacatcattgcaagtcactccatatgaggccatgtatggagtaactccaccacagattggggaaagggcgatacctggaaatgtttcagaagaggcaagagtaactgtacaacagagggaggatatgttggcaagattaaaagaaaacttggccaaagctcaaaccagaatcaaaaagtttgctgacagactcaggagtgaaagacaattcgagttaggggatatggtctacctaaagatgcaaccatatcgacataatgcttttgggctgagaggatcattgaaactcagagcaaagttttatggtcccttcagagtgttggaaaagattgggaaggttgcttataagttgcagttgccagaagaagctaacatacaccctgtgtttcacgttagtcagctgaagaaacatgtgggaaggccacttttccacactttagaccttgaggacaaggtctggcttaaggggaaaggattgtcagaagtggagatttcagagataactgaagaaaagttcagagataactga

SEQ ID NO: 17923 - DNA, 3483 bp, Oryza sativa
  Clone ID: PAT_MRT4530_23529C.1
atggcggatccgagagtgaagcggttggaaatgggtgaaattaaaggacttctgagcagtatctgtgcgagtatgtcgagtcaaggacctggatttgggggaacggctggagctagtactagtggcattgcaaggggggcagcagggttggcagcttcagcagcagcaacggtgagcaatactgcaacagtggctggaagttcttcagtaccaccgggtttcagtccccgacctaacaccactggacttcagaccggggctggtgcgacgccactgacttcgggagctcagggtgccatgacttctgtaggaaatgtgaacttccaaattgaaccaaacactgtgaacccatcttttggcccagttttcaccactgctactagaactcatgtgttaccagagagaagaaatttcaattttcctgagagagagtcacaagaggatgtggggatgaaccattatgggattgacactaatcagccttggagatatccaactaggcaaccagggggtactgctgtaggcacaagagcagggatgccaaacccgggaggaggtatgtactggcaggaaccacctagatatttgcatggtgtcataccaaacccttatactgaaatgtcattgaggagtcagaggttggaattgacattgttcaatggggaggatgctgtagggtggttgcaacaatgtgaaaagttttttgagatgactggcacccctgtggatcagtgggttaatttagcatctggacacttagtgggaagagcagggaaatggtttagaaatttggccataccctggtactgtctaaattggcagcaattttatctaatggttttagatcgttttactgaagctaatgcccatgaagctgtggaactactgcagaatgcaaaacagactggtagtgtaatgcagtacattgacaaattcgaagactgtgtttctttagtgaaaagggatcatccttacttgacggagtcttacattttgagttgttttattgggggattgagggctgacattaagcatgatgtatgtgggcaaaagccccagaacttgttggcaggatattggtatgctaaggtgtatgagaaggcaagtattgctaagagactaagctaccaatctgaatttaatagaaacaaacctcaattccagcctgcccagtctagtggtaccagatttgtcaaccagaaaaacacaactcaaggggtggagaaagaaaagaaaacttgctgctatcatggtgaggaagaaggatgggaattggaggatgtgtgtggattatcggcaattgaatgccaaaaccgtcaagaacaagttccctatgcctatcatagaagattgttagatgaattgaatggtgccaaggtgttcacaaagctggatctacggtcgggttaccatcaaatcagaatggtggaaggtgatatccctaagacagcattcaaaactcatatggggcattttgaatatttggtgatgccattcaggttgacaaacgcaccagctacatttcaagctctcatgaatcaaatttttggcaaacttttgaggaagtgtgttttggtcttctttgacgacatactaatttatagcagagatctgagggaacatgaacagcacttgcgcatagtgctaaacatactgaggtcacataaattgtttgccaagcgaagcaaatgcacttttgctgtaggaagtatagaatatctggggcatatagtgtccggagaaggtgttgcaactaagcctagtaaaattcaggatgtggtggattggccagtacccaaaaatgtctcaaaattaagaggattcttgggattaactggatactataggagatttgtgaaggggtatggaaccatatgcagaccacttcatgatctgttgaagaaaaacagctaccaatggggtgtagaacagcaaaaagcttttgacaatcttaaagaagttatgacttcctgtccagttttggctttacccaatttcaatcaaccttttgtcctagagacagatgcatgtggtattggaattggggctgtggtcatcagaactgatcagcaaagtttgaagttcatggcaacccagagattaacagaaggaattcagcacaaactattgctgaaattaatggagttcgattacagtattgagtacaagaagggaaaagaaaacaaggcagctgatgcattgtctaggagggatactgatggagacaagtgcttggcaatcactctggtatatccagcttgggtggaggatgtgaagaacaactacatgggcgatgagaaatatgcaaagttagtaactggagaggaactgaatgaaggagcagaggggttcactttacaatctgggttactgaggtataaaaacagaatttatgtgggacaatcaactgatatcagacaaaggctgcttcaatcctttcacaattccacctttggagggcattccggaatgaaggtgacataccataaacttaagaagattttttattggcctaaaatgaagaaggatgtggatagacaggtgactgaatgcccaacctgtcaaatagctaaacctgaacatattcatgtacctggattgttggaccctttacaaattcctgagatggcatggacacacatttcaatggattttatagaagggttgccaaaatctcatggaaaagatgttattctagtagtagtggacaggttaacaaagtatgctcattttgttgccatgtctcatccttttgacactcaagatgtgatacaagttttcatggaaaatgagcctaaagaatggtacaaatggttgcctactgcagaatggtggtataatacttcttatcacacatcattgcaagtcacttcatatgaggccatgtatggagtaactccaccacatattggggaaagggcgatacctggaaatgtttcagaagaggcaagagcaactgtacagcagagggaggatatgttggcaagattaaaagaaaacttggccaaagctcaaaccagaatcaaaaagcttgttgacagactcaggagtgaaagacaattcgagttaggggatatggtctacctaaagatgcaaccatatcgacagaatgcttttgggctgagaggatcattgaaactcagagcaaagttttatggtcccttcagagtgttggaaaagattgggaaggttgcttataagttgcagttgccagaagaagctaacatacaccctgtgtttcacgttagtcagctgaagaaacatgtgggaaggcaggcaatcccgctaccaaatcttccactggtgggtgctgatggtactgtcaagactgaaccacttgcagtattagcaaggagagtaattccaagacaaaatgaaccagtggttcaatggttaattcactgggagaatttaacacctgaagatgcaacttgggaaaatgcaacattcatccaggccacttttccacactttagaccttga

SEQ ID NO: 17924 - DNA, 278 bp, Oryza sativa
  Clone ID: PAT_MRT4530_2352C.1
tttgtttccaccaccagcacctactacttcatcgtggtggtctatttctacctacaagctttccccaccatggcgtcattgtacgccttcgctggccttgctcatgcaccctaaggacctcattcttcgcgtgatcgacgatgtacaacaaggattctcagtccacgtaaaggttaatatattgtgaatgtgcctacctggaccgaggatgggaagcacactgttgcttaaatgtggttattgtctctctgagcataaacttgattaaaaattctgtt

SEQ ID NO: 17925 - DNA, 354 bp, Oryza sativa
  Clone ID: PAT_MRT4530_23530C.1
acttaatcctttcttaagtggtggttattccaaatttattacattctacaaacagttctcattgtttgtatgctaccgtgcatctttgcattctttcaccatttacctggccacaccaaaaaaaaaagaaacccccgtgggaagaactcaagcccccccccccccccggggaaaaaaacaaaacaccttttacaaaaacccccagtccccgcgcgagccggctttttcattaaagtgcaaagggggatggcccccatcccagcgacaaaacccccaccccccccggggcctttgcggatgaaaaaacccaaaaaggcggggcgccccccttccacttcattattttcttctcca

SEQ ID NO: 17926 - DNA, 399 bp, Oryza sativa
  unsure (1)..(399): unsure at all n locations
  Clone ID: PAT_MRT4530_23531C.1
gttgcctgatnaaagacctaaacaacccacgtcncaaagaccccttaaactttcccctctctaagtaccatcgtggcccctccggcctccatcattttatgacttcctgctacgagaaaatttgtaatgcaaaacatttcctattgttgtctgtagggaaattaagacatcaaatatatatatattttgcataggtctgtcctgtggggaaattgtcttgtttctattgacccactatcgggaagttggggtagtctctctgttgtagattagaatattcttatatgttatgctaagtgtaaaataattcaatgtagggctgacatgctggtgtgtggggtctccacccagattacaatgagcatattatggtcatgttgagaaaaaaaaaaaaaaaaa

SEQ ID NO: 17927 - DNA, 142 bp, Oryza sativa
  Clone ID: PAT_MRT4530_23532C.1
ggatcttatccttttggggggggggggggccttatttctaaacatcttaaaggacgccatttccagtgacaaatctattttcttcttcaaattggtatttgctcacgatttcctggcgcaatatcactttgccgcttttcct

SEQ ID NO: 17928 - DNA, 612 bp, Oryza sativa
  Clone ID: PAT_MRT4530_23533C.1
atggcggcgctcgtcgtggccgcggcggaggctggaggcagcgccgacgtggacggcggcgctccttgtggccgtggcagagactggaggcggcgccgaggcggacggcggcggtcctcgtggccgcagcggaggctggaggcggacggcggcggtcctcgtggccgcagcgcaggctggaggcggacagcgatgctcgtcggggacgcggcggaggcgggaggcggcgccgaggcaaacggcggcgctcgtcgggacctcgacggaggcgggaggtggtgctcgtcagggccgcggcggccggcggaggatggaggcggcgctcgtcgaggtcgactcgggaccgtggcggtcggcggaggctggatcggcgccgaggcggaaggcggcatgatggatggggtggggatggatggaggcggcgctgaaagtatacaatatattatggaaagtatcctcatgggctggcgattatcagagtcctactcgaagaggatagggattattctatatcgtgcagggtttgttgcctccgagttctacttggagactaaggcaactcatggtatagaaggcacaccccgggaggggttcgggatcatcgaatcatag

SEQ ID NO: 17929 - DNA, 268 bp, Oryza sativa
  Clone ID: PAT_MRT4530_23534C.1
ggccttccggctcagttatgttgtgtggtggaaattgttgtagcggataacacagtttcacacaggaaacagcttatgcaccatgagttacgccacagctctaatatcgactcactatagggaaagctggtacgcctgacaaggtaccaggtcgcggaatttcccagggtcgacccacgcgtgccagcaggacgcgtgggcggacgcgtgggcaaagtcatgaatggcttgcctgtgaggagggaagcataatgctgctgcttgctgc

SEQ ID NO: 17930 - DNA, 205 bp, Oryza sativa
  Clone ID: PAT_MRT4530_23535C.1
gttatagcttctaatcactagccggcgagcgacaccgacgggcgcgcgaggcggcggctcacgagcagcgccaccgtgggcgcgagcggtcggccggccggacgccaaggagagtggccacgtgtttttatcaagatggagaccatgagggtctttcgtggaaagaagtggaggattatcatgctgtcctttgaccttaattttc

SEQ ID NO: 17931 - DNA, 1726 bp, Oryza sativa
  unsure (1)..(1726): unsure at all n locations
  Clone ID: PAT_MRT4530_23536C.1
ntccgctcacgcacagagccgacacgcatacgacacacatgggaagctccgtcaaggacgccggcggcggcaaggaggagcagcagcagcagctggagagcccgctgctggaggcggcggtgtcgtcgggcggcggcgatggcgggggagggcacggggtgagcggggagctggagagcatcctgggcgacgagacggtgccgtgggcgcggcggatgtgggcggcgacgggggtggagatgcggctgatgctgcggttggcggcgccggccgtgctggtgtacatgatcaactacctcatgtccatgtccacgcagatcttctccggccacctcggcacgctcgagctcgccgccgcctccctcggcaacaccggcatccaggtcttcgcctacggcctcatgctggggatggggagtgcggtggagacgctgtgcgggcaagcgtacggcgtgcacaagtacgacatgctcggcgtctacatgcaacgatccaccgtgctgctgatggccaccggcgtcccgctcgccgtcatctacgccttctcccgccccatcctcgtcctcctcggtgagtccccggagatcgccagcgccgccgccgtcttcgtctacggcctcgtccctcagatcttcgcctacgccgccaacttccccatccagaagttcctgcaggcgcagagcatcgtggctcccagcgcctacacctccgcggccacgctggtgctccacctggtggtgggttggctggtggtgtaccagctcggcatgggcctcctgggcgcgtcgctcgtgctcagcctcagctggtgggtcatcgtcgccgcgcagttcgtgtacatcgccgccagcaagcggtgccggcggacgtggacggggttctcctggatggccttctccggcctccccgagttcctgaagctgtccacggcctccgccgtgatgctctgcctggagacctggtacttccagatcctcatccttctcgccggcctcctcgacgaccctcagctcgccctcgactccctcactgtctgcatgacgcttgctggatgggtgatgatgatatccatcgggttcaacgctgcagcgagtgttcgtgtggggaacgagctgggagcggggcacccgcgggcggcggcgttctcggtggtggtggtgacggcggtgtcgttcgtgataacggtggtgatggcggtggtgtttctcatgttccgcgactacatcagctacatcttcacggagggggagaccgttgcacgagccgtctccgacctctgccccttcctcgccgccactctcattctcaacggcatccagcccgtcctctctggtgtggctgtcgggtgtggatggcaaaagattgtggcgtacatcaatgtcgggtgctactattttgtgggtattcctctcggttttctcctcggcttcaaattccatctcggagcaaaggggatatggactgggatgctcggtggtacctgcatgcagacgttgatattgttctggatcactttcaggacagactggaacaaagaggtggaagaagccaagaaaagactgaatcaatgggaggacaagaagcaaccgcttcttgcaggcacggttgactactgattcgcatgacaaatgttgggtaaaatgcttatgcgcacttatgcatatatttttttttgataatggaagcttttattaaactcagtcaattacatcaaggtgatacaatt

SEQ ID NO: 17932 - DNA, 370 bp, Oryza sativa
  Clone ID: PAT_MRT4530_23537C.1
atgctgtggcctggtagcggcgccctcccctccgccagatctggtgggaggggaggtcgcgtcaatggcgtgacggcggaaggcgatgcagcggcggcgggtcggcggcgtgaggggaggcagcggtggtctgacggcccggtggtggggccctcccctccactagatctggcgtgaggggagatggtggcgacggcccggcggtggctcggcggcgggaggggaggcggcggtggtccgacgggccggtagcggcgacggcggtgcctcgatagcggcgccctcctcctctctatccgatgagggtggcagcggtggagacgtcagtggcgctggtggtgaaggcagcatgatgatttttcttgattct

SEQ ID NO: 17933 - DNA, 237 bp, Oryza sativa
  Clone ID: PAT_MRT4530_23538C.1
atggctgggtgctggcgcggggcggcgcaacggttgtggccgatggcggaggtggccgtcgccgaggaggatagcgacggcgacggctgcgttaacggttggccggcgggaggcaggggagatggcagcggttggctggcgcagcgggcggtggcagaggccgatgttgagcgcacgaggaggcgcggaaccgatttagttagcaatgtcaatgtgctaattaagccagttaattaa

SEQ ID NO: 17934 - DNA, 1489 bp, Oryza sativa
  Clone ID: PAT_MRT4530_23539C.1
gcacgacgggccccacgcgtcgcctgcgcctcacctccacccaaacccaatccgaaatctttccctccacccgccgccgccgccgccgccgctgttgccggtgacccgccagccatgtcgtgctcgcacctctccaccgcctggtcctcctccgccctggccacccgccgccgctccgctcctagcagcggcagcagcggccgcctgcaggtggtgcggtgctcgctgcgtgagctgcggagccgcatcgactcggtgcgcaacacgcagaagatcacggaggcgatgaagctggtggcggcggccaaggtgcggcgggcgcaggaggcggtggtgtcctcccgccccttctcggaggcgctggtggaggtgctctacaacatgaaccaggagatccagacggaggacatcgacctccccctcacccgcatccgccccgtcaagaaggtcgccctcgtcgtcctcaccggcgagcgcggcctctgcggcagcttcaacaacaacgtcctcaagaaggccgagacccgcatcgaggagctcaagcagctcggcctcgagtacaccgtcgtcagcgtcggcaagaagggcaacgcctacttcatccgccgccccttcatccccaccgagcggacgctggaggtgaacggcatccccaccgtgaaggactcccagtccatctgcgacctcgtctactcgctgttcgtgtccgaggcggtggacaaggtggagctcctctactccaagttcgtctccctcgtccgctccgaccccatcatccagacgctgctccccatgtcgcccaagggggagatctgcgacatcaacggcgtgtgcgtggacgccaccgaggacgagctgttccggctcaccaccaaggaagggaagctgaccgtggagcgggagaaggtgaagatcgagacgcagcccttctcacccgtggtgcagttcgagcaggaccccgtccagatcctcgacgcgctcctcccgctctacctcaacagccagatcctccgcgcgctccaggagtcgctcgccagcgagctcgccgccaggatgagcgccatgagcagcgccaccgacaacgccatcgagctccggaagaacctctccatggtctacaaccgccagcgccaggccaagatcaccggcgagatcctcgagatcgtcgccggcgccgacgccctcgcctaaatccaatcaactcatttcttcatcccatccacctcgcttgagctgctgaggttgctgctgttatatatactactctattcttttttacttcctttttctctcttgctattgtgtctgtaatttctgtgatagcacgaaaaaaaaaaggaaaaaagatcgatccgactcgatcgatgtaattgttaatcgcgcgagatacacaagatttcaattcagcgatgccaaatgtacaagcagagtattctactacaaaaaaaaaaaaaaaaaaactcgagactagttctctctctctctctcc

SEQ ID NO: 17935 - DNA, 1518 bp, Oryza sativa
  Clone ID: PAT_MRT4530_2353C.1
atgtggcgttcctccgactacttctactttcagtggtcgagttacggcaactgcctggtcctcgacaagcgatgtggcgttcctccgactacttctactttcagtggtcaagcaatctctcacaccgcagcttccatcggtgttcgagagataattctgctcgctcactggttctcgcaccagtacgcagcaatatctcgcactagtcctcaaccagttgatcgtagtgatctctcgtacatttgcttcaagtggtcgagttatggctactgcctggtcctcgaccagcgatgtggcattcctccgactacttctactttcagtgcgatgtggcgttcctccgactacttctactttcagtggtcaagttacggctactgcttgtggtcgagttacgactactgcctgctcctcgaccagcggtgtagcgatttctcccactacctctacttcaacgtcgtcggcttgatcacccgacatgattgcgaacagacatccggatatgctataagttggtgttcctccaactacttccactttaagtggtcgagttacggctactgcctggtcctcgaccagcggtgtagcgatttctcccactacctctacttcaacaaagttggtagcaggagatatgaaagcgctatctgtgatctcgccgggcacggatccgagaaggaagactaccctgttgtcgactacgagtcagaccttcggaccaacatgtcgacaacacctcatcccgagcctccccgtggtcgtatcacccctccccgccgtcacctttctctttcccctgcgccggccgcctccagccgcctctccctcctcgcccgagcgcgggctggccgtgccgtcgccttccccgacatcacagcagcctcctctcccccggcctgccctccgtttcgcgtgagacccccggaggcacgtccccgccggcaaccggtggcactgtcgccacccaccgcctccagccgcccctgccgcgccgctcaggtgcaggccggccacgccgtctcctccctcggcatcaccgcgtcgacctccaccccggcctgccctcggtttcgtccggagaccgccgtcgcccgcgccggcctctccatcctcgtcgtcgccgacgtcccttcggccgccccttcgtcctccccggcttgtcggctcgctgcgtcaccaccacctccggcatcgcagcggcaaggtcgccctcggcctcgcctcccctccacccaaacaccgccggtgtccgtcgtcgtcttcaccgctcatcctcgccgactcgtcgtctcgtggcgccgcctccgtcgtcggcatcgtagcggcgtgttccacgccatcctcgtcttcgtgcagccgctccccgtcgtcatcttcgtcctcggctctgcgtcatcaagcctcgtgccggccgtgtctcgccttcgttcaaggatcgccgccgaagttgttccctcgccgtttgcttccgtcgtccccgagccgtctccgttcccacgccttgtcgcgtggtggtaa

SEQ ID NO: 17936 - DNA, 363 bp, Oryza sativa
  Clone ID: PAT_MRT4530_23540C.1
atgctggtgtgggcggggcgatcgatcgagcgtgtggccgcggcgcggcggccggtcagcaaggccggcggctctggtgccgtatccaagctccaagacgccgggagcaagccatgcctgggcatcgcctcggctgactcttccataggtcgtcgctctgagcttcctctaccactgactcctccactggttgcggctctgagctactctagtatggcgtatcctcctatcgttgcctcctccaccggccgcgagcgtggccactggcagttcctcgatgccggctcgctcgctgtctcttcgacgttgttgggccctggatctgttgccgtcccgcgctcttgccgctatttcccggaatag

SEQ ID NO: 17937 - DNA, 3345 bp, Oryza sativa
  Clone ID: PAT_MRT4530_23541C.1
caggaattcggcacgagggctcatttgtgacaaataagatcgacatgcaaggtattagtgatgacaagcgtattaatgttaaagatggtgttttccctcattcatgtcagaacagtcatctgcggggcttcggcgccagggcaggcgccgctcttcgtctgcgctcgcgggcgcggcgggcggcgccgatctctcgcctcgacggttccttccgtggtcaccccatctcggccgctggtccaccccatgcccgagatgtcggtagccaagaaggaagaggtttgcagtcatcggctcgggccgcgattggatgagccggcggtcggcgtgcccattaagaaaaggccagttttgttgtctgatagattgcttccgtctggaatgccgccctcgatgagaccatcgtctccggcaacggggatggccgtttcagttgcagaggcaggatgcagcaaggacactttcttgaacagatctgtatcagaagaaacaagtgcaatcacaaaaggtaatgggatgtttaatccccaggatcaaaggcatgccaagaggtcattcattcaatctttgaccgagaaaaaagggctgtcacttgatggatcaagtggaatcccttctcgcatagagagtggtacaggtaatgttgctcccgttgatgatactcagagtcagaagtttttgagtttgggtttgcgttcagcatctcgtctgaatggtaagatcaattctagttccaatgtcaaggaagagaaagttgatcagggtctttctagctttccatcagcagattttcagaaggatgctggagcaacaaatgaacccaaatcatcttctgacagtagctttgggcgactaccgaatttggatcttaatgtgccattggaccctcatgatcttgctgaaagtttgcctatagtgcaagattccagtaatatactctaccatgaaactgttcagcttcagaaagcacatgttcccccagtgcccccagtttctacagtgagcaatggactgcatcgaaacattgccagtactttgaacctttccaatgcatatggactttctaataagcgtggggcagctgatgttaccttagacttgcaacttaaaccaccagctagacctgagctaggcataaactggaaaggacttgctcctgttccaggactaagtctctctctgtctagtaagcatgttgaagagtctgagaacaatgctggattaaatctctctctatttggtaagcacattaatgagtctgagaacaatgctcctaatgttgcagttagatctgaacctactaaagagcctgaagaacagtctcaacgacatgttcagaatgatgtagaaaaagaacaaccattagaatcacaaagtgttggactagctaacaatcgcgctgaaattgaaaagcctaacggtgcccaccaagttcctggaaaagctgcccttgatttgaattctggaatctttccaaatgtagcaactgctaacgttccactatcaactgaaagattgcgtgatgccatccgcactgaggccatgcatgctgaccatgaagttaagaaatctatcaagtgtgaggaaacaactgctgcaatcccaagtcctgcaactgcatcagtaagtagtcgctgctcaccactgatggccacaaagcaattgcctttgggagaccgtgatgctagccgcgctggattacgtgtatcagccagccagccctcattgcctactgaacctgcatgctgtaatcctgatgaggctaatgttgattgcaaaccaacaatgagtcatgtgaattctcgcaatgctgttgaagtttgtggttcattgcaaagttcctcgaatcctatacctgaaccatcgatttccaattctcggaatcgttttgggtttgatggtatgtcacaagggagtgctgaaatggactgttcagaagatgatgacaatattgtatcacatctatctactaccaataaacctcatggagggacactagggaacaatcaaacctctgacagtatgggttcgggtagaaatctacagaaggaacatgacagtaatacacatcagaattgctcatttgtgacaaataagatcgacatgcaaggtattagtgatgacaagcgtattaatgttaaagatggtgttttccctcattcatgtcagaacagtcatcaaagtggcaatgttgtcaatgaagagtccaaaaataaacaactattgggatcagataagaatactccaatgaataacaacgacagtaccatacgtgttaagaccatcacaggctcaagtacagcagatacccgaaggacaacttctgtacagaatgaaagagatggtcaggttgacgacccacattggagagggatggggcatccttatgtcaatgtcaatagtaagcgggactgggtttcctcatccatatggaatgaaacatgggagaggcttatgcagtctaagagagagaagaacaaaggagagtaccatggtggcaggcatgcgcctgatacattcaatcaacgaaggccagattaccgttatggtggacgtggtgttggatcccgtggtaatccaaggaacttccggggtccaagaatgaatgaatctgaactttactttgacgatgaacctatggcccgcagaaggcgcccctttgaagattacctagggcacatgcagcgaattccacataggcgacaccgctcctcgccaatgaacaatcagttgcagggcggtttgatgagagatatggacattgatggtttctctggaagagatgttccagaccctaggctgctggcacatgagcatatggaagatctatctgatgacatgatggaggagagatcaccaccattaatcagaactgacagaccatacttacctcatcgacaccacacccgccgccatggttcgccctttgaccgaattgagcatgatgacagaggtatgcaaagaaacatgagaaggtgtggcatgcatcatggaggtgtagaaggagactccttcgagccacatctacatcctgctcaattagccgaactacatgcaaaagctgaacttaccgagagaaggaagtttggcgagaggagaggccatcatctccgaccctttgaaggcagccccgatgacgacgaggtcatactttcctacggcgcggatggtgacatggacttcgccgaaggtggcagcggtggtctgccgccaggagagctcgacggccgcttcaggaggcacatggggagggatgaggaagaagaagaccacatgtgtcatggacctcatgggtggcgcgatggcagctctaatggcagcagggcaaagaggaggaggtactga

SEQ ID NO: 17938 - DNA, 2397 bp, Oryza sativa
  Clone ID: PAT_MRT4530_23542C.1
atggggccgaggggggtggtggggtcggcggcaatgctggggctggagatgcacctcgcccacccgcagatgcacgccgccgcgtaccagcagccggacccccacggcggcggcggcggcgggttccagcagcaggtggcggcggtgaggcagcagcagcagcagtcgtactcgccctactcggcgggggcgtcgtcgagggtgatcaaggcgcccggccatgacgatgggatgggcaacggcgccggtaagggcggcgtggtgcagcagcagcagcagcccgggtcggtggggtgcccgtggacgcggatgaagtggacggacgggatggtgcggctgctgatcaacgtcgtgtacagcgtcggggacgacggcgatggcgtggcggcgggcggcgccgcgggtgggaaggcgtccgcgggggcggcggggcacgggaaggccggcgggtccgggtcccacggcgcgcacgggcaggcggcggcgcagcagaagaagggcaagtggaagtcggtgtcgcgggcgatgatggagagcggccacatggtgtcgccgcagcagtgcgaggacaagttcaacgacctcaacaagcggtacaagcgcgtcgtcgacctgctcggccgcggcaaggcgtgcaaggtcgtcgagaaccacgcgctgctcgacgccatggacgagctcacccacaaggccaaggacgaggcgcgcaagctgctcagctccaagcacctcttcttccgcgagatgtgcgcctaccacaactctggcgcggccgccgccgccgccgcgcacggcccgcacggcgccggcgccgccggcgtcgaggccaccgcctgcttccaccacccgccgcccgcgtccatggccgccgcctcgtccgccgcgcgccaggcggcggcggcggccccttcccttgggatgaaggactcctccgcgggcccggaggacgacgaggacgacagcgaggacgtccccagcagcaacgaggtcgatgacgaggacgatgacgacgacgacgacgacgacgaggtgggcccagggatgaagtcccgccggatctacggcggccaccgcgtccaccaccaccaccaccaccacaacggccaccacaagcgccgccgtggcgacgacgtgtcgtcggcgggcgcgggggacgacgacgacgaggacggcgtgaagcgcgcgaggggggcggcctcggccgcggggggaggcgacgacgaaggcccctccgcggtgcagcagctgcagagcgagctggcggctgcggtggccggcggcggcgacccgcagcaggtgcggcagtgggtacggcggcgcacggtggaggtggaggagcagcaggtggcgcacgaggtgcgcgcgtaccacctggagcggcagcggctcaagtgggagcggttccgcgccaacaaggagcgcgacatggagcgcgcccggctgcgcaacgaccgcctccgcatcgacggccgccgcatgctcctcctcctccgccagaaggacctcgacttcgacatcgccgaggcaaactcctcctctgaccgagcaggtctgtgaccagtgtgcaaatgtgaagtatgtgcgagaaggtgattttttgactgttgatattgagaaaggaatgcaagatgggcaggaagtttcattctttgaggaaggagagcctaagattgatggtgaacctggagatttgaagtttaggatccgaacagcaccacatgagcgattcagaagagaaggcaatgacctgcacacaactgttacaatctccctgctccaagctctggtcggcttcgagaagaccattaagcatctggacaatcatatggtggaaattggcaccaaggggatcaccaaacccaaggaggttaggaagttcaaaggggaaggaatgccattgtaccagagcaacaagaaaggcgacctatatgtaactttcgaggttttattcccgaaaaccctaaccgacgaccagaagtccaagctgaagagcattctcacataaccgaaggcccaggttttcgcttttatgctgcagctagttcgttctcatttgaggtgggaaggaaaactgcctcaaaaaaggaaattttcccagcttacaagcaccagcagctgccttttctgtgggtgtgattttgcgttggtaattgttagcagttcagcagtttaatttctcttttaccttattttgtttctcatgtcattaacaaccgggtgtagcatttaggaagttggatgatcatgagctgtaccaaaatatttgtattgctggaagaatatattgatggtagaattgtagcttacacttcccaaaaatgtatttactggttgtacaacagtcagcagtaaaattaaatggaatttaagtcagggtcattcaaaaaactgctggtg

SEQ ID NO: 17939 - DNA, 337 bp, Oryza sativa
  Clone ID: PAT_MRT4530_23543C.1
gtttttaaccatagctggagcgctaacattgtcccgccacctctgctgtactggcggactttgacatgtgcaagtggctgcagtcaaaacgctataagccgctgggcacgctgcggccgaagatcgtgcaccaccttctactacaagaacgaggcattcaaacatcgcgaccaagccgcactatctcgaggtgcccgctctgtcggtccgcgcagcaatccaccaggcgttcaacgattccggtgactccctgaaccgctgcatttcggggataatcattgacgtttagatggcagatctaggtactgaccagcactagttcttctttgaggcaata

SEQ ID NO: 17940 - DNA, 299 bp, Oryza sativa
  Clone ID: PAT_MRT4530_23544C.1
acccgaaaaaccgggccgacccacccgcccgagaagaccagaaccccagcaaaaaccgggggggccggaacacggagccgaggggggaaccagaagcacacaaccaggggcggaaggccaacacagaacgcccgaccacgggagggagggaaaccggagggaggcccaccaccacaagggcggggaccccggaggaggcaaccagggccaaagggagggcgaccgggggaaaaaccacggggacaaaggagaacaagaggacgaaaggccacgaggaccagccaggagcggacaagaca

SEQ ID NO: 17941 - DNA, 1740 bp, Oryza sativa
  Clone ID: PAT_MRT4530_23545C.1
atggatctcgacaagtccacctctaccagtgcgtcgctgaagaaactgcaggaggatggcgcccttcccggtcgcgggaccatggagagagaagcaggaggtactgaaccccagcctgtcctgggtcgcatggttgtgatcgaggactttattctctgtggttttcttcctccgccttctgaatttcttctcttggtcttgaatttctacggcctttccttgctccatttgaaccccaactccatcgccttcctcagtatcttttcgcatctttgtgaggcctacattggggtagagccgtttcttgacctcttccgcttttactatgagttgcgctggatggaacctaaaaaggtgtccggatgtgtcggtttgagcagtgaagccgtggagcgccacgtcggccaactgatgatcagcggcccgacaacggcgagcaacgtccatgtccccctttgcgagaaaggggcagacgaacgcgaagctgccatcaacccagtctcagctgcagcttttcacagggcggcacgggcgaaggcggcgcaagacgggtctggggggacctccaacgcgtctcctgctgtggcctcgacggatgttgtggtcgtgcccaggagccgcgaggcgacacctagcggcccagacagcgatctcgcggctggtcggggtccgccggctgccgtcctcacctggggagagctccaggtcgagatggggcgtctcctcgaggccggttctcgcggcattagccgcgagatcgcggaggtgagggtggcggcggcatcgtcggcgaatgagcgcgccgaccagctggcgcgcgatttggcggaggttcgcgaggacctccagaagatgagggagctggtggccggcaatgagcgacaacggcaagggctcgagcatcgtatgtcggagcttgagaaccacttgtcggagatccgtggctcgctgtgggtcacctacactggtctgcaccagctcgccggggagtgcagcgtcaagcccaccatcccgacgaatcccgacgagttctcgctgacgtcttcgcttgcggaactagcgacggtgatggaggcgatcccctccaagcacgcggctaggatcggagaggagacgtccaacgggatctataccagggcgtgccatgtccttgcatgtgtgaggctggcgcaccctgaactcgatctgcggaagatcttggatcagggggcggctagcgacgcgcgaaaggacgtgatggaggaagtcggcgatctgggggagtccgttctcccgctttttgaagaagatgttgatgtcaaggatgtccagcagcgcgggcagcctaagttgccagtgatcgttccggcacttgcgttcgagacacatgtgccggagggcgatgatcgtcgcatccagtattggaggacgaagtttgaggtcgcggaactcgagaggactatgctggaagtgaggaaggaccaggccgtagagacactccggggtcgcgagctcgaaggcatcggccagcgtatcgatgaggccctgaagcaggagtgtcgtcgatcgagccgatatgccggggggcatgtattggcttgcatacgagatcatcgtccgcagctgcacctcgagttcctccatgaagggttttctcgttctcggagaactcctacggagatagatggcctggcgaagtcgatggcgccgctggcggagaaagtcttccagtccatggactggcgttggcctttctggtag

SEQ ID NO: 17942 - DNA, 1467 bp, Oryza sativa
  Clone ID: PAT_MRT4530_23546C.1
atggatctcgacaagtctacctgcaccagcgcgtcgctgaagaagctgcaggaggatggcgcccttcctagtcacgggaccatggagagagaagcaggaggcttggacagcgcaaccgtggagcgccgcgtcggccaactgatgatcagtggcccgacaacggcgagcaacgtccccgtccccctttgcgagaaaggggcagccgagcgcgaagctgccatcaatgtggcggcgtcgctgaaggagaaagtcgccaaggaggcgtctgacgctgctgccgctgctaccacaacgagtggcgacaacgttccgaaaaaggagaggaaattctcctctgtgatcggacatcgttggaagacgcccaccccctcgtctgtctcaattgcagcctttcgcagggcggcgcgggcgaaggcggcgcaggacgggtctggggggacctccagcgcgtctcctgttgtggcctcgacggatgtcgtggtcgtgcccaagagccgcgaggcgacacctagcggcccagccagcgatctcgtggctggtcgtggtccgccggctgtcgtcctcacctgggagcagctccaggttgagatggggtgccttctcaaggctggtactcgcggcattagccgcgagatcacggaggcgagggcggtggcggcgtcgtcggcgaatgagcgtgccgaccggctggcgcgcgatatggaggttcgcgaggacctccagaagatgagggaactggtggccggcaacgagcgacaacgagatgttgatgtcgaggatgtccagcagcgcgggcagcctgagttgccagtggtcgttccgttgcttgcgttcgagccacatgttccggagggcgatgtagctcaaaattcgcatgtggaaacgggcatggcgacgactcccttagacctcgagagtgcgcttgctgaccaggatcgtcgcatccagtattggaggacgaagtttgaggtcgcggaactcgagaggactatgctagaagtgaagaacgaccaagccgtggagacactccggggtcgcgaggtgtggttcaactcgtatctgaagagttgctgcacctccatgtcaagggtctgtagagagctccgagtaccccgtggggataccgaggaatcggcggctggatacatctcgtggctaaatggggactgcgcccagctcgagggcatcggccagcgtatcgacgaagccccgaagcaggagtgtcgtcgatcgagccgatatgctgggggggcatgtattggcttgtatacgagatcatcgtccgcaactgcacctcgagttcctccacgaagggttttctcgttctcggagaactcctacggagatagatggcctggcgaagtcgatggcgccgctggcggaaaaggtcttccagtctatggactggcgttggccttcctggtagtctccgtgtcctgtgacaaatgtcttaggggaaaagtgtaa

SEQ ID NO: 17943 - DNA, 2188 bp, Oryza sativa
  Clone ID: PAT_MRT4530_23547C.1
atggatctcgacaagtctacctccaccagcacgtcgctgaagaagttgcaggaggaaggcgcccttcccggtcgtgggaccgcggagagagaagtaggaggtactgaaccccagcctgtcctgggtcgcatggttgcgatcgaggactttattctctgtggttttcttcctccgccttctgaatttcttctcttggtcttgaatttctacggcctttccttgctccatttgaaccccaattccatcgctttcctgagtatcttttcgcatctttgtgaggcctacattggggtagagccgtttcttgacctcttccgcttttattatgagttgcgctggatggaacctaaaaaggtgtccggatgtgtcggtttccgaattcaggatgggctgaagtcgcgatacatccccttccagtgcccctcatctcgcagcaaatggcgggagaggtggttctatcttcagatagaagattcggatccggtctttattgttcctgaggagcaaccagacaagattccatcttggaccgccaaacctaccttgaccccatccctccaatctttcatcgatatcattgatgacctccaagtatggggattgtcggggtatgaagtcgctgccgacttcattggtagacggatccaaccgctccaggctcgagcccatcccgcctttgattattctggttcggaggacgtgacccgggtttctcctcggggcttggacagcgtgaccgtggagcaccgcgtcggccaattgatgatcagtggtccgataacggcgagcaacgtccccgtgcccctttgcgagaaaggggtagccgaacgcgaagctgccatcaatgctctccctctgactgatatcatcgggccgctcgtggaccaccaggtggcggcatcgctgaaggagagagtcgccaaggaggcgtctgacgctgttgccactgctgccacaacgagtggcggcaacgttccgaaaaaggggaggaaattctcctctgtggtcggacatcgttggaagacacccaccccctcggtcgagatggggcgcctcctcgaggctggtgctcgtggcattagccgcgagatcgcagatgcgagggcggcggcatcgtcgtcagcgaatgagcgcgccgatcggctggcgcgcgatttggcggaggttcgcgaggacctccaaaagatgcaggagctggtggccggcaatgagcgacaacggcaagggctcgagcaccgtatgtcggagcttgagaaccacttgtcggagatccgtggctcactgcgggtcacctacaccggtctgcaccaactcgccggggagtgcggcgtcaaggccaccatcccggcgaatcccgacgaattctcgctgacgtcttcgcttgcggaactggcgatggcgatggaggcgatcccctccaagcacgcggccaggatcggagaggagacgtccaacgggatctataccggggcgtgccatgtccttgtgtgtgtgaggctggcgcaccctgaactcgatcagcggaagatcttggatcaggggacggctagtgatgcgcacaaggatgtgatggaggaggtcggcgatctaggggagtccgtcctcccgctttttgaagaagatgttgatgtcgaggatgtccagcagcgtgggcagcctgagttgccagtgatcgttccggcacttgcgttcgagccacatgtgccgggggcgatgtggatcaaagttcgcctgtggaaacgagcatggcaacgactcccttaggttggttgtctttgttatcatctcctttactcttccgtctggatcgacttgatttgctgtattctcgagagagaagagcagcttgacttagtcgtttccatgctgagtagacctcgagagtgcgcttgctgactaggatcgtcgcatccagtattggaggacgaagtttgaggtcgcggaactcgagaggactatgctggaagtgaggaaggaccaggccgtagagacactccggggtcgcgaggtgtggttcaactcgtatatcttgtggctgaatagggcatgcgcccagctcgaaggcatcggccagcgtatcgatgaggccctgaagcaggagtgtcgtcgatcgagccgatatgccggggggcatgtattggcttgcatacgagatcatcgtccgcagctgcacctcgagttcctccat

SEQ ID NO: 17944 - DNA, 1389 bp, Oryza sativa
  Clone ID: PAT_MRT4530_23548C.1
caacaccagatccagcaaggcggtggcgacggattccaccgcccgggaggcaattatggcggtggtcccatcgtggtcgggaacggcgggccagctgttgttgggggtgatggtcctggcggcacgacgctgttcgtcggggagctccactggtggacgaccgacgccgatcttgaggcggagctcatcaagtatgggccggtgaaggaagtgagattctttgatgagaaggcgagtggcaagtccaagggttactgccaggttgacttctatgatcctgctgttgccactgcctgcaaggaggcaatgaacggccacctgttcaatggtcgtccgtgcgttgtggcctttgcctcgccgaattccgtccgtcgaatgggcgaggcgcaggttaagaaccagcaatccatgtctgcacagacatcgtctatgcagcccaagggtgggagaggcggcggcggtgctggaagccctcaggttggtggtaattatggtggtggccgcggaggtggacctggtggtggtgcaggcggaggtggcggaaattgggggagaggtggtggagggatggggagaggacctgctgggaatatgaggaatcggatgggaggaccagcaggcggccgagggatcatgggaaatggtggaatggttgcaccaccacctccaatgctgcctccaggcggaatgatggggcaggcttttgatcctactggttatggtgcaatgggaaggatgggtgctgggtttggtggattccctggtgcaccaggggcagggccattccctgggttgatgcagccattcccacctgtggttgcaccacatgttaatcctgctttctttggaaggggtgggatgggtgctggcggagttggtatgtggcctgaccccaacatggggggatggggtggggaggaacaatcaagttatggggatgatgcagcgtctgatcagcagtatggggaagggggaagccatggtaaggagagggccgagaggccacctgatagggagtggtctggtgcatcggagaggaggcgggagagggagaaggatatacccccagcacaggagtggccagataggaagcaccgggatgaacgagacatgggccgagagagagatcgtgactatgacagagagagggagagagatcgtgatagggagagagaaagagaccgtgacagggagagggacagagagagggacagggaaagggagagggataggcacagggatgacagagaccgctatggcgattatcatcggcacagggaccgtgattcagagcgtaatgaagattgggacagaggaagatcatctggtgtgcgcagcaggtctagggaggttgatcattctaagcgtaggcggatgacgcctgagtag

SEQ ID NO: 17945 - DNA, 198 bp, Oryza sativa
  Clone ID: PAT_MRT4530_23549C.1
atgggctcgagcctgaagcggctggatccgcctaccaatgaagtccgcggcaacttcataccccgacaaccctcgttctcggaggtcgtcaacgatatcgatgaaagattggagggatggggtcaaggcgggccatcccgaagtcagaaaccaacacacccggacacccttttggattccatccagcgtaactcataa

SEQ ID NO: 17946 - DNA, 220 bp, Oryza sativa
  Clone ID: PAT_MRT4530_2354C.1
ctgtagcttacttgcttgttaaggttgttaatgttgtcttctagttcttggcttggtgtcttttggtgtttatgtttgattgtataagttgttttcttagataatggattgtataagttgttggatggatcagcaagtattaggcctggtcattccttccttgtgtactacctcccatgtactatgtttggttttctacttgtcaattcagttaagcctt

SEQ ID NO: 17947 - DNA, 1829 bp, Oryza sativa
  Clone ID: PAT_MRT4530_23550C.1
gggctgcaggaattcggcacgagggttcttcctctctcatgtgccattagccaatagcatcaaggttttggtacattgtagctgattataattcattcatatagctattcaaacaagttcggtggctgtccacattttagctttggatagccggcttgccagctgcctgcctagctctaagcatctcttgctgttggagtttggagaggaaggctagaggaagcatatggcgcccgtgagtttgcctccaggtttcaggttccaccccaccgatgaagaactaatcatctactaccttaagcggaagatcaacggaagacagatagaactcgaaatcattccagaggttgatctttacaagtgtgagccttgggatctgcctgaaaaatcctttcttccgagtaaagatctcgaatggtacttcttcagccctagagaccgcaagtacccaaatggatcaaggacgaaccgtgcaacaaaagccggatactggaaggcaactgggaaagatcgaaaagtgaactcacagaggcgtgcagttggtatgaagaagactcttgtgtactaccgtggtcgagctccacatggttctcgcaccgattgggtcatgcacgagtaccgcctcgatgagagggaatgcgagactgacactggcttacaggatgcatatgctttatgccgggtgttcaagaagacagcgcccgggccaaagatcatagagcattatggtgtggtgcaccaccatgtcgagcaacctcaatggatgacgagcagtatcgatcgctccccaacgttggacgtgtcgtgtgatggaagaggtgatgactttgagagcagcagcttctctttcccaacagagacgccaatggactccatgcacggtgggtttggaatgcagatgagtgcacctcacgaggatggcaaatggatgcagtttctgagtgaagatgccttcaacgccaccaatccattcttgacgaacccagtttctgccaacttctcatgccttccatccaaggtggatgttgcactggaatgtgcgaggctgcagcacaggctcaccttgcctcccttggaggtggaggatttcccacaggacgtcagccttgacacgaagattggcatacttcgcagtaaccccaacgaagttgacattctccaagaattcctgtcagttgcgactgcctctcaggagctaattaatggctccaccagtagctaccctgaaatgtggttaggagctagcacaagcagtgctagctacgtcaatgaactgtcctctctagttgagatgggcggcgttggcacttctaaccaccacgaatccgcaaggctacaggtcgagatcgctgacatggaggtgttcaaggacgagaagaagcgggtggagaaccttagaggagtcaagttggtgaacacagtattccatattcgatacagactgtatacagatacagttcttgcatgcactaactcagagctagattgcaggagaagccggtcatcgcatgaccgatcccactgacgtaggcggcatcgacactgccccgatcttctcgcaatctcaacctgacgactttgctgctggtttcgacgacgtcaaccctaatgcatctttcgatctgtacgagaaggttgacgtcaaccacaggctattcgtttcaagggtcgctgcggcgaagacattcttccaccgcattgagccatcgaagaaggtcagcttccactcgaacccggcagcaaccgccgtcagtaaggcgaccgagaagttccatttccccgttacgaccaaagttagtggtaggataatgggcattgccctctctgcc

SEQ ID NO: 17948 - DNA, 1893 bp, Oryza sativa
  Clone ID: PAT_MRT4530_23551C.1
atggatctcgacaagtccacctccaccagcgcgtcgctaaagaaactacaggcggatggcgcccttcccggtcgcgggaccatggagagagaagcaggaggtattgaaccccagcctgtcctgggtcgcatggttgcgatcgaggactacattctctgtggttttcttcctccgccttctgaatttcttctcttggtcttgaatttctatggcctttctctgctccatttgagccccaattccatcgccttcctcagtattttttcacatctttgtgaggcctacattggggtagagccgtttcttgacctctttcgtttctactacgagttgcgttggatggaacccaacagggtatccgcatgtgtcggtttccaactccgggatggcctgaagtcgcactatatcccgttccagtgcccttcttcttgtagcatatggcgggcgaggtggttctatcttcagatagaaaattcggatccagtcttcgttgttcctgaggaacgaccagacaagatttcgtcttggaccgcgaaacccgccttggccccatccctccagtctttcatcgatatcattgatgacctccaagtacgggggttgtcggggtatgaagtcgctgccgacttcattggtttgagcagtgaatccgtggagcgccgcgtcggccaattgatgatcagcggcccgacaatggcgaacaacgtccccgtccccctttgcgataagggggcagccgaacacgaaactgccatcaatcctgtctcaattgcaacctttcgcagggcggcatgggcaaaggcagcacaggacggatctggagggacctccagcacgtcccctactgtggcctcgacagatgtcgcggttgtgcccaggagccgcgaggcgacgcctagtggcccggccagcgatcttgcggctggtcggtgtccgccgtctaccgtcctcacctgggaggagctccaggttcgcgaggacctccagaagatgagggagctggtggccggcaatgagcgacaacggcaagggctcgagcatcgtatgtcagagctcgagaacaacttgtcggagatccgtggctcgttccgggtcacctacactggtctgcaccagctcgctggggagtgtggcgtcaagaccaccataccggcgaatcccgacgagttctcgctgacgtctttgcttgtagaactggcgacggcgatggaggcaatcccctccaagcacgcggccaggatcggagaggagacgtctaacgggatctataccagggcatgccatgtccttgcgtgtgtgaggctggtgcacgctgaactcgatctgcagaagatcttggatcagggggcggctagcaacgcgcgcaaggatgtgatggaggaagtcggcgatctgggggactccgttctcccgctttttgaagagacaaaatttcaagtagcggaactcgagaggactatgctagaagtgaagaaagaccaggccgtggaaacgctccgaggtcgcgaggtgtggttctactcgtacctgaagagttgctgtacgtccatgaccagagtctgtagagagctccgagtatcccgcgaggatcccgaggaatcggcggctggatacatcttgtggttgaatggggcctgcgcccagctcgaaggcatcggcaagcgtattgacgaggccctgaagcaggagtgccgtcgatcgagccgatatgccggagggcatgtattggcttgcatacgagatcatcgtctgcagctgcacctcgagttcctctacgaagggttctcttgttctcggagaacttctacggagatagatggcctggcaaagtcgatggcgccgctggcggagaaggtcttccagtcgatggactggcgttggccttcctggtag

SEQ ID NO: 17949 - DNA, 2835 bp, Oryza sativa
  Clone ID: PAT_MRT4530_23552C.1
atgaaactcttatctgacattattcattgctccaggcctgtggagacagcggccattgctggcgtaaccaaatctggaatagatatggctcagggacccgtgaagagtatgggcagctatctatgggccagggtaacccacttagtaaaatgtgaggctgaagtcgacaagatgaaggtgaaggtagattcactgcttcgagataagacagacatggagaccatcattgagcatgcaaattatgaatgcagagtagcatccgaagccacaaaacaatggatattagatgttgaagaaatagcaactcaagctaaagatttggttgttgaatgcaagggtaaaagtcttttggtggctgcaattttggagaagatgaaaacacaaaaggaatttgatgaagtcataacagttgaccttagagagaagccaggactagaggagattaaaaacagtttcgccaagcaattgggaatgatatacagtgcaaaactcaatgctcatagagcagcttttctggcagaaaaactcaaggaaaagaagtctatcctgttcttggacaacgcctgggaaagcttggacctctggaagatgggcataccagtcgaggaatgcaaagtaattgtcactacacaaaaaatcgaagtttgcaagtacatgggagcacaagtagagatttcggtggacttcttaactgagaaagaatcatgggaactttgcaaattcaaagcaggagttcctgacatatctggaacagaaaccgtggaaggaaaaatagcgaaaagatgtggccgtttacctcttgcactagatgtaatcgggacagtcctgtgtggaaaggacaagaggtactgggagtgtgcattgtcagagcttgagagttcctaccctcttgagaaggccgaagtgttgcaaaagatatacatgcccttggaatccagttacaaccatcttgaaggggatgagaaaaaatctttgttcttgttgtgtagcttgtttcctggaggacacaaaataagtaaaaatgagctaacaagttactggacaggagaggacatcttcaacgagttcaatactttagaggaaaccaggcgaaaattacacatgaggatcacagatatagaagactcttttctgctgttgccaattaattataccaaatgtgtcatgatgcacgatatagtgagagatgtggcagtttttattgcctcaagattctgtgaacaatttgctgcaccatatgaaattgctgaggacaaaataaatgagaaatttaaaacgtgcaagagagtatcatttataaataccagcatcgagaaacttactgcaccagtatgcgagcacctacagttgttactgctcaggaataactcaagtctgcatgaacttccagagaacttctttcaaagcatgcagcagctggctgtcttagatatgagtaattcttccatccattctctgcttctctctactaaagacctagcagcggtccgaacactgtgtctaaatgattcaaaggtatctagaggcatttggttagtcagtagcttggagaacttgcgagtacttagtctagctggttgttcaattgattcacttccagaacaattgggaaatctaaagaagcttaggctattggatttatcatcgatggaatcccttgagatactggagggactaatttctaagctacgttacttggaagaactgtatgttgacacttcaaaggtaacagcatatctcatgattgagattgatgacttactacggctcagatgcttgcaattgtttatcaaagatgtcagtgttctctctctaaatgatcagatcttcaggattgattttgtgaggaagttgaagtcctatatcatttacaccgagttgcaatggattactctggtcaagtcacaccgaaagaatctatatctcaagggagtcaccaccataggagactgggtggtagatgcattgctaggcgaaatagaaaacttaattcttgacagctgctttgaggaagaatcaacaatgctgcatttcactgcactaagctgcatcagtacatttagagttctgaagattctgcgactcaccaattgcaacggcctgacacaccttgtctggtgtgacgaccagaaacaatttgcatttcacaacctagaagaactccacataacaaagtgcgacagcttgaggtctgtgatccacttccagagcacaaataatccaactaatcaacttgcaagaaactgtcagcatttggagttgggaaggaaatccaccaccacagcatatctgtccaaacctaaaggaactcaatgttcagcgctcagaaaacttgactttgtccttgttgcaagagtagctgctatgcttagtaatcttgagaggttgacactgaaaagcaacgtggctctgaaggaggtcgtggccgatgattacaggatggaggagattgttgccgaacatgttgaaatggaagaaactgttggaaacgaaattgtcagtgctgataccagatatccggcacatcctgcagatgtcggtgactcgttggatccagaagcatttcctagtctaactcatctctctcttgtggatttacctggaatggagtacttctacaaggtcggaggtgaaatcatgagattctcctggaaatcactagtaagtctcaagctgggaggttgccactccctgaaagggttcccaatccatggtgcaagtgctccaggactgaagaatgttgagttagtacataatggtgataaaagctggtaccaaacgctgatatcacaggatgcatctttggctgaacgattcaaaactacacaagagtaa

SEQ ID NO: 17950 - DNA, 1854 bp, Oryza sativa
  Clone ID: PAT_MRT4530_23553C.1
atggatctcgacaagtccacctccaccagcacgtcgctgaagaaactacaggcggatggtgcccttcccggtcacgggaccatggagagagaagtaggaggtattgaaccccagcctgtcctgggtcgcatggttgcgatcgaggactacattctctatggttttcttcctccgccttctaaatttcttctcttggtcttgaatttctacggcctttctttgctccatttgagccccagttacatcgccttcctcagtattttttcacatctttgtgaggcctacattggggtagagccgtttcttgacctctttcgtttctactacgagttgcgctggatggaacccaacaggtctttcatcgatatcattgatgacctccgagtacgggggttgtcggggtatgaagtcgctgccgacttcattggtagacggatccagccgctccaggctcgggcccacctagcctttgactattctggactggaggactcgacccgggtttctcctcggggtttgagcagtgaagccgtggagcgccgcgtcggccaattgatgatcagcggcccgacgatggcgagcaacgtccccgtccccctttgcgataagggggcggccgaacgcgaagctgccatcaatgctctccctctgactgatatcatcgggccgctcgtggatcatcaggcggcggcgtcgctgaaggaggacgtcgtcaaggaggcgtccgatgttgctgccgctgctgccacaacgagtggcggcaacattctgagaagggggaggaaattctcctccgtgatcggaaatcgtcggaagacaccctccccctcggcctcggacgcgtctcccctgcctccgcgacggcagctgcttgtgacgcttggcgagaaggcggcacgggtgaaggcgacgcaggacagatctggagggacctccagcgcgtcccctgatgtgtcctcgacagatgtcgtggtcgtgcccaggaaccgcgaggcgacgcctagtggcccagccagcgatcttgcggctggtcggggtccgtcgtctgctgtcctcacttgggaggagctccaggtcgagatgggtcgtctccttgaggctggtgctcacggcattagccgcgagatcgcggaggcgagggcagcggcaacgtcgtcggcgaatgagcgcgccgaccggctgacgcgtgatttggcggaggttcgtgaggacctccagaagatgagggagctggtggccggcaatgagcgacaacggcaagggctcgagcatcgtatgtcggagctcgagaacaacttgtcggagatccgtggctcgctgcgggtcacctacactgacctcgagagtgtgcttgctgatcgcgaccgtcgcatacagtactggaggacgaagttcaaggtcgctgaacttgagagaactatattggaggtgaagagggaccaagctatggaggcgctccaaggtcgcgaggtatggttcaactcgtacctcaggagttgttgcacaaccatggcggttgtctgtagagagctccgggtacaccgtggggatcccgaggaatcggcagccggatacatctcgtggctgaatggggcctgcgcccagctcgaaggcatcggcaagcgtatcaacgaggccctgaagcaggagtgccgtcgatcgagccgatatgccggggggcatgtattggcttgtatacgagatcatcgtccgcagctgcacctcgagttcctccacgaagggttttctcattctcggagaaaccctacggagatagatcacttggcgaagtcgatggcgccgctggcggagaaggtcttccagtccatggactggcgttggccttcctggtag

SEQ ID NO: 17951 - DNA, 1722 bp, Oryza sativa
  Clone ID: PAT_MRT4530_23554C.1
atggacctcgacaagtctacctcaaccagcgcgtcgctgaagaagctgcaagaggatggcgcccttcccggtcgcgggaccatggagagagaagcaggagatttctacggcctttccttgctccatttgaaccccaattccatcgccttccttagtatcttttcacatctttgtgaggcctacattgggatagagccgtttcatgatctcttccgcttttaccatcagttgcgctggatggaacctaaaaaagtgtccgggtgtgtcggtttccgacttcgggatggcctgaagtcgcgatacatccccttccggtgcccctcatctcgcagcaaatggcgggggaggtggttctatcttcagatagaagattcggatccagtcttcattattcctacggagcaaccagacaagatttcatcttggactgccaaacccgccttgaccccgtccctccaatctttcatcgatatcattgatgacctccgagtacgggggttgtcggggtatgaagtcgctgccgacttcattggtaggcggatccagccgctccaggctcgagcccacccagcctttgactattctaggccagagaacgcgacccgggtttctcctcggggcttgaacagtgcaatcgtggagcaccgcgtcatccaattgatggtcagcgacccgacaacggcgagcgacgtccccgtccccctttgcgagagaggggcagccaaacgcaaagctgccatcaatgctctccctctgactgatatcatcgggccgctcgtggaccatcaggtggcggcgtcgctgaaggagaaagtagccaaggaggcgtttgacactgctgccgctgctgccacaacgagtggcggcaacgttccgaaaaaggggaggaaattctcctatgtgatcggacatcgtcggaagacgcccaccccctcggcctcggatgcgtcccccccgcctccacgacggcagcggcttgtgacgcttggcgagaaggcggcgcgggcgaacgcggcgcaagatgggtccggagggacttccagcgcatctcctgccgtggcctcgacagatgtcgtggtcgtacccaggagccgcgaggtgacgctgagcggcctagccagcgatctcgcggctggtcagggtccgccgactgccgtcctcacatgggaggagctccaggtcgagatggggcgcctccccgaggctggtgctcgcggtgttagccgcgagatcgcggaggcgagggcggcggcggcgtcgtcggcgaatgagcgtgctgaccggctggcgcgtgatctagcggaggttcgcgaggacctccagaagatgagggaactggtggccggtaacaagcgacgacagcaggggctcgagcatcgcatgtcgaagctcgagaacaacttgtcggaaatccgtggctcgttgcgggtcatctacactggtctgcaccagctcgctggggagtgcgggatcaagtccaccatcccggcgaatcccgatgagttctcgctgacgacttcgcttgcggagctagcgacggcgatagaggcgatcccctccaagcacgcggccaagatcggagaggagacgtccaacgggatctatactggggcgtgccatgtccttgttcatcaccttagctttcttcagcattttgatcttgagtactttgttgtcatctgtagagatgttgatgtcgaggatgttcagcagcacgggtag

SEQ ID NO: 17952 - DNA, 1326 bp, Oryza sativa
  Clone ID: PAT_MRT4530_23555C.1
atggatctcgacaagtctacctccaccagcgcgtcgctgaagaaactgcaggaggatggcgcccttcccggtcgcgggaccatggagagagaagtaggaggtactgaaccccagcctgtcctgggtcgcatagttgcgatcgaggactttattctctgtggttttcttcctccgccttctgaatttcttctcttggtcttgaatttctacggcctttccttgctccatttgaactccaattctatcgccttcctaagtatcttttcgtatctttgtgaggcctatattggggtagagccgtttcttgacctcttccgcttttactatgagttgcgctggatggagcctaaaaagggtgtccggatgtgttggtttccgacttcgggatggtctgaagtcgcgatacatccccttccagtgcccctcatctcgcagcaaatggcgggggaggtggttctgtcttcagatagaagattcggatccggcttggacagcgcaaccgtgaggcgccgcgttggccaaaatatgatcagtggctcgacaacggcgagcaacgtccctgtccccctttgcgagaaaggggtagccgaacgcgaaactgccatcaatgtggcagcgtcgctgaaggagaaagtcgctaaggaggcgtctgacgctgttgccgctgctgccacaatgagtggcggcaacgttccgaaaaaggggaggaaattctcctctgtggtcggacatcgtcggaagacgtccaccccttcgcctttcacagggcggcgcaggcaaaagcggcgcaagatgggtccggagggacttccagcgtgtctcctgctgtggcctcgacacatgtcgtggtcgtacccaggagccgcgagtcgcgaggacctccagaaaatgagggaactggtggccggcaacaagcgacaagggcaggggcttgagcaccgcatgtcggagctcgagaacaacttgtcggaaatccgttgctcgttgcgggtcacctacactggtctgcaccagctcgccggggagtgcggtatcaagtccaccatcccggcgaatcccgatgagttctcgctgacaacttcgcttgctgagctggcgacggcgatggaggcgatcccctccaagcacgcggccaggatcgaagaggagacgtccaacgggatctatactagggcgtgccatgtccttgcatatgtgaggctggcgcatcctaaactcgatctgcggaagattttggatcagggggcggctagcaacgcgcgcaaggatgtgatggaagaagtcgacgatctgggggagtctgtcctcccgctttttgaagagtag

SEQ ID NO: 17953 - DNA, 423 bp, Oryza sativa
  Clone ID: PAT_MRT4530_23556C.1
tcaccttagcgttttcagcattttgatcttgagaactttgttgtcgtttgtagagatgttgatgtcgaggatgtccagtagcacgggcagtttgctgaccaggatcatcgcatccagtactggaggacgaagtttgaggtcgcggaactcaagaggactatgctggaagtgagaaaggaccaggccgtagagacactccggggtcgtgaggtgtggttcaactcgtatctgaagagttgctgcacatccatgtcgagagtctgtaaagagctccgagtaccccgcggggatcccgaggaatcggcggccggatatatctcgtggctgaatggcgctagcacccagctcgaaggcatcggtcaacgtatcgacgaagccttgaagcaggagtgtcgtcggtcgagccgatatgccggggggcat

SEQ ID NO: 17954 - DNA, 1095 bp, Oryza sativa
  Clone ID: PAT_MRT4530_23557C.1
atgctgctgccccgccacctctccgccgccgccgccgccgcctccggccgtctccgccgcggcctctcctcggccgcatcgcagcctccgtgggcgatgatacagtacaccaggatacgcgcgtccacggcggagcgcgcgtcgatcgagctcgcccagcccccggccgtctcccacctcgtcgtccccgagcacctcgtcggcctcgaccccgagcccccggtcgatcccaacagcgacatcctccgcaccgtcgtcggggacgccggagccaccagcgacggcctcctcctcctcgacttcaccgatatccgcgccacggcccgcgtcgtcgccaaccgccgcgccggcgcgcaggctcaggctcagcagcaaggcaagaagttgaccggcctcagctttaacctccacaactcacgcggcgacacccaggaacgcgagctcgccggcgtcaacacgaaccctgacatcacgcgcctcgtctgcaaccccatcagcggcgagctgttccgcctcccggacatcaacggcaccaagaagaccatgttctgccacctcccgggcctcctcacccggtccgcgcaggggcacggtcacgggccgcccgacgagtacgccgtcgcatctctcagcgaggggaacggccgcgacgggaaggatcggggcttcgcgatgtggcggttcctgtcgcaaacaggcgagtgggacaagctggagagcttgccgtcgccgctcccgctcgcgcggcagctgaacgtacactcgcaccacgaggtggtagccttcgccggacgaatatggtgggtcgatctgggctggggcgtggtctccgccgacccgttcagcgaccggccagagctccgcttcatcgagctgccgcggagcagcgtgctgccagagccaaccacgggggaggagttcatggcgtcagtgctggctcaggggatgtaccgccgcattggggtcagcgaggggaggctgcgctacgtcgaggtgtcccagaagaagccattcgtgctcagctccttcgccctcgacgacgactacggctgctggacgcttgagcatcaggtggcgcttggccggccactgtag

SEQ ID NO: 17955 - DNA, 126 bp, Oryza sativa
  Clone ID: PAT_MRT4530_23558C.1
atggtgaaccctagtttgccggcgcagctctgtactgtagcagggagtggggaaaatggcgagagttccggcggggaagatgaagtgtcgcttggatctcgggatttcttgttaagggtgtcggag

SEQ ID NO: 17956 - DNA, 357 bp, Oryza sativa
  Clone ID: PAT_MRT4530_23559C.1
atggaggaggccccgcggccaacgaacccgatggtcacgcagctgctcaccgacctctaccagttcaccatggtctacgcgtactggaaggccggcaagcaccttgaccacgccgtgtcaggatccctcattcccttccctctactcctccaccgatctgtgccactgcgaaggtggcggcgcgaggcgggggcggctagggttgggggaggcgcttggggatgccgacgcgagtggaaagcggaggcggaggcggtggggcgagcgggcgacggcacaaggcggcgttggcggcggaagagagagagggagatggagaccgtgggacgagagggagaaggggacggcggtggatag

SEQ ID NO: 17957 - DNA, 513 bp, Oryza sativa
  Clone ID: PAT_MRT4530_2355C.1
atgacggagcttggggctcctcaccgggagaccgcgcaggccctcctttgccggttcggccgggggcgctatgtgaggttcttcgccctcgatctaaggaatgtcagcgagaagaatcgcacaagacacgggcgacgtagacaggttcgggccgctgagaagcgtaacaccctactcctgggtcaccacatgggcctcaagctgcctaagaaaagaaacattctttttacaatgagggctagtctacagccagaagtgacccctgacaagcacagcacacgccttctgctccgctcgtcagctctcccggtggacgcccgtttcaaccttcattcaatggccagcgactttcttgccatgcttgcgctgaagcctagaatggatctgaccgggactgacataccaactccaggagtcagcacgccagctccggctagagacgagagccaggaagctctcatcattccgacgggacggggcgaggcgtgcgacaggccgcctgttgccacctaa

SEQ ID NO: 17958 - DNA, 441 bp, Oryza sativa
  Clone ID: PAT_MRT4530_23560C.1
atgcctctgatcccctacaagcctagggtgtttgacgaggccttcgctgccttggttctgttccttgctctacggcgggtgttcatcattcttatttgtgtactgctggtcgccgccgcccggccgtgggccgccggccgccttgcgcctgactgccgcgcgggtcaccgccgcccggccgccacccaccgccttgcgcccggccaccaccgcccgccgccttgcggccagccctccgcgctggcctccgccgccgccgccgcgctagcctccgccgccgctgcttggggcggccctccgcatgcgacggccgccgccctctgccaccgccacccggccgcctcccctcccggatccgacgaaggggaggccaccgccgccgcctggccgcctcccgccgccggaggggagccggaggggaggggaggggggagagaatga

SEQ ID NO: 17959 - DNA, 1461 bp, Oryza sativa
  Clone ID: PAT_MRT4530_23561C.1
atggtcccaacggtgcttgattgggccatcaggaaaaatggatcgtgcccatcagctgcaagatcagctgcaggacaggtagctcctgcctgtgtcagcgcaaacagtaagtgcgtcaatgtcaccaacgggaatggatacctctgcaagtgctccgagggatacgccggcaatccctatgttaccggcaacgacggatgcacaaatattaatgagtgtgagcttaggaaagctgatcccgccaagtacgagaaactctatccttgttaccgtggtagcagatgcatcgacacagttggtggttatgactgcaaatgccgctttggacttaaagggaatggtaaaaccagtgaccagggatgcaggcccatgattccagcacctatcgtagcgatacttgccacggtttgcgcggtgattgcttttcttgctcttttgttcttgcaaaagaaatggaggcgtagatggttctttgataataacggtggccggctgcttgagggtatgggcattactatattcacggagaaggagctggacagtataacaaaagggaagtgcaccaagattgggcagggtgcctttggtgaagtctacatgggaacctacaaagaccagcaggtcgccgtcaaatactccatcgcaaagggtgcaacacgaacacaaaatgcttttcgttggccaaaatttctcgttccaacaaaagttccatcatcgcgagcgcgtggccaagaatttgttgatgagttaaggatccaatcacttattaggcatgtgaacgtggttcgtctcataggatgttgcctacagacaaaggtccccatgctggtctttgagttcatcccccaggggagcctcgagaaaaaactacacggattcgagcggcaaactctctcgctactaaatcgccttgacattgccattggttccgcagaggctctctcctatatgcactcatctggcctccaaagcgttgttcatggagatgtcaagccagccaacatccttcttgatgacaaccttatccctaaggtctccgactttgggtcatctgagctcgcattgaaaatgaagcatgtgtgtgctgatatgaactatgtcgaccctgtatgcatacaaacgggcaagtactgtactatggagagcgatgtctatagttacggggtcgtgctcctggagctcatcacccggaaaaaggccaagtacgacgatgggagaagcctcccaatagaatttgtcaaccggtacaaagacaacaacgaaaggaggaagatgtatgaccaggacatgttgtcgtctacagatgcactgtatccttactgcatggagtgccttgacaggatggcggccgtcgcggtccggtgtctcaaaaacaaggtggagaagagaccaaccatggcggatgttgtcaaggagcttaagcagttgagagagcaaatatgcacgcgtgtgtcgtcctag

SEQ ID NO: 17960 - DNA, 799 bp, Oryza sativa
  unsure (1)..(799): unsure at all n locations
  Clone ID: PAT_MRT4530_23562C.1
aattcggcacgagctacactacancnnncagcgatgtggtcggcggcggcggcgcgcacggtgaccccgctgccggcggcgtcgcccctgcagcagcatcagcagcggcgcggggcgtgggcgcgggtgggcaatggtcgggcggcgagcacgacggcggcgcgggcagggctgtgggacttcgtgggaggggacctggtgaagccggacatggggcggtggctggacgacgtggagaagcacaagtcgctggccatctacccgccgcacgagggcggctacgagggccgctacctcagccgcctcagctaccagggctactacttcctcgacctctccgcccgcggcctcggcgaccccgagaccaccctcaccaagatccaccccgtctgcccgccgagcctcgggaggcagccggtggcgaggtggtacttcccgccggaggtggactacaggctcagcttgctgcacccggacgccaagggcctcgtcgtctgggtcatggaagccaaggttctctccaaggccgagctgcagttcctcgccattctccctgacatccgccccaaagtcagggtgatcgcggaatgcggcaactggaggaaatttgtgtggaagccgctgaagcaaatcgcgggccttgagccggaccctgacgcagaggaatgaacnanatcnanaccattaacangcancctgaaacaaanttacttgatatatatctcatccaacacatattgtttcccgctttgtacttcacttganaaaggcaatgaanaatgtncatncattttggctc

SEQ ID NO: 17961 - DNA, 252 bp, Oryza sativa
  Clone ID: PAT_MRT4530_23563C.1
atggtccggccaggcgggcgtgcaaatggtgacgagcaccgagtggcccggacctcgtcggcgggaggggcgacgccaagccgacgcttcccgtctctggcaagggatggtggaggggtgctccaggacagcgcgcgcacggggaacctgacgcgactgcgaggaggtgaagggaagccattgaagccgatgtctggttttgcttttggttcgtcacctcttctcaacgccttttcaccattttgtttgtaa

SEQ ID NO: 17962 - DNA, 315 bp, Oryza sativa
  Clone ID: PAT_MRT4530_23564C.1
agcacaatgggcggatcgactgtacacaagctccatatttttggggcaaacggggtcccatgctctaggacagtctaacacttagcgcacgcacatagggattagccaataaatacggtagggcgtgcactgatggtttgtgctaatatcgaagaaatacaccggcgcacagagatggaacgaatgaatatttcatactgcgaccctctcaaacgttaacatgagccgaccaatgcccggaaagggtttctacataaccttgctgggcatgcaggactgcatatcaaccgaggacggatataccctcatagggga

SEQ ID NO: 17963 - DNA, 175 bp, Oryza sativa
  Clone ID: PAT_MRT4530_23565C.1
tcttcggtccttacatagaatcgaattctctctggttctggtgcccaccactaccaccgtagcaatggctggcaactgatctgtcaacagggtggactcgttcaactggggtgcgggggcagcaccgattaccggctagcagggccaggaggagaacagcatggttgggaatttc

SEQ ID NO: 17964 - DNA, 3084 bp, Oryza sativa
  Clone ID: PAT_MRT4530_23566C.1
atggaggtagcagaggccggcgtcgacggcgtggcggggaggcggcagcaggaggaggcgtccggcgcggcgccgttcggcaggtcctcgtcgctcatcggcgccgcgggattcgacggcgcgctgagagttgagcacttgtttggcttcttgccttcttccccgatcgtgtctcccgagctcaaggaccttcgctcccagctgcaccagacggcggactgctgcgagaaggcgttcctcgacaccgagaagaagaagctaattctggagagcacgaaaggttacatctgcgacgcgattgtagcggtgattgatcatttggggaccgtctcatccaagctcgagcaacagctgcaggagaagattgagatcacacaaacagagaaaaagctcaacttcttgaagcagaggctcctgacatgtgaacagtatgcaattactctcaaactattgaccgtacgtggggacaatgatgccattcagtatcatcgccgttacctctcgcaatctactggaggaaccaaagaggaaaatggtgctaactccaggaaagatgatgtaaaatttgtggagtacaacagcccaaccatacctggagcaattcttactttcaagccatatgatattcagtcaaccattgggagagaacgttcggtggcaactacagactctgaaagcccaacaacggatgcaaagagttcattctctttcagagcagaggacgttcccattgttctagctgaacacaggaagaaggcaaatcatggcagcaatatcttgtcatttatcaggaaagtattgattggcaacaatgtacaacctaatatcactgaatccccaatttctgtcaaaccagtgtccattgaccatcatgcaggcgtgttcggccggaaaaatggacctgcggcgtcgggtggagacggggtggaggaaggcgacgaggaggtgcaggctgcaggcgaggcggcggtggagatcagcagcgagaacgcggggccggggtgtagacagtcccagtccggcggtggctccggggaagacggcggccatgacgacgacgacggagagggtagtaataagaagaggaggaggaagaactaccacaggcacaccgccgaacaaatcaggatcatggaagcgctattcaaagagtccccacatccggatgagaggcagcggcagcaggcggttcaggagcgacacgagaactcgctgctcaagtccgagctggagaagctccaggacgagcaccgcgcgatgagagagctcgccaagaagccatctcgctgcctaaactgcggcgtcgtggcaacctccagcgacgccgccgccgccgccacggcggcggacacccgtgaacagcggctgcgactcgagaaagccaagctcaaagctgagatagagaggctgcgagggacgccaggaaagtccgccgccgatggaatcgcctcgccgccgtgctccgcgtccgcgggcgccatgcagacgaacagcaggagcccgccgttgcacgaccacgacggcggcttcttacgccacgacgacgacaagccgaggatcttggagctggccacccgtgcgctggacgagctggttgggatgtgctcctccggcgagcctgtgtgggtgcggggcgtcgagaccggcagggacattctgaactacgacgagtacgtgcgcttgttccgccgcgaccacggtggttccggcgatcagatggccggctggacggttgaggcttccagggaatgtggactagtttaccttgacacgatgcatcttgtgcacactttcatggacgtggacaagtggaaggacctattccctaccatgatctcaaaggcagcgacgctggaaatgatcagcaaccgcgaagacgatggccgagacggcgtcctgcaactgatgtatgcagagcttcagacactgacaccaatggtgcccacgagggagttatacttcgcccgctactgcaagaagctggccgcggagagatgggcgatcgtcgacgtgtccttcgacgagtctgagactggcgtccacgcgtcgtcggcggtcaggtgctggaagaacccatccggctgcctcatcgaagagcagaacaacggccggtgcaagatgacctgggtggagcacaccagatgccgccggtgcacggtcgcgccgttgtaccgggcggtcaccgcgagcggcgtggcgttcggcgcgagacgctgggtggccgcgctccagctccagtgcgagaggatggtcttcgccgtggcgaccaacgttccaacgagggactcgaccggggtctccacgctcgcgggcaggaggagcgttctgaaactggcgcaccggatgacgtcgagcctctgccgcaccaccggtggatcgtgtgacatggcgtggcgcagggcgccgaaaggaggcagcggcggcggtggcgacgacgacatctggctgacgtcccgggagaacgccggcgacgaccctggcgagccgcaggggctgatcgcgtgcgccgcggcgtcgacgtggctgccggtgaatccgacggctctcctcgacttactgagggatgaatcacggcgaccagagtgggacgtgatgctacccggaaaatctgttcagagccgcgtgaatcttgcaaaggggaaggaccgtaccaactgcgtcaccgcctacgccgctcgaccggaagaagaagaagagagaggcggcaagtgggtcctccaggacgtctgcaccaacccctgcgagtcgacgatcgcgtacgcggcgatcgacgccgccgcgctgcagccggtcatcgccgggcacgactcgagcggcgtgcacctcctgccgtgcggattcatctcggtgatgccggacgggctcgagtccaagccggcggtgatcacggcgtcgaggaggggaggcgaggcttcgggggccggatcgctggttaccgtggcgttccaggtcccggccagcccgtcggcggcggcggccacgctctcgccggactcggtggaggccgtgacggtcctggtctcctccactctgcgtaacatcaggaaagccttggggtgcgactcgtgcgaggaggaattctag

SEQ ID NO: 17965 - DNA, 3975 bp, Oryza sativa
  Clone ID: PAT_MRT4530_23567C.1
ctaccgcatctggaacttgaggtggttgattgagaggaagaagaaggaggagaagagcgcgataatggcgacgtgcaggctggtgacgaggttgaagtagcgggtctggagtctgaggtagccctccaggaactccttcaccgtctgctctggctgccctggcacctggatcagctccgtccggtatcccagctgcgagaacatgagcccgtacaacgtccatgccgccgggtttgcccaatacacccatctccaccacaccgggatcatctgtcttccaatgaggactccagagaagacattccaaaagatgaagattaggaaggacaacacagctggtatctcaatgttaggtgttagtgctactgtcatcatcccatagagcatctagtacatgaaacttaacaccatgtagagagcaaaccaaaagaacttagtggcagtcatttggaacccaatcattgggtacacaatcgctgagaagatgaatacttggacaaacatgtaaggcaattcaactgccacctgagcaatggcgtacgccatagtggagtacatgcctgccgccttctctctgtagaggacaactctttccattcctacaactggttgtaagatgctgcagttcatgaaacccagaaatagtgctgacccatacacaacccctagtatgttgaatacatcttgctcatccttaatggttgagccaattttccagaatacaattccaaacataattgacacagcaaatgtgtttatgaatcggacaacgttgtgttctgaatttttccaataagcacaattttgcttccacaggcatgccatgcattgtgccctaaagtcttgccaatatttgggtggaaaatgtagatcctctgtgtttggttctggttttcctaggtcatcaattagttgcctgttctcccagtatagggatgagcgctgataaatttctgcatagtccactccaatctcatattctgctgtgcgcgaactgatatctaacatccacgctgctgggttttgcccctcttttattctaggaacaccaggtatagcctcgaaatactttatcatattgctagataggggacctaatgaaccactgtatatgagctgacctcctctcttcataagtagaagctcgtcaaaagattcaaatatctcgatgcttggctgatgaattgtgcagacaacagttcgtccagtgtctactgtctttcttactgttctcatgacaattgctgcagcacgagcatccaaaccagtggttggctcatccataaatataatggaaggactagctaccaactcaacagctattgttagtctttttcgctgctcagcagacaggcctgtcgctcctgctaggccaaccatggcattcttcagtccagttaactcaactaggtccatgacttcatctataaacatatttctctggtgagatttaacatttgaaggaaggcgaagccatgcagaaaactgcagtgattcatatacggtgagattgggggagtgaatgtcactctgttcacagtagcctgagatccttgagaatgtctcctgcttctttgggtagcctgctatttttacagttccttcaatgtatcctccagtttttcttccagccaaaacatcgagcagtgttgtctttccagcaccagtgatccccatcagagctgttagcacccctggcctgaaagcaccactgacatcttgtagcagctgaagctttttatctgttactccatattttgtcatctccttaggcatgtcaacaaaataattgatatgatcaaatacaagggagaggggctgaaatgggaggatgacttggtccgttgatgccgtgccatttccaactatctggctgttgtagtctactttcacctttgtggcattgatgttaacttgatgcttgtgtggagatctcatgtattgtagtgcaaatatgctgaggatgttgaagaccagcgagaatccaaacaaaatgctcacacagatccagtaccagtgccactctgtgagcagcccccttaccttgaggatcgtttcaccaacagtatttgcatttgcgaaatgaaattctgtagcccatctgtcgtcaaggaattcattcagggcaactgcattctgtgcataggtgaatggggacgtccaatatccccagcgcagccatggttggaggttatcttttgatatgacaaagcctccaagtatgtagattgctataagagctgcagtccccagcatattagccattacttgtgttcttcctatggctgccaagaagcgatacaggctcattgacatttgatgcatggcaaaaagtaccacaaagtgctggataaatctgacaaaggaaggtgcgtagccgatcacatagtaggttaagccggtccaaagacctgtctctacaaatgatattggcagactaaggaggaatactgaagaaaggagtgcccatcctggcaatgctagtatttctctttgcttgtagaagatggggagccgctttattgtcattgcaatttcagtcatgccattgaagtttactatgacaacagccataaagagtgctcccatgtacttattggcatcaagtacagtatcatgtctcatatttgtccggagaaaaagagttgagatcactaaagcgagaacagttatctgtatggtcttgaatatatgcactggagagtttctttttaggagcagcacttcccttgaaaagcatgccttgaaaatattccagctggagatcatgcgacttgtgcttgtttttacctccttgctctttccggcattagttgattcaaaatgatcattttctacgagtcttgggaggtacgaggtacggaaggactctgcaaatttttcaattgaatggtattgatacttatttgcgttgcctatccagtattgtttttggtccatcttcgaggtcacctcttgaaggaaatctgctacattcttcctgctggggcatttgaatcccatagtttcaaagaaatctgtagcattttctcgaggaccatggtacacaatttgcccctcacataaaaggattatgtcatcaaataactccaatgtctcaggtggtggttgtagcaaggaaataaccattgtgagatccatcaagtgagccatttgttgcagaaacttcatgatctcaaatgtggtggagctatctagaccagttgatatatcatccatgaagaagcatcttgcaagaccaactagcatctcgccgattgtagctcttttcttttgtcctcctgatatgcctcttcgcatctcgtctcccactagggtatcagcgcattcggataaaccaagtatctgcatgcactcaatttttatggcttgataatatagtttgttgtaaggttgcttccttctccaaaggttgtggcctgtgcaaatcagctttttaagtgatgataatgtcatttcagcatggtgaagatcatactggctaacataagcatgtagatactgaggtgtcgaggaattcacttcttctccattgtaagtgacctttcctttcatcttcagagaagaatccaactttcctgctaatgcttttaataaggttgttttccctgaaccaggtgctccgagaagaagtgtcatccttgatggtcgaatcgttccggttgcttcatttataattttcatgggctttttccttgtggtgcacatgtgcgcacaggctgctagttcctgagcggcgttgatggcgcagttgagcagcgtcggcacggcgcggcggccgactcgcacgtccgcctccaccgtcagcttctccagcctcacctccaccttcgccgcccctacccccaacctttccttcttctcccggagcatctggaggaagccgcggttgtcgtcgtgggtgagcggcggcgacagccacctcgtctccgccgtggttcctccgtcaccagtgagctccaccgccgccgccat

SEQ ID NO: 17966 - DNA, 244 bp, Oryza sativa
  Clone ID: PAT_MRT4530_23568C.1
atcgactcagatgtgagattatacgtgcataagctgttgcttcagaagaaggcaccccaaacatgggggtgcccacactagccgaccaggccagtgcaacagccattgggcattgtgtgcaacataatctacatgctgcaataacacatgctagactataaccgaaatatcacgcttaactcctttgacacatgtcctctggacctagaatggatccgagtacaatgcattaagctggcacata

SEQ ID NO: 17967 - DNA, 1613 bp, Oryza sativa
  unsure (1)..(1613): unsure at all n locations
  Clone ID: PAT_MRT4530_23569C.1
aagaccttctccctctccacctcgctcctctctcctctcgtggccatggcgatggcagcaagggcgcgctgctcgaggcaacccaactcccatcgcctcctcgccgtggttgtcctcgccgctattctgctccttccggtggcctccgcggcggcggcggtggtggcggcggtggcggagggggacggggtggagaaccggtcggcggcgaggcagtgggcgacggggaaggacgagggggagctggtctccggggaggagtcgaggggaggtgggtcggtggtggaggacgagttcgcgggtgggttcggctccctcgacagcatgctgcagtgggcgatcggaaattctgatccggataagttgaaagaacaggcagagggtgtgcagaaattgtctgcagatgagctgctcaagcggcgaatggagatcaaggagttgatggagaaattaaagatgccgtcagatgctgacttaatgaagattgcaattgctgacttaaataattcttccatttcactggaggatcggcagcgtgcactgcaggaactattaattctcgttgagcccattgacaatgctaatgatcttgacaaactaggaggcctcgttgctgtgattcaagatcttaataatgcaaatgaagaaataaggaccacttctgcatgggtcctgggtaaagccagtcagaataatgcccttgtccaaaatcagatcctaggttatggagctttggcaagattagtgaagatgggctatgcaacttctgcagaagaagctacaaaggcgctgtatgctatatccgctttggttagagacaatataaatggtcaggaggcatttcattcagaaaatggaagtgcaatgttgcagcacatattggcgagtaatagtgttgacgttcggcttcagaagaaggcagtgtttctagtgacagatctagcagattttcagctaaattctggaaattcaggacttcctttcttaagtgaccgtatttttcttaagtcattggttgatatgctgtcaagatttgacctcgaccttcaagaaaaggttttgttggctatcaagagcctactgaagctttcatccactgaagccacagatttcgagtcctgtgacctcagcagtgtactgtacagattgggcgtgcagttggaggagttgccatcagaagagcaaaaagagtatgctggggaggtggatgacctccggagagaagtccaaattctgttccaagacaagctcaaagagggcacaaagactgcattgtgatgatattaggacgaattaacgacggatgtagtatgcaatggaggcattaaatttttcaggagtatagttgatgtttggggccattcttgcagtgatcagaatcctcagaggatcaaatggagtcatggaatatttatctgtggatcttcggccaggtggtgacatagtgtctgtaggatttgatgtaatcgtaggttaggattattaactgtatggcttcttttcctgaagctacctatggttaattcatcattccctgcactatattttaaccactgcaatgaagcaaattttccccttaagtcnaaaaaaaaaaaaaaaaaaaaaaaaaaaaa

SEQ ID NO: 17968 - DNA, 852 bp, Oryza sativa
  Clone ID: PAT_MRT4530_2356C.1
ctatctaactgttgtcgatatggcggtctgaaggtctgactcgtagtcgacaacagggtagtcttcctcctcgagttcgtgcccgacgagatcagagacagcgctttcatctctccatttcttcattccgtattccttgtcgagatccaccaaccgttctcgagcgatcgagaaggtgtagaatctgcgacgaagccttatcaacacttgtcgtactcgccttagtcgatcttggtgtagaaccatagagacatgaagtcttcgataatgtcgaatagaattttcatggtctttcgtctctgaaggatccaacaaggccttatccgctctgggcgtccctagccgaagttcccttaggttcctcagaggccggttcgagaaccaacgagcgagtagaatcatctctcgaacaccaatggaagttgcggtgcgggagattgctacgtactggttcgagaaccaacgagcgagtagaatcatctctcgaacaccaatgagggtggcggtgcaggagattgctacgtacttttctcgagtagtccagccatggccggtgctatgagataggtcgtcggtcttcgttggtaggttgggcgtgacgactctacatctgtcgagatcgttctcgataatgcggtgtacttgaccacaacctactcgagtgctcaattgtcccttgttgcgtactcgttcaacatcatacgatctgacatctttcggtacgccgcgaagcttgaggcttggatgatctcgatagaccaagttgtcgatgacgatgatggttctgatctggttaggttggatctccccctcagctgaagtcatcgagtagctcattgtcggagaatccat

SEQ ID NO: 17969 - DNA, 141 bp, Oryza sativa
  Clone ID: PAT_MRT4530_23570C.1
ttggggttttcaggacaaggggcctatcatcaaaaggccaatacttccaatatacggtcaaacagtaagaccaggtcaatttaatgacagactaccctccttgctcgtacaaacatggcgctaatttgatcctgctttgtc

SEQ ID NO: 17970 - DNA, 1155 bp, Oryza sativa
  Clone ID: PAT_MRT4530_23571C.1
atggagctgtctatgagcggcggcgcgctgcggacgttcacgcggtgcgtcacctgcctcgcgcgcgtcggctccgacctcgtcctccaggcccaccccgccaagcttgagctgcacacgctcaacagctcgcggtcggcgtacgcgtccatctcgctggcgcgggacttcttcgacgagttcagcctctccgccgccgccgccgccgactcggcgccgtcgtcgacgccgctccagtgcagcgtcctcctcaagtccgtcctctccgtgctccgcacgccgaccgccgcgctcgaccgcatcgccgcctccctccccaaccccgacgcgcccaagctccagctcaccctccactgcctcaacggggtgaagaagacgtactggatcgcgtgcagcgcggagtccgaggtgcagacgctggcgctcgaccgcagcaacttctccagccgcctcgccatccggccgcgggacctggcgcgcctgctctccaatttccagtcctcgctgcaggagctcacggttattgccaccgatcctgctgctgggctctccaacgtcggcgtggatggtgagattgaggggaaggctgtcgagctcagaagctacattgacccgacgaaagatgactgcgatacgaggctgcacacgcagctgtggattgacccaacagaggagttcgtggagtatgtacattccggtgattcagtggatgtcacattcggggtgaaagaactcaaggctttcttaacattttgtgaaggatgtgaagttgatatcctcctattctttcagaaggctggcgagcctgtccttttggttcccaaatttgggcttgacgatggatcaagttctgattttgatgcaacactagttcttgccactatgcttgtatcacaacttactgacagcagtgttgcccaacagccaactacttctgcacagcgagcagaagaaccaagggttgctgctacaccaccaccagtccctgaaaatgtctcaaaccatactaaaatatggtcggagctatcagatgttgtcagtgataatcctcgatcacagcatcacccaagcaattgggtaggtgctgatgaagatgacgatgatgacgaagatgaggagcttttcgtccaaacaacaccgcactacatggactag

SEQ ID NO: 17971 - DNA, 479 bp, Oryza sativa
  Clone ID: PAT_MRT4530_23572C.1
gattgttggcatttcttatgaccacagataaatccgcaagcgcacagaatacaattatagcacttcatcttcggtgaccccaaaaggatatcgaactcagcgaacgattactaggacgggatttagggctatcaccacctgtcgcctacctctgacaaatccgtgggatacacaacaaacaaagagaagtttttctgaacccagagcagagtgtaccgacagctcaggtactcctcccgaattccttctaggaagctattctcgtcgaggtagaagtcggatgagcgccaaacttccgagcactcctccagagcttcccctcactctatacctaattctaatgtacaaaagatacaataaagcctcttgtaattcagctcaaagttgtgtgtgcttgaagtgagatggagacctccttatataagctctaaatgacggttaggggcatgggaaatgaccaaaccaccctgtaaacgcca

SEQ ID NO: 17972 - DNA, 204 bp, Oryza sativa
  Clone ID: PAT_MRT4530_23573C.1
acgaccagcatgcgtcggtgcggcgcggcgaacgaggggcgcgcatgtggtggaagggcgacagtgcggctgctcgctggaggaggccccgcaccggcccgcgccgaccacgagtcgagacgttcttcttgaagaactgccctgtcgccactacctgcctcaagactacctacatctacagagggagtgcattctcagcaagga

SEQ ID NO: 17973 - DNA, 1439 bp, Oryza sativa
  Clone ID: PAT_MRT4530_23574C.1
tctttgacatcagcaaatgagaaggtcaagaggggcttacttgattgcaagaaacttcctgaagcaatctccggctgttggaacttgcagtcacttcattttattcggtgcagcggatttgtgatgttacctgagtctgttggcaaacttaagaagctaagaactttagagctaaattatgttattgatcttgagagtttgccgcagtccattggtgattgtcaaggtcttcaatccttgcaactacatagctgtaacaaacttcaaggcatgccgacttcgataggcagaattgagaacctaagggtgcttcatattacgtcgtgtccatgtatgcaaaaactaccgtcagagccctgtggggagtccaacaacctggagataatcaacttatctaattgccacaacttccatggcctgccaagcacatttgcctgcaaagcattgcgtactcttaatctttacaataccaagattaccatgttacctcaatgggtaacttcaatcgatactctagaatgtctagaccttggatattgccacgagctcatggaatttcctaaaggtatagcaaacttgagaaggcttgcagttttgaacttagagggttgcagtaaactacgttgcatgccatcaggtttcagacaactgactcgtttaacaaagatggcttcctccacttgcccatgaatcttctccttgcagcaatgcgcactcagcggtgccccgactgaaggaactaactataattaaaatgacaggatcatcgtgtggttgggatttcctgcagtaccttgatgcactagagtacttcaatatttttggcagcaatgacctaacacaattacctgagagcatgcgaagcctcacctccctccacaagctaatcatccacgactgtcccacctttggcatgctgccagaatggcttggagaactgtgttctttacagtccctgtttatcaaggggaccccaatgatggacagtctccctcaatcgattggctgccttacgtccctcacgcacttgactattgcatgcgataatttgaaacagctgcctgagacgtttcaccacctcacctcccttcgagaactcgacttggcaggatgtggtgccctgactgcactgccagaaaacatcgggaaactctctgcacttgaagcactatatgtcggaccgtgctctgccattcaatgcctgcccgagtccataaaacaccttactaatctccggcgattgaacatttctggttgccctaatttggtcaagcgttgcgagcaagaagtgggggaagactggcagcttgtctctcatattcctaatttaacaaactaaccaaatcttatctttaacttcttgtcttttaacttaaaacatatctatctcttatccatagcagcatatctcctaattaaataaaagcaaccagccattg

SEQ ID NO: 17974 - DNA, 3447 bp, Oryza sativa
  Clone ID: PAT_MRT4530_23575C.1
atggcccgtaagatcaaggatatcaaggtgaaatataatgagattgtgcgacaaagaagggatgccaatactatacgcagtagtttacaagtggatcaacctattcctagcagtaacatgataatcggggagttgtccttgttgagtaatgttgaagaatcaaaaatacctatcagggaccaggagatggatacaattgtatctatgcttgtagactctaatgagggagagaattgttggatagtttccgttgttgggctaggcgggtccggcaaaactactctggccaaacacatttgccatgtcaacaagataaaggagctatttaaagagagaattttctgggtccatgtgtctagagagtttgatgtgcaaaagctcatcggcaagctatatgaaactatcgttggcagaaagtcagattgtcaaccccaacagcagatggtccgtgaaatttccaagcagttatgttgtaataagttccttcttgttcttgatgatgcttggcatacggatgggtatgagtggggacaattcatggtgcatctacaggataggtcaattggaagtaggattttgctaactactcgtgatcgaaaggttgcagaagtagtcaaatccaaacaaatacatgagttggtgttcttaacagagtctgagagttggagcttgttcctaaagtgttctgggtgggtggaggatgatttgggatcagaatttatacagcttggaaaagagattctgaagaaatgtggtggggtacctctagcaatcagaactattgcaggtgtcctctgtgaaaagagggagataagtacttggagagccataagagggagtgacttatggaacgttgggagtgtaaacgacagggtgtttgcatccttaaagttgagctacattcacctggcagataaactaaagcagtgctttacattctgctccatatttccaaaaggctatgtgatcaataaagacagattggttgcacaatggatagcccatggattcatcacgccgatgaaggaagagcagccaaaagatattgcaagtgaatattttgattctcttgtgaaagctggcttctttcttcaagatacgattgaagagtttggttacttgcacaagatgcatgacctgattcacgatcttgctcaatattgtgaaaagaatgaagtggtgacatctcgaccgaacagtatgtctacatatcagacacacaaatgcagatatttatctttgacatcaggaaatgagaaggtcaagaggggcttacttgacaaggttcatgctttatatatgtctgatggcaacctatcattcgataaaccagttaagaagagttgctatatccgcagtgtaattttggacaatgaaaactgtaccacttttccaccagtcttgttgaagtttgaatttcttggatatcttgaaatccatggagttgattgcaagaaacttcctgaagcaatctccggctgttggaacttgcagtcacttcattttattcggtgcagcggatttgtgatgttacctgagtctgttggcaaacttaagaagctaagaactttagagctaaattatgttattgatcttgagagtttgccgcagtccattggtgattgtcaaggtcttcaatccttgcaactacatagctgtaacaaacttcaaggcatgccgacttcgataggcagaattgagaacctaagggtgcttcatattacgtcgtgtccatgtatgcaaaaactaccgtcagagccctgtggggagtccaacaacctggagataatcaacttatctaattgccacaacttccatggcctgccaagcacatttgcctgcaaagcattgcgtactcttaatctttacaataccaagattaccatgttacctcaatgggtaacttcaatcgatactctagaatgtctagaccttggatattgccacgagctcatggaatttcctaaaggtatagcaaacttgagaaggcttgcagttttgaacttagagggttgcagtaaactacgttgcatgccatcaggtttcagacaactgactcgtttaacaaagatgggtttgtttgttgttggatgtgatggtgataatgcaaggatctcagagcttgaaacccttgatatgataagtggtaagatgaaaattatcaaccttaaatatacgctggatccaactgatgcagataaggccagcttgaagaggaagaacaacataaagtatctggagttggactggtctcgaggtgaaactgaaaaggagttagtaacagatatggtcatggagcaagacctggctgtgctgaacgctcttgaaccaccatcccgaattgaggaaatattaatatattattatggaggtccctgtttgccatggtggatgaagaagcaaactgattcttcttgctgggaaagcacaatgttaaagcaaaccaatccatgtcagcttatttatctaactagaatgacactacatgaaattccaaacttgaagcatatgcaaggacttgttgagttgcctttgctgaattaccttgaactatttggattgcctaatttggaggacatgtggaccacgacaggaggtgcagaaatcaggggtgatgaattgcaggcaaaatactgtttccctgccctgtccaccttatggataaggggctgtccgagattgaatgtggtgccctacttcccatcatctttggagagactttttttaagagaaagcaatgatcagctgctatcttcaggcagcttctcccatctccttcctccacttgcccatgaatcttctccttgcagcaatgcgcactcagcggtgccccgactgaaggaactaactataattaaaatgacaggatcatcgtgtggttgggatttcctgcagtaccttgatgcactagagtacttcaatatttttggcagcaatgacctaacacaattacctgagagcatgcgaagcctcacctccctccacaagctaatcatccacgactgtcccacctttggcatgctgccagaatggcttggagaactgtgttctttacagtccctgtttatcaaggggaccccaatgatggacagtctccctcaatcgattggctgccttacgtccctcacgcacttgactattgcatgcgataatttgaaacagctgcctgagacgtttcaccacctcacctcccttcgagaactcgacttggcaggatgtggtgccctgactgcactgccagaaaacatcgggaaactctctgcacttgaagcactatatgtcggaccgtgctctgccattcaatgcctgcccgagtccataaaacaccttactaatctccggcgattgaacatttctggttgccctaatttggtcaagcgttgcgagcaagaagtgggggaagactggcagcttgtctctcatattcctaatttaataagtgactaa

SEQ ID NO: 17975 - DNA, 204 bp, Oryza sativa
  Clone ID: PAT_MRT4530_23576C.1
acatgatcgagcaatagaacatcgtcctcttcctccaagcgtgagaagtcaatggcacgctggccagtcacaagctcaagaagcatgatcccgtagccaaaaacatcagttctctctgatgacttccctgtcttaaactggccagaaagaaaacgggtggccattggtacagcacgtggactagaatatctgcatgaacactgc

SEQ ID NO: 17976 - DNA, 663 bp, Oryza sativa
  Clone ID: PAT_MRT4530_23577C.1
acactagacagtttaacggtttatgtccaaaggatgttgctcctctctgttttcgtttagccaaacgaaagcaacgatgtgtccagtttgaaatttcgtcaaacaattggattgtttctttctgacaattcacaacagtggaagagctgcatgacctagtgcaacttggggggaatgatccaagatatctaactctcccaacaaccggatgaaattaactggaactggaatccttccagggtttactctagtaaagaagcctactcctatcaatttgcaggaacttttgcacgattggattttgatgccctatggaagtcaccagctgagctaaaaatgtgatcttttgggtggttgatccttcatcacaaaaccctaacagcccaaaacctgctaaggcgtcactggccgtgcaactggatatgctgtctttgcacgtctacattcgaggatacaaatcatcttttctgtgactgtgtgtatgtcagagaagtttggactctcgttcattcctggcgaaatctactaatgaaacatttattgacaagccctccaatactggactccatgtcactgactcactgcatgctcttgtgaacatgcttcattcaacatatatacctagctacacatgctagtcatggcatctccaaatcatttttt

SEQ ID NO: 17977 - DNA, 348 bp, Oryza sativa
  Clone ID: PAT_MRT4530_23578C.1
atgaaggtatcagccggtttgcagtactcatcttgccagattcggtggatctttcattgtccgggttacatcaaggatgataccatcacggttgaaagcacggtgaaggtcatcaaagaatcgcggctgagcgaaaccaaggggacctctgagatcattcaagtgccgccgtcagacatcgcggagcatcttggcaagttggcaagctgctggagacaaagcagggagcatatgttaccttcattgttggaagggggagctttgcggcgcataagatcgtgctcgcgatgcggtcgcctgtcttccaggcgcagctctgcgtgggcctacattttaccaccttcataa

SEQ ID NO: 17978 - DNA, 161 bp, Oryza sativa
  Clone ID: PAT_MRT4530_23579C.1
cacacaaagtactcatccaaatgcggaggaatattttcttctcggttcataatagagagattcatagatcgatcagacagtgcaaatccatggcttgtctctcaaaccgagccaacgaatcaaaaagaataaaccactccaagactcccatccttttacat

SEQ ID NO: 17979 - DNA, 1191 bp, Oryza sativa
  Clone ID: PAT_MRT4530_2357C.1
atggccgaacgggcagtggcgcacagcctctctccgagcgctagcggtgacgacggggagcagaacccgcgctgtcgggctcgcaccccaccgtccccctctcgccgaaatcttgggcggggggaggcgctcggggaggtcggaggatccgcgacttcgccgcccgcgggcgacgggggaggatggcgagacggggcacgtcgccgcctcgtctacggcgatggcagcacgccccagggcgcgctccaggctgcgggcgcgctcctgcgtcacccgcccgttgtccccgatccagagactccagcccggcgttggctggatgacgtggccgacttggtcatgacggcgcagcagcgcctaggcgccggcgggcggtcctccgccaccgaggcctctggcgctgccgccgccggctccatgtcgtcgaggcggagggcgcggcgagcggcggccgttacccgccgtccgtccgccattccctcgtcaacgcctccgacccaagaagatgtgcgtggggggccggatgcccgcctcgatatcgagcgccagcgcgatgctcgtcgcgccgcccacgcaacggagggcgcttcctcgtccggagcgccacttcggtccgggcacgggggccggcctcccgtgtccccggttggcggtgccggctgtcgagcctttgtggcgagccttcggaacgtccgttggcccccaaggttccggcccaccatcaccgaaaaatacgacggaagcgtcaaccccgccgagtttctccagatctacacgaccgggatcgaggccgccgggggtgacgacagggtggtcctcccatctgagctcaccctgaggtcccctcgggtcaccatgtattgcgaggctgatcaagatcagcttcgccgagacgacctcgactatttggaagagcgaaggcggcgcgcggccctccgagccgcacgctaccagcagagcctgcggcgctaccatcagcaccacgtccgggcccgatcactctgcgtcgacgacctcgtcctacgccgcgtccaaacgcgtgctggactgagcaagctctcaccaatgtgggagggtccgtatcgagtgatcggcgtcccccggccgggctccgttcggctggccacgggcgacggcacagagctgcctaacccgtggaacatcgaacaccttcgtcgcttctacccctag

SEQ ID NO: 17980 - DNA, 206 bp, Oryza sativa
  Clone ID: PAT_MRT4530_23580C.1
gtctcacacgggcgtgaagaggtgcaggcagcgggccgcatacaaaaccgagccagaaggcgcacattcatccaattattaagggctcctctaagtggcctaagcacacgcagaaccaggacacacccgcgagaaaaaaatcctataaagaaatggattgggccatgacccaacgccgccaagatcctgtcctttttgtgtgcgca

SEQ ID NO: 17981 - DNA, 333 bp, Oryza sativa
  Clone ID: PAT_MRT4530_23581C.1
atgagcaggagaggcggcggcggcagcggcgggcggcaggggtcagagcccgaatcggcggcggccgtgcacgtcccggggccctgcgccgcgacgcagcgggcgctcgccgagtgccaccgcagcgcggcgcgcggcccgctgaggccggaggtgctgtgccggcacctcaaccgggcgctggccgagtgcctggtgacctcgtgctgccccggggagacggaggccgtccgcaccctctgcgggagcgccggcaccgcgctcaagcggtcccagtgccagcgcgcgcgcatcggcctctccctctgcctcgagtcgcatcaggagccctga

SEQ ID NO: 17982 - DNA, 470 bp, Oryza sativa
  Clone ID: PAT_MRT4530_23582C.1
ggctgtaccaatgacagtatgaataatgagacatgtctttacaacgttatacttacacaaacacaagacttttcttctctagaaaacataagaccaatttgatagtatatcagaggaccggtttgttatatatcctttcacttcttggtacagattgcaaatgtagtactctgcgtattggagacccaaggagctccggtgacgcatttgctttcggcgtctgggcttaggcatgtcgcaccctttctcttcatctgtccgtagtcccgcctcttgtatgaaacgccaaaatttactcgaaaatcttgtttgcacctagtctgttcaagtcatgcatattccttttcatcatatgctcacttgtaaaatccaaccaggaagatgtcgtataggagtgtggtgttgccgggaatattacagtcttctgagaagcaacctgctggttcaggtccgtatgccaaagttgcagg

SEQ ID NO: 17983 - DNA, 153 bp, Oryza sativa
  Clone ID: PAT_MRT4530_23583C.1
atggcttcaaacaacgtacactctagagatggcagggagagagcatcaagctacaatgagaagctgcagctagcactcggccttcgtcgtccgcagaatgcaacagttgaaagagataaccatgtggtggtcaacccaggcaaccccgcctag

SEQ ID NO: 17984 - DNA, 464 bp, Oryza sativa
  Clone ID: PAT_MRT4530_23584C.1
cggacgcgtgggctgcgatcgggttgaagaccaaggatggtgttgtccttgctgtagagaaacgtgtgacctcgccactgctggaaccaagcagtgtggagaaaatcatggaaattgacgagcacataggctgtgccatgagtggccttattgctgatgctagaacattggttgagcatgctcgtgttgaaacccagaatcataggttctcatatggggagccaatgacagtagaatctactacacaagctatctgtgacttagctctgcgttttggtgaaggtgatgaagagtcgatgtcacgaccatttggtgtctctctccttattgctggtcatgatgagaatggacccagctttgcaatgccaaggcaattggatcaggttctgaaggagctgatagctcattacaggagcagtacaataaggagttgacccttcaggaggctgagaccatagccctgt

SEQ ID NO: 17985 - DNA, 1140 bp, Oryza sativa
  Clone ID: PAT_MRT4530_23585C.1
gtaaaagctacccctcgtcttcgtctcggctttcggagctctcgatactttagccgcgattcggagggaaaccctagctagctcccgctctcgatcccgcgcccgccaccgcactcggcaagatgttcctcacgaggacggagtacgaccgcggggtgaacaccttctccccggaggggcggttgttccaggtcgagtacgccattgaggccatcaagttggggtcaactgcgatcgggttgaagaccaaggatggtgttgtccttgctgtagagaaacgtgtgacctcgccactgctggaaccaagcagtgtggagaaaatcatggaaattgacgagcacataggctgtgccatgagtggccttattgctgatgctagaacattggttgagcatgctcgtgttgaaacccagaatcataggttctcatatggggagccaatgacagtagaatctactacacaagctatctgtgacttagctctgcgttttggtgaaggtgatgaagagtcgatgtcacgaccatttggtgtctctctccttattgctggtcatgatgagaatggacccagcttgtactacactgacccatcaggaaccttttggcagtgcaatgccaaggcaattggatcaggttctgaaggagctgatagctcattacaggagcagtacaataaggagttgacccttcaggaggctgagaccatagccctgtctatcttgaagcaggttatggaagaaaaggttactccaaacaacgtcgatatcgcaaaggtttctcccaactaccacctctacacccctgcagaggttgaagctgtcattgcacggttgtgagaagattgccatcgcgtgttattttaatcagccctaagacagcctctgtatgaacttcctaaatggattatcagtccattgtttgctatggctgtcatgttatgttaacaagatagtggctgctagagtttattactggctctaatagtctggtgtgcagcccagtcatttgcttgttttcagcagtgttgagaccatgtactatcaaaaagagaacgacaatcctttccaagatttggttgcaacaaaaaaaaaaaaaaaaaaaaaaaaaaaaaaaaaaaaaaaaaaaaaactcgcctcgtgc

SEQ ID NO: 17986 - DNA, 242 bp, Oryza sativa
  Clone ID: PAT_MRT4530_23586C.1
ccgcggtggctggtggcctggtgcaccagtgcatgtgctgccgtggcggcgaggtgccgaggtggttaggtagtcatggagttgtcggacaaggcgatgtgccgccggcgacggaggcattggcggccgcagcgacgaggtggtcgtggagtcgtcaaactagcgatgctgcggtgggggcgttcgcggccgcggtggtgaggtggtcgtggagttgttggaggcggcagctggggcgttga

SEQ ID NO: 17987 - DNA, 209 bp, Oryza sativa
  unsure (1)..(209): unsure at all n locations
  Clone ID: PAT_MRT4530_23587C.1
ctctcccctcttctgtttccgatccgatctgcggngcgtctcgcgcgcggccgccgacgagcccccgcggagccgnntcctcctcgcngcggaggnccgancntntccccggnccctcgcgcgcacggccggcnggcgagcaggctcggagaganagncgacgacctcccacttcgantcgaatcgaagattggnaatcctttcggttt

SEQ ID NO: 17988 - DNA, 384 bp, Oryza sativa
  Clone ID: PAT_MRT4530_23588C.1
atggaggagggagatgaagacaaggacacaaaggtggatggaagggagaaaaagatccttgcaatgacacatgtaccagcggatactgatgctgcgtattggctcactggcctgtggacccggggctcaaatttagccctttctcggattttagctatccgagagttcattgccagcttgccacagtacaaaatgattttcgtgagcacattcatcaatagtgtagagaagggatcagacctgcggcagtggcccataaggagggcgtgcatcagtggcatcgaccaccgtcagcttagaacaggtgacaagtggggttccatgcagcgcagtgcagtaccacggacaagccttttctctgaagcaaaatgtgaagaaaagtaa

SEQ ID NO: 17989 - DNA, 288 bp, Oryza sativa
  Clone ID: PAT_MRT4530_23589C.1
aaatccgcagaaccctagcgcgtcaccgatgtcgaaccccagggtgttctgtatacgatgacgcatctggggacctacgacgggccggatcctgatggaactttcgcgaagcgacgtgaccgggacaggggagaacttacgagcgctatgcacctgcaatacaggggtggcccctagcagcaagtggttccactataaaggtggcacgttggacagtttaatcccggaatcaatgcgccaggggagtcactttacccgcggaaacggcccggcaggggagtcaattta

SEQ ID NO: 17990 - DNA, 384 bp, Oryza sativa
  unsure (1)..(384): unsure at all n locations
  Clone ID: PAT_MRT4530_2358C.1
gagaaaagaatggggatcccccaagttcaccttgcttgctcctgggagtacactcacacggtttcaaatcccaagtatgtaagcttcgtgctgtaccagagccgctcgcagaagggtcatcgacgcgcgaagcgaacccaagaatggtggttaaactcaatgggtaacctgacaatgtacaataagtgaaatcacggagttcttgttgtttgatgctgatcaancaatcaactttttttgttgaagttctctctttggtttctttaataactgttgttgtaccatgatgttttagaaccctgaactctatgagaaaatgagtcaagagagggctgaaaaaaaaagagaatatccctccatgcttacctaaaaaaaaaaaaaaaa

SEQ ID NO: 17991 - DNA, 360 bp, Oryza sativa
  Clone ID: PAT_MRT4530_23590C.1
atgtctcatctcgtccagggccgtgatgtgcttgtccccttttcagtcgccgccatcaccttctcctctctccctctggctgacactcgtcttctttccatggacaacaccgatgcgaggaaggatgagaaatgggaccttacgactgagcttctcaattttttgttcctttatccgcctctgctcctgccctcgcagaggaggacgtacgacctcgtgagggcacgtgcaaccatccaagctaaacaagttaaaagaccatatagcacgtatcacggcaccgtgaatcaattaatggccttagttagctgggctcatcaacgtgactttggccagcggccattctcggccggcgactag

SEQ ID NO: 17992 - DNA, 613 bp, Oryza sativa
  Clone ID: PAT_MRT4530_23591C.1
acgaggtatgatttaagagatgatgagggagtggtcacatcacaggatccccagtagagatccttcgtctacatatgcatgtgtgtgtgtatgcagtatactgtattgcagtatgcaacagacacacacacaaacatgtacagagagaaaaagaagacagaggcatggccatataagtaaccatacgcacacctacatatgtagtagtaggagcacagcacatggtgactagtgtagcctgcaaattttgtcaccttttgttactctctctgtctacttacattacatgcatgcatgtgttctctctctctctctctcctgtacgtctatcttgccatgccatgccttgctgctgctttgcattgtactgaccagtttgtaagctaccaccatgcagcattgcatatagtgcaaatggtgcatgtcaaaaaaaaaaaaaaaaaaaaaaaaaaaaaaactcgagactagttctctcgagagaactagtctcgagtttattttttatttttttgaaagagcaaggcgaatttgctggtgtatagaattaagaagagactgcccccattttaaggattatcacatcattgcctctcaaaaataatgatgcgaggct

SEQ ID NO: 17993 - DNA, 437 bp, Oryza sativa
  unsure (1)..(437): unsure at all n locations
  Clone ID: PAT_MRT4530_23592C.1
ggggtcgccggcggcgagggcggngaggctgaccgggcacccgtcggcgagcgtgcgggcgagctgggagctctcccagggggaaaatgggaaagatggttgatgctgaggacataaagaatgatttgggataccctattccctaatatgctgaaatggagatgatgtatgacacgtgggaggccactttaaagaatagcaaaggtaattaggcttgaacagtgctgtcccgactctgttaggatgcaattctttttagggttacagaagctctctggctcgtttttccccctgcctaatgggaggttgtaaggaactccctattattacttcacctgtcacctagtgaaaataacagtcaacatgatttttacattaataatcccctgttaaccagtttggaaaaaccaagacaaaaccaaactaaatcggtttgg

SEQ ID NO: 17994 - DNA, 138 bp, Oryza sativa
  Clone ID: PAT_MRT4530_23593C.1
atgggcaactggagaagagacaaggattgtggtgaccgccgccacccgaccatcaccatgcaagggaaggataatgtgtacagattgagggggagtctaaatagggagagtgcgccgacgtgccaatggtcgcagtga

SEQ ID NO: 17995 - DNA, 475 bp, Oryza sativa
  Clone ID: PAT_MRT4530_23594C.1
tcacaggatctacacttattgatcatctcactacggtcccgatcacaacttctgatcgagttcgccacccctgtggactttgcatatgttgatggatggtgcgtatgaatccagggggcagagccctgccctgcgaccttggggcttgtcaacgagcatacagtataatattttgctgttctttcagtgattaaaaacgaaaattttaaagaaaaccttgaatgccaattagatctgcccaggttctcaaatttctttagctccgcccctgcttgaatcgatgtcatatgctgcaaattaagtggattggagatgtgcatatgctcgaatgttctcggttatattgtaattgtggggtagcaactttatcttgggtacaccatggaacagggtgaaattgtactaattcttatttgtgtaccattgatatatctcattacttcttgcattctgttaaaaaaaaaaaaaaaaaaaa

SEQ ID NO: 17996 - DNA, 574 bp, Oryza sativa
  unsure (1)..(574): unsure at all n locations
  Clone ID: PAT_MRT4530_23595C.1
tccatatccaacccaattaccccccaaggaanaaaactgaccccacccgttcgcttttttttttttttttggaatcatatgttctcacttggttcatcgtatttgcattcgacagtagtgacatggtgattgtacaatgcacacactcgcgaacactagaactaaaatcctacttctgctactgctactgctacttgtaccatttttttttgttggcctctatgtacaaacggccgacaccattctggcacagcacacaaccaaaaaagaaccaaaactttccgcgaaggagcgacccaaccaacgaggcaacgaaccgaccgaccgaggaggatcgagggatggatttggaggatcgagttggtggggatcagtcttgccagcggaggagcatgacgacgcagcgctggatgatgtagagcctcgccctctgctgcttgatggccctcccgaagcctcctcccctctgcctcctctcgctccccacaagcttcatcctcgtttctcctccttactgattttactctgtgtgttgtgtgtgtgtgtgtgtttgttgtgctgatgggcaatggtg

SEQ ID NO: 17997 - DNA, 642 bp, Oryza sativa
  Clone ID: PAT_MRT4530_23596C.1
atggagaggggcgcctgcaggtcgtcggcgtcggtgagagcggtggcgtacggcctccgcggcggcggcggcggcggcggcggcggagaggagagcagcgggtggaggtggaagcagcgagtcgggggcggaggagaagggaggggggagtgcgacgaggaatggaggagtttgggagttttggaaggttgggggtggtttggggatttcgtgtgccgcaggctcgcagcgcaggggctcggcagcaacgttggggatggtaggagcttggcagcgcaggagcgtcggctcccccctctgcttccacagctggcgttcctcctatgtcatgacttcctctctcctctcctttcttcacgtcacggcggcagtcaagaggccgggaccgtggcagcgaaggaggccaagggtcgcaggggcggtgagggcatctccttccttctccactttttgccttttaggtttcagcgccaagctctgacctccacagtcattgtggagcagaaacaaatccataacaaatcagcaagaggaacataccagcatccagcaacaacaaaaacaagagccagggaggacgttgacaccaggctcttctttctgccggtgacgaccgcagcgatgggggtggaggcatcgtga

SEQ ID NO: 17998 - DNA, 483 bp, Oryza sativa
  Clone ID: PAT_MRT4530_23597C.1
ttatctcggcgggtacaccatctcttcattccgtattccttgttgagatccaccaaccgttctcgagtgatcgagaaggcgcagaatctgcgacgaagccttgtcgacatttgtcgtactcgccttattcgatcttggtgtagaaccatagagacatggagccttcgtcaatgtcgaatagaattttccattagtaggaaaccgagataataccgatgtacttaggaatagaactaaggttagaacggtaaacccggttgttgtagtagttgatgtttggcatgtagtcggcgcgaaccgaaggctcacatccgacaatgttgaaccgttatccttcacggcgacgatattttggagcttgatcgatctcgccggatcgaatagttgatgacgatgattccaatctcgttgggagacgtactctggccgggttggatctccctggttcgaagctgtcgagtagcttgttgctggagaatccat

SEQ ID NO: 17999 - DNA, 316 bp, Oryza sativa
  Clone ID: PAT_MRT4530_23598C.1
gccttagctgatcaaaccgaggaaggcttgagcgtaatgacagccggcgaggggaaggcacggaggtgcaggaacagctacagcggcagctacagcagcaacatgagcaatgatgaagagctgacctgctggacaagagtgagctggacacagagccacctgccagctgagcgcggagggcatgcaacaaggtgcacctaatcaggggcaggcaccaagggcggttagacgcaatcatgggtggatgaggcgcaactgctggggatgctgctgaagaagggcgaagagagacaggacagaataagcggtgtgtgtg

SEQ ID NO: 18000 - DNA, 189 bp, Oryza sativa
  Clone ID: PAT_MRT4530_23599C.1
agagagcaacccatttttcaccttaacctggctgccaagggaaaaaaaaaaggagggagggcactcttcgaaacatacagaggcatacaggcactcatacgcggatgaacaggagcataagcagagcagaaatgcagcatttcgcctctgacatgagagagaggaatgtggctggcccggccctggcct

SEQ ID NO: 18001 - DNA, 734 bp, Oryza sativa
  Clone ID: PAT_MRT4530_2359C.1
gggaaggccgcacctgtcgccctctgaccccgaggtcgtcggcacagaagccgagggcgccccgcgtggcctctcggacgaagagcgccctggagatgcggcccctggcgaagaagatcggctccgccgaaaggtgcagcggccggtctacttcgccctcgccgactttgtggcggagtggaccccagctcccgagcccgtctccgccccgagccccacgctccgtcatggctcatgaaagccgactgcaggaagcaaaggaagatcggttttggagttatcaagacaagaaattttgaagcatgaattctcatactccaaaactggggggcatgtgttaatagtgaaatttgccgaaaccctaaaactcatcgtagccggcttgctcctggaagaactcctcatcagcaggatccgcttcatcttattcagcaactggggggggattatttatatagagcaaggtttgttaacctctgcagagggggtacctttacccacacgacattactaacccagatcacccagcccgtggggatcagccacgtcgggagacctccaagctttcatgacaaggcatttcgaaagccaacaaaggtttaccatatgccgacgagaggggtcccagaccaacaacaggttaggtcccagaccatactatgccaggaagcccaggagtcctccccgacaccaccccggcgaatccacatgtctctcggcatcaaggctcccct

SEQ ID NO: 18002 - DNA, 227 bp, Oryza sativa
  Clone ID: PAT_MRT4530_235C.1
tgcacccctccgtcagcttgtatcctcttttttggccgtggacctgcggtgcgaggggtttttaaacgccggcggtaacaagccgggcgctggtgcgaaaataggggcggtggcggtggcatgactaacactacgactaaggtgatgaagcgtgctatgagcgccaatgcgtggacattgtcggtcggtggtggttgtgtgcatcggagcgggagcaccaagactgt

SEQ ID NO: 18003 - DNA, 313 bp, Oryza sativa
  Clone ID: PAT_MRT4530_23600C.1
cgaggctcggtacccggggatcattagggtgtagtctcggttttcgatgacagcttcagcgctcataatcctcgtggggcaattttgcaaacaatggcggttttttctcttttagcctattacaactttttggaaatgttcttaagattgcatatttccttaaaattaatcagaaatttgttcgaggggtaatgctgtgccgactgtccactgctccaactgcgattgtcaagcccccaatgacctaggcgatcgcctgtgcaaaacctgccggactcctctgctgaaaaggtatctgtggtcggtgggggac

SEQ ID NO: 18004 - DNA, 534 bp, Oryza sativa
  Clone ID: PAT_MRT4530_23601C.1
atggccatgaccgcctcatacttcatattttcatggaataagttcactttgggtccctctatttgtcacccagtccgattttcgtcccttaaccgcaaaaccgggtacgacccgtcccccaacttacgaaaaccgggcaaacatggtccctcagcggttttgaagcacgcggcccgccgccgcacggccgtgctgcccgtcgtcttcgtcgacggcgaccaaaccgtcgacctcggcaccgtcaccgtccagcccttcctcggcgtccgcaagctgcgggtcgtcgtcgccgaccgggtgggcctcgtcggccagcagatcttggcctcgctcgcgcgcccatgccgtgcgcgccgcgtccccctcgaggaggggaccgacctcaccgccgccgttcgcacgaggggcgccgccgcgctgctcgccttcacacggaccggcgacttcctcaccgagctgcagtcctacatccgggaggaggacggcgtgcagcggcatgcgtcggcagcggctgcacccgcttctgggtggtga

SEQ ID NO: 18005 - DNA, 1884 bp, Oryza sativa
  Clone ID: PAT_MRT4530_23602C.1
atgtcacaggaacgagcactggacgaagttgtgtccccctttctaatgcaattatcaaaagcaagacttctttttctaaaactagatgaggacagttcatttttagagattaaacatctgtttcaaaatattgagaaagaagcttacgaagtggagaatatactacagagggtatcaagatgggaaaatgagataatcgatgactttggagggatagctcggtacttggatgacattgtagaagaagaaagtcacctgaattcaatatgtttgaagcttcaaattgtcaatgctgaaatgtccaacttaaaagatcgcatgaaacttcctcttcatgttcctgtgatcaagccatcagttcctccacttttaccagcatcttcgccagctaaattgttgccagcaaatgtttcagaggaatggagaaggctggagatcgaaaggaaaatccttgaaaactccaccatgtctaccttgcagctcagttatgataatcttgatctgcagctcaaactgtgcctattgtgcttctctatcttcccagaaaattctatcatcagcaagagggccatgatccattggtggataggtgagggcttagtagcagccacaagaaatcaaactgcggaagatgttgggaaggattgctttgacaagcttattgctagggatatgattgaagctgtgcacgtgaaacgcagttgtagcgtcagtgaatgtaagttgcacccttggattcgccgtatgttgattactgttgcaagaaaagcacaattttttgaatttgattcggaaggcaatgcaacatgggacttttcaggaactcaccgtgcttgtctagttgaagaatataagcaagaaatagaaatatcaccggtcaaaaaccaacccaatacagacggcctgctcacaatatttaatgtgaatgagcgatacctccagtttgacaagagttggttcttggatttgaggaagattgcggtgctccaactaggtcgatggcataacttgtatcgacaccatatcgaggttgacagtactgaatttctggaaggactgcagttgtccaaacaaataaaatatctctgcctacggggtatctccagaataactgcgcttcctgcttctattggtgaactctcaaatctcatgatcctggatcttcatgcttgtcataatcttgagaggctgactgagagcatcacctctcttcagatgctcacccaccttgatgtgtcagaatgctacctgctagagggcatgccaagggggattggtttgcttacagaactccaagtgctgaaagggtttgttattggtggttccacaagcaattataattgtcgagtggcggagttggtcagattggagaaactgaacaaactgagcgtatatattggaagtaaagttgcagtgacaggagatgaactgaatgaacttgagaacatcaaaggccttcgttcactgactattacatgggctgtatcagtgctgtcgaaaggaaaggaccaacaagcttctgtggcaacggcaatgttaacttcattatcccttcctccaaatcttaaaaagctagaccttcgttgcttccctggaaagaagataccaagctggttgagtccgagtaagctactgggactgaagaaactgtattttacaggcggaatgctaaatacttttggagatgggagcacgtcagagatgtggaaagttgagatattgcgcctgaaattcttagatgacttagaggtggaatggacccaattgcatgaggcattcccaaacctgaccttcctggaggtcttcaggtgtagcaaattagaatctttcccctgtgacaaggatggagtgtggatgaactgtgataagcaggaagtcagataa

SEQ ID NO: 18006 - DNA, 2021 bp, Oryza sativa
  Clone ID: PAT_MRT4530_23603C.1
aagcatcatttctagtcccccagcccaagcaacagtagccagcaagaacagagtagggaggaggaggaggaaggaggacgcacctgggagcagagccagagccagagccagagccatggagcagtacgaggtggtggagcagatcggccggggcgcctacggctccgcatacctcgtcgtccacaagggcgagcgcaagaggtacgtgatgaagaagatccggctgtccaagcagaacgacaagttccagcgcacggcgtaccaggagatgtccctgatggcgagcctcagcaacccgtacatcgtcgagtacaaggacggttgggttgatgaagggacctcggcatgcattgtgacaagttactgtgaaggaggtgacatggcagagaggatcaagaaggcaaggggtgtccttttctctgaagagagggtgtgccgatggttcacacaattgctcttggcccttgactatctgcactgcaaccgtgtgctccaccgtgacctcaagtgttccaacattttgttaacaaaggataataacatccgtcttgctgattttgggctagcaaaattgctcatggaggaccttgcatcgacgattgtgggaaccccaaactacatgtgcccagaaatactagcagacataccttatggttacaaatctgatatatggtcacttggatgctgtatgtttgagatcttagcacaccgccctgcattcaaagctgcagacatggcatcattaattaacaaaataaacagatcttcaatatctccaatgccaccgatatattcatcatcactaatttatgctaaacatgatgctttgtttggcaggaagcagatagtgaagagcatgctaaggaaaaacccagaacatagacccactgctggagaactattgaggcacccatatttgcagccttatctagctgaatcatgcagctgctccccaatctaccttccagtgaagcccaccaaaagtaacctgggagacaagcagcagtcaagaaaaccaggcagtggcagaaagcgaatcatcaaaaccaatggatccagtgaagcattagaaaccgctgcagagcaagctgtggatacaagagacaactccacatatatttcagatgtttcaacagttggtacccaggacgcctgcatttcacaagtatctgtggatcctcaagctagaaacaaagcatatcaaaacatcgatgatttgacgctttttcaacagatagaggaaaatttgatgacaataaccgatcgacagattgatgaggccatctttcttaaagctgtaagaaccagcagcacagtagatgtcgtgccagtctctggtgcaattcagaagcctaatgaggcaccaataccaaaggaggaactgaccattggagtagtgcaagagcagagaaaggaagtgaaagcacacactcaccaaggatcaaaaccaggcacaggagacgttcccatcgttacagaagaatcatcaccgaagagcgcggtgaaattggcacattcagatagcactcctgccgagtgggaccatctgaacatagtgcagcagagagctgacgcactggagtcgctactcgagctttgcgccaagctgctgaagcaggagaggcttgaggagcttgctggcgttctcagaccgtttggggaaggtgctgtgtcgtccagagagacggcgatatggctgacaaaaagcctcatgaccccaccaaaattggaagggtcaccaaaacttacgtaggggagcgaatttcatggctttgtttgcaagtgtgctgttctggttctgagagtgtatatagctttgctacagttcatgattctgtatcactgaggctcgagtttctatttatcttgatgtatatggtttgagtgagcgagggcattgtgtgagctaactatttatcagatatttactgtacaatggcatgtgctgtttggctgattcaagtaataatggaaatcataccatgttcattccaaaaaaaaaaaaaaaaaaaaaaaaaaaa

SEQ ID NO: 18007 - DNA, 661 bp, Oryza sativa
  Clone ID: PAT_MRT4530_23604C.1
ccggccgggattcctcatcgtttctcccgatcccccaccatctgttgattctgttcgccgcctccatcgccctcatccaccaaaccgagcgcgccgccgcgccgcccctccaccagagcccgagcgctccgccggtgccgctgccacgccgtccctccaccggagcgccgaaaagccctcgtcgtccccctccactgccgtccaccttagtcatcaaggtccggcgccgacaaaccacgcggcccctggcgcttcattgcccctcgccggtcccttcgctttcccccgccggacacctcgctgacccacgccgggattctcgatgatctccccaacggccgcctgccctcgttttgcatggagtcgccgaccctcgtctgatttggaatcggagtcattgccacctctctatttttattcagaaatttggaatggctgacaatcacattagtttggaggaggttgcaaacaatgaaagtgtgataaccaaggagtttagaagcgaggcagaaggatataagttctataatgattttccctttgttgatatattcttgaaaactagatgtatctttagagttacaaaaagcagacgaacagttgatattgccatctctgaattcattgtcgccaggagatcagttgatgttgagaatctctg

SEQ ID NO: 18008 - DNA, 306 bp, Oryza sativa
  Clone ID: PAT_MRT4530_23605C.1
aagcttgcaccgtcgccagctccacatcctgtgacggatcctgaaacgtatcacgttccacaatcctggacctgtgaggatcctcaacaatctgggacagcctgacacgaattctggactggcggtaatggcacaacgctaccggcaatcgaagccccgcccagacctcaattccgagcggcagggagactcagtacatgatcctctggccgaacccacaggactggacccgaaccaatccccacatgtttgaccctgaaacaagatcctcgtccgatccctctaccttcccccgtagccgacaca

SEQ ID NO: 18009 - DNA, 870 bp, Oryza sativa
  Clone ID: PAT_MRT4530_23606C.1
atggcaggccttgatttgggcaccagctacctccaccaccaccaatcactgcatctccgccacgacgatggcggcgccggctccgacgacggcggccacgacgacctctcgccggggagcggcggtggcggcgggcccagcagcacggccggtggcgccgggatcggcggcggcgaggtcgtcgctcgccgcccccgcggccgcccgccgggctccaagaacaagcccaagccgccggtgatcatcaccagggagagcgccaacgcgctcagggcgcatatcctcgaggtagccgccggttgcgatgtgttcgaggcgctgacggcgtacgcgcgccgccggcagcgcggggtgtgcgtgctctcggcggcggggacagtggcgaacgtcacgctccggcagccgcagtcggcgcagcccgggccggcctcgccggcggtggcgacgctgcacggcaggttcgagatactctccctcgcgggctccttcctgcccccgcccgcgccgccgggcgccaccagcctcgccgcgttcctcgccggcgggcaggggcaggtcgtcggtggcagcgtcgccggcgcgctcatcgcggcggggcccgtcgtcgtcgtcgccgcgtcgttcagcaacgtggcgtacgagaggctgccgctcgaggacggcgacgaggtggtccccccggcgccggcagggagcgaccagggcggcggcggcagcggcggcatgccaccattaggcgttgatccgtcgggcggcgccgccaccggtgggctcccgttcttcaacatgccgttcgggatgccgccaatgccggtggacggccacgccggctggcctggcgccggcgtcgggaggccaccgttctcatga

SEQ ID NO: 18010 - DNA, 303 bp, Oryza sativa
  Clone ID: PAT_MRT4530_23607C.1
atggagacggtggagaagtggatggatggatcaaaaataccggtggattccaagaaccgcgtgtactttttcctccccggtctctccgtttcccagctatcggattcgaggagaagccaagcgggagagaaaaggcgggcgagtgggatggggagagcagagaagctaggggccaaccgaaagggaaatcctgccgcctctcattcatcatcatacccatacccggtcgtgattaccgaggagagcacacagttgctggaattcccgtggtcgtcgtcgtggctgggtctcgtggcgccgtag

SEQ ID NO: 18011 - DNA, 202 bp, Oryza sativa
  Clone ID: PAT_MRT4530_23608C.1
ggctggcgtctactgttgatcaggctcaagctcaagccccagctgatgttggccctataacttgccgtccatgatgcggtgatgttaccccagctgacaacaactggctccctgtagcattgcctaccgtcggtggtatctgggattgaatgtgtacagtgatagtagtacacggagagaaataaagtcatgcatcatcgtg

SEQ ID NO: 18012 - DNA, 621 bp, Oryza sativa
  Clone ID: PAT_MRT4530_23609C.1
gcgttccttcctttcatttttattttattaaatcccccgggctgctgcacactgtttttttttatcatgtataacatgcaacatgaaagtttatacacaaataggacagtctgcccggaaaaacaattgtacataggatacatataacccttttctcccagcacgttattttttcaataaactactatatatatgcgctgtctttgaggatgcattccattaggacggatgttacgcactacttggagcaatatgagtaatagggcatatatttagggtaatgagtttagctgcaaccattccagacgtctcatgcatatcaaggtccttaggcgccattccattgggtagcttccagtcaaaatgataaagaagactagctaatggtagctccaagttggccaccccaaggtttatacctggacaaattctacgaccagagccaaatggaagaaattcgaagttattccctttataatctacactattattttcgaatctctctggtttatactcctcaggatcctcccagtacctggagtctctacatatcgcccacatatttacgaacacagatgttccctttggtatatcgtagcccatgacttggcttgtctcacg

SEQ ID NO: 18013 - DNA, 984 bp, Oryza sativa
  Clone ID: PAT_MRT4530_2360C.1
atggaggcggaggcaagggcggcgtgtgccgacgacggcatggaggcggaggtgccccaccgcgttgactcgtcttctccgctgccgtatttcccccgccatggctatcttcggcaccgcaccttcaccttagatcacgccgccctcgcctccgtggacgctagcctctatagccgtctcatcgtgtcgcccctctcccccgtcatggccgccttctcgcgtaagttcggcactggccgctacttcctcgatcacatgaagacgaggcctggtgagcttgatgggccaaccaccgccggcatgcgctcatccttggcttccacctcgaggaggctcgcaattgctggcgcaccgctcgtcgtcgaccacgtttcctttgcctccacggtcgccggcctctgcagccgccccgctgcattgcgccctcaccactgccatggctgccttctcgcgtcagtccggcaccggccaccgctcccccgaccacaggaggacgaggcggatgaggaatcatgttgcgaggactgctgcgttattgctgtagtcgtacctcgaccatctgaggttgcggtgcgagagattgctatgtactggttcgagaaccagcgagcgagtagaataatttctcgaacatcaatggaggttgcggggcgggagattgctacgtactggttcgagaaccagcaagcgagtagaatcatctctcgatcaccaatggaagttgtggtgggggagattgctacgtactggttcgagaaccagcgagcgagtagaatcatctctcgatcaccaatggaggttgcggtgcgggagattgctacgtactggttcgagaaccagcgagtgagtagaatcatctctcgaacaccaatggagtttgcggtgcggcagattgctacgtactggttcgagaaccagcgagcgagtagaaacatctcttcgaacaccaatggaagttgcgccatggccggtgctatgagatag

SEQ ID NO: 18014 - DNA, 1212 bp, Oryza sativa
  Clone ID: PAT_MRT4530_23610C.1
atggcgaaccatactgatgctgagcttcggccggagctctttcttcctcctggcgccaatgtggaagccccatggattgccagaataccaaggtcagatttcactgttcagtccatccctcagaaccttggagaagagtttgctgttgttctgattgagccccaacctcctgagcacttagtgaaccagactatcaatgagatcattcactttgtcactcatttctgtcacattcgagatgctatggttgatgagggtccgatcatgcaacaaaacctcgcgcaagccaattttatcccacatgatcaacttgctaacagaagaaacagaccatacaatagagaaggatgggtcatcattttgggtattcctttgaggctaagaacctattccattattgagcaaattgtgaataagtttggaaagcttatgcgctggcattccacggacaggatcttgggtagggttcttgtcaaagttagatatactgtccctcatgaagtgcctgaaaaaattgtgatggggcacactgcagagcttggaggtgtaggggaatcctggactttctacccgtatgtgtttacaggcaattttgttgatatgctgcctggagatgaagatgccccagccatttgggaagttatccaagaccaacaagaccagatacaacagttacaactggacctacaactccaacaagccaaccctgaaggtgatggtgaaaatggtggaattgatgacatggatcaggataatcagaatcaactggatgaagttgaaccacagctgtccctctctttcaatgattactcaatgattgaatcttcatcctctgttcagatcatcaagcagccatctggtcagatagtcccatacagcttgccaatccctgaactgccttttttcaggttccctgaaaagttctgttatgcagttgcatttggagtattcagactccttctgttggctgtgaaccccactatgttccaatgcatcacccaaacgattccatggaacaccgtcaagatcaactgggttgtcattccctatgtgctcccttggtgcattcaaagtcctgctaagcgtcaaagaatctctattgctggaaaaaaatgtcgcaagagctcttccctacagctctgcctcgacagaaataatttccctgcctgtgagagtgaggaagcagaagaaacaggcccagctctctgttga

SEQ ID NO: 18015 - DNA, 214 bp, Oryza sativa
  Clone ID: PAT_MRT4530_23611C.1
tttgtttacctgtgccacacagagcttacgttctgagctggaatacaacccagagccatatatatacactagtggggaacctaccgtcgctgacaatgctcgtgttcatagctcatgtgctatagctcagcctctcccaagtcagtgtggccctggatagcgtgttcaccgaggtattcttgctctcgatcgagaatctggccctgaacggata

SEQ ID NO: 18016 - DNA, 433 bp, Oryza sativa
  unsure (1)..(433): unsure at all n locations
  Clone ID: PAT_MRT4530_23612C.1
cctcttttcgccatccgagccttgagctcttcttcttctctctctcctcccatgtccggccgtcgncgccgacgttcgatctcctccctcgtagcttctctatcctttcccttgcgccactatgatggcgaatccattttacccctttaccccttcccttccaccttgagttaagccaccaccgccacctcccaaaccggccggggctaagctcttgccgctgctgttccggccatccctctcttcctctctaccaaccaccgacctncccgagtgngcgttgaccgggaacacaatatgtcgtcgacgttgtcacactttggncactggaagtcnggnggccngttcacccttttnttctgtnttntctcggnttantgtgaggcagaggaaggagagaacgaagnaagaaggnagagagaagnaaataaag

SEQ ID NO: 18017 - DNA, 1359 bp, Oryza sativa
  Clone ID: PAT_MRT4530_23613C.1
ttacgttttaacatcaaaaggatcaactaaagttatgttactagcatgcttccgaaacctagtatggctcttcctgtatacctcaaaaataacctgtggtcctaaagatagcctactctcccagcacaactgccttttttggctagccaaccatgttggtttgcaatcatttgcacacaaaaatttcataacctgtaggactcttgcattagaaacaagaaacctggcaagctgaagttcacgccttcgcccttcgtatcctgcaagcaccactttcttgaggtgacggttgaggcattcaattggataatccatgttatcacactttagtgtttccatactccgtggctcaaacatatgtgacgtgatatagagcgcctccaagcacgggaaacaccggagaaaatcaaccacaggcttcacctgcggatcgaccatctctagcgccagagtcttcaagcatcggaactccgccgccaatctaacagcccgcatcgagtggaacaatgccgccccaatctgaagcgatgggatgccgacgcccaagtagccgagcatctccagcctcggcgcgtggaggacatggatcgacgggccccagttgacgtcgtgcccgagtagcctctccaggaggggcccatcctcgacggcgaggtcctgcagctcgtcgccgacctcgtcccgccgccgcaaggagaccgacaccgtcaggctgcgcagggtcctggagcgcacgcggaggctccggcagccgaagacacggtcgagggacagggccgctagcgcggggcagccggcgagcaggccgtggagcgcccgggaggaggcgaagcagtagcggagagtgagctcgtggaggtgggggaacgaggcggttgctgcggcggctgccggcaggcggcaattggtgaggtcagcggagcggagggagtggcagccgaggagtgacggcgggaggggaaggggctcggatggcggctggaggaggagctcctggaggcgtttgccggcgaggattcggagccaggtgtcgaggtccgctgaggaggggcgacccgaggagagacggaagctcaccgcgtcgccacggtgggaggcgaggatgccggagatggcggcggagagatactgggagcgggaggggagatcggagtcgtggaggcggagcggcgcggatggccagaggctgcgccagcgacgggaaagagcggtggtgcgcgcggcggcgtcgagggggaggagggagaggatggtggtgaggaggcagtccgggaggcgtccgatctggtcagggtcctcgccggtggcggcggtggcggcggcggcgtagggcaatggggttgtcattttttctttacc

SEQ ID NO: 18018 - DNA, 474 bp, Oryza sativa
  unsure (1)..(474): unsure at all n locations
  Clone ID: PAT_MRT4530_23614C.1
ttttgggtttttttttttttttttgttttttttttttttttaagaacgagctggcagaaaggaaatattttaacttaataacatccagaggacataacccattctcatggcatcatgctaaaggtggttaattataaaaaaacagttatgcgtttgcaaacataacataggagctttcagggaacaaaaaagggtagttttttcagtgtagaacccgcaacaaagaaagacttggtttaagctgggggacccttgcccttttttctttggggctttttcatgtnnaaatccaactccttgcccttaaggatataaccatttgtttgggcacactgcccagggcgggaagaaatgcagggcagnaacctcccactggcaaactgttttttnatgtgggggtcaagggggcgtccctgttggggctttttaagctttctgacaacaaggatgcttttctttgctttctttggggga

SEQ ID NO: 18019 - DNA, 1179 bp, Oryza sativa
  Clone ID: PAT_MRT4530_23615C.1
ccggccgggagctcctctttcgctttagccgcagctgcttcgctctgctttctccgtagggtttatccctttgcttctcctcgtctccctccccctcgcacgcaaaggcacaaagcccggattccaccgccggagccgacccgcttcgaggcgaatcgagagttagctttccagccagcaatcgaggatgtcgtcggtgcagctctccggtgccggagtcgccgcggtggccttcaccaagaatggcgcgtcttccttcgacgggctccgcctcgcgccgccatctgtgcgagtctgctcctccaggcgcccgtctcgtagcctcgtcgtcaaggccgccacggtcgtcaccccaaagtatacctcgctcaagcctctgggagacagagtgcttgtgaagcttggtgctgcagaggagaagactgttggtgggattctgcttccgtcaaccgcacagtctaagcctcagggaggtgaggttgttgctgttggagagggaagaactattggggataagaaagttgaggtcagcttgcagattggggctgaagttgtatattcaaaatatgctgggactgaggtgcaatttaacgacaccaaacatcttattctaaaagaggatgatatcattggtgttcttgagactgatgatgtcaaagatatgaagccccttaatgaccgggttctcatcaaggttgctgaggctgaagacaaaactgctggtggccttattctcactgaaaccactaaggagaagccatcaatcggaacagttgtagccgttggtccaggccctcttgatgatgaaggcaagaggcagccattgtcagtttcagcgggcagcactgtgatgtactccaagtacgcaggcagtgagttcaagggagctgatggcaccaactacattgtcttgagagtatcagatgtgatggctgtcctatcttgagctgtgatttgtttcaattttgagttcagaatagacggtagcaggtggtaatggttgccatgtggtgatcttcactctgcggagatgctgtctttgataatcctagaattcgaacgcaacaatttgcagatctcctacgggatcaacattccactgtgactgatttttatttataaaagtttgttttgtttcaagacaaaaaaaaaaaaaaaaaaaaaaaaaacccgcggcca

SEQ ID NO: 18020 - DNA, 351 bp, Oryza sativa
  Clone ID: PAT_MRT4530_23616C.1
atgccgtggagctgccgccgttgtccacaccccgaggagcccaccgtcaccgttcctcaccaccgagccctcttggccgctgccccacggtgcggtggtccaatcggcgagatatcagcggtcagaccgatggcatcgacccggttagatcggcggctccatggcggtcagaccggtggtggcgacaagcaacaacagtacatcaggcggttagaccggaacaactacaccggtcagaccgacagatctactccgataaaattcccgcaagaaagaaaatatctcaaagatagctttgttcatgaagttgtgttgagctcacagttcgccagctgtgatccgtggcactag

SEQ ID NO: 18021 - DNA, 1279 bp, Oryza sativa
  Clone ID: PAT_MRT4530_23617C.1
ggaggaagacgaccttggagcaaccggagagagaagccaagccaagccactgtgaagggaagggaagaaactcagaaagagataaaggggaaagtatagcgggttgttgttaggtaggagatcggagtcttgccctacgcactaaattccaccgctacggcttggactggcgcgctcccactgtgcgctggtgcgggtgggtggccttcaaacctagcccccgtgtggttgcagcggagcaggaaggggaagtcgggggaaaaccgagaagaattcaaggaaggggaatcatgagtggtacgggatacacagttgaagttactaacctgtcaagcagggcatctgaaagtgatcttcatgagttcttttcattctctggagcgattgagcatatagaacttatcagatcaggagaatatggttctactgcttatgtgacattcaaggaaccctattccttggaaactgcagtattgctcagtggggctactattgtggatcagccagtttgtatagctcgctggggacagcctaatgaaccatacaatttctgggacacaccaaattggtatacagaggaggaaattgaatacaggacctatcaaacatgccagttcaattccactccacaagaagctttgacgattgctcaggatgttgtgaagacaatgctagcaaggggatacgtactcagcaaggatgcactggccagggctagagcctttgatgagtcccatcaggtaacagcgactgccgcagccaaggctgcggagctgagcaagaggattggcctaaccgacagggtcagcggcctaaccgacagggtcagcgccggtgttggtgcaatcagatcggtggatgagacataccacgtatccgagacgaccaagaccgtcgccaccgccacaggaagaacagcagttaaggttgtgaatggcatcatgaccagcagctatttctctgcaggagctatgatgctgtctgatgctctccatagggcagcacaggcagcagctgatttggctgctcatggtagacacaattaagtgaaaataaacacccggtacatatattgtcagttattcagacatcaggatgaacacccaaatatggagtacttgacatgatgccgttccaagtatgataataacggtgaaaccggtaacaactgtacctacaaagactgaaggaaatgtgtgcagaacaatgtaaagtatttcaaaccgagtcaagtgatcgtgcagtcatgtttaacagtttctgctcgttttatattcca

SEQ ID NO: 18022 - DNA, 339 bp, Oryza sativa
  Clone ID: PAT_MRT4530_23618C.1
atggcgatagtacacacatttatctgcctcattgactgcgaagactgcagatgtcaatgttttgtcaaatttctcatgccattgcttaggagcttgtttcagaccataaaaagacttcaacaatttgcacaccttgccttcttgaccttcaactacaaacccatcaggctaatccatatagatctcctcatccagctctccattaagaaaagctgtcttaacgtccatttgatgaacgagaagaccataaagacacagtccacagtcttaggtccaagtttgcgcttcttcgttattggtacattgactttcgccaagcacccccatgtgcgcaagtaa

SEQ ID NO: 18023 - DNA, 2184 bp, Oryza sativa
  Clone ID: PAT_MRT4530_23619C.1
atgaaatgcttctgggtgagtactggcaagcctatggaagttcttaatgctgaccagcagaaagaattcgacgaggccactactctcttcgtgggatgcattcttagcgttcttggcgatcgtctggtcgaggtgtatatacatatgaccgacgctaaggagttgtgggatgcactgattgctaaattcggtgctactgatgctagcaataatctgtacatcatggagctgtttcatgactacaagatggctgataaccgttctgtagttgagcaggcccatgtaatacagaccatggctaagaaactcgagcaggcccatgaatactccgttgaggggttgatagcgtctcttgatgttgaggagaaaactcgggaaaaagactctgcgtctaagggcgatggtgggcaatccagcgccaatgttgtgcacaaggcccagaacaagagcaaggggaaatacaaagctcagcagaccaccaacttgaagaagaagaagaacaacaatcctaatcaggatgagaggacttgctttgtgtgtggcctacctggtcatctggccaggaagtgtccacaacgcaaggggatgaaggcacttgcagggcagacttctaagtctgctaatgtgaccattggcaacactagagacggaagcgggtatgataatttaccttctggtttttcagttaatcagtctactaattggtggattgatataggggccaatgtcgcacggggttccaccgtcctaatagggaatgggtcacatgcttctgttcatggtgttggcacggtagatctgaaatttacttcaggaaagatcgtgcagctaaagaacgtgcagcatatccctactatcgacaggaatcttgttagtggctcccgtctaactagagatggatttaagttggtttttgagtctaataaaatagtcctgtctaaacatggatattttattggtaaatgttatgagtgcggaggcctgttccgcttttccctttctgattttctgcaagttcctaatagaaataaggacaaaacaccatatgagatatggattgggagaaaaccatcactttcttatttgcgcacatgggggtgcttggcgaaagtcaatgtaccaataacgaagaagcgcaaacttggacctaagactgtggactgtgtctttttgggatatgctcatcacagcattgcctatagatttttaatagttaaatctgaggtacctgacatgcatgttggtacaattatggagtctcgtgatgctaccttctttgtgaactttttcctaatgaaggatacacatagtagttctagccaaccctctgaaataattcccagttcaatcacatcaccagaacaaactgaacatacacatgaacatgtcactgaggagaatgacagtgaaggtcctcgaaggagtaatagacaaaggacggctaagtcttttggtgatgatttcattgtgtacctcgtggatgacacttctaagtcaatttcaaaagcatatgcatctccagatgcagactactggaaggaggctgtccgtagcgaaatggattccattatcactaacgggacttgggaggtgatagagcgaccctatgggtgtaaacctgttgggtgcaagtgggtgttcaagaagaagcttaggcctgacggtactattgaaaagtacaaggctcggcttgttgctaagtgctatactcagaaagaagagctggatgaggagatatatatggatcagcccgatgagtttgtagttgatggtcaagaaggcaagaaacaagctcctaagcaatggcatgagaaatttgataaaacattgacatctgcaggctttgcaatcaatgagaagatcttgaatcgcattggttacattgacaagctgacggcactggatactgctactgttgaggcagaatgggtgcgtgatctattaatgcacctacctattgttgaaaaatcggtgccggctattcttatgaactgtgacaatcaaacgaaagctggcaaatcccttcacgaagggactatcacgaaatgtgatagacaatgcatcgaaggagatgggtttgagacccatagcattcttgaaagaacttacctttgtgagcttgactgttggtcgcagtctatgaagatgttgggtgaatcttctaggaagcttactaaagactaa

SEQ ID NO: 18024 - DNA, 237 bp, Oryza sativa
  Clone ID: PAT_MRT4530_2361C.1
atggaagtgcccaggccggtcgtgccggatctggacctcagagcaggcagatgcttctccgcgcagacgagtcacgagtccaactgtcagcctttttccgctgccgacgtgcgggcggacgggcacatgggcgtttatcggcttcgccctccaggttttgaagtttcgctgctgcggtacgcgcacgccgtgcccgttcgatggcgaatcccaccgcggcaccgtcccaagcacagg

SEQ ID NO: 18025 - DNA, 1782 bp, Oryza sativa
  Clone ID: PAT_MRT4530_23620C.1
atggaggcgtcggcgaggggaaacctgaggaatgggggcgctagggtctctggaacctctgccttcgacgtcctgcaccgggagaaggcggcaataaggcgctgtgattttactatggctggttttgccgatgcactgaggctggataaattcaccgtccagtgccaatattttgcacaggcccagaacaagagcaaggggaaatacaaagctcaacagaccaccaacttcaagaagcagaagaagaacaacaacaatcctaaccaggatgagagaacttgctttgtgtgtaggcaacctggtcatctggctaggaagtgtccacagcgcaaggggatgaaggcacctgtagggcagacttctaagtctgctaatgtgactattggcaacactggagatagaagcgtcgcacggggttccaccgtcctaatggggaatgggtcacatgcttctgttcatggtgttggcacggtagatctgaagtttacttcggaaaagatcgtgcagctgaagaacagctttttcccaatgaaggatacacatagtagttcgagccaaccctctgaagtaattcccagttcaatcacaccaccagaacaaactgaacatacacatgaacatgtcactgaggaggatgtcagtgaagctcctcgaaggagtaagagacaaaggacggctaagtcctttggtgatgatttcactgtgtacctcgtggatgacactcctaagtcaatttcagaagcatatgcatctcctgatgcagactactggaagaaggctgtccgtaatgaaatggattccattatcgctaatgtcaatgaggcagataaatgtgtgtactatcgccatggtgggggtgagggtgttattctgtgcttgtatgttgatgacatactgatatttgggacaaaccttgaggtgataaatgagtcccattatgtggagaagatgttgaatcgctttggctacattgatagtaagccttctccaacaccttatgatcctagcttgttgcttcgcaagaacaagagaattgctaggaatcaactggaatactcccaaatcattggctcgctgatgtacctggctagtgcaactaggcctgatatctcctttgctgtgagcaagttgagccgatttacctctaatccgggagatgatcattggcgtgcgcttgagcgagtaatgcgctatctgaaaggtactatagaattggggcttcactatactgggtatcctgcggtattggagggttatagtgattctaactggatctctgatgtggatgagatcaaagccactagtggatatgtctttacactgggtggtggtgctgtttcgtggaggtcttgcaaacagaccattttgacgaggtcaaccatggaagcagaactgacggcattggatactgctactgatgaggcagaatggctgcgtgatctattaatggatctgcctattgttgaaaaaccggtgctggctatccttatgaactgtgacaatcaaacggtctccggaacctctgccttcgacgtcctgcaccgggagaaggcggcaataaggtttttgggaagcgcttcgcgcgactgctccctgttcgtccgcgacggctcgccttcctctccgctcgtgtgcttcgcgccttcgtcgacgctcgcaaccgcgagtagttcctaccgagcaaccgaattgatccagatggatagtacttggccttcggaatctgagcacacagagaatcaggctcctgaagcagccgccaacattgctttgctagcatag

SEQ ID NO: 18026 - DNA, 484 bp, Oryza sativa
  Clone ID: PAT_MRT4530_23621C.1
cgcgcgtgcacgacatacgtgttgaattgtccacaaaattggcatcctcacccttgcgcagatgcagcctccttttgcagttttgttttgctgcgggaaattcggattccgaaaaatccggtgcgtgaaaacggcgtggagtccggataagttacgcgtgacttatccggttcggttacgcgggcgccctgatccgccttcacgcaacacacgcgaaatcaatctagggtttgcctcttactctgtactgcgccgtcgctcatagactactccatcccgctcgccggcgtgcaccggcgatcgggagagtaggtctccggaacctttgccttcgacgtcctgcaccgggagaaggcggtaataaggtttttgggaaacgcttcacgcgactgctccctgttcgtccgcgacggctcgccttactctccgctcgtgtgctgcgcaccttcatcgacgcccgcaaccgtgagttgtttctgccgag

SEQ ID NO: 18027 - DNA, 176 bp, Oryza sativa
  Clone ID: PAT_MRT4530_23622C.1
gcgctatgtctagatcgcgagcggccgcacttccctcccccccccccatatcaaaatttattagaatgtggacaggggctgacagtcttatactctgaaatggacgaagtatttcctagttcccgcccaattttacgccatacaacttggcccagtgaattccctagctctttata

SEQ ID NO: 18028 - DNA, 2436 bp, Oryza sativa
  Clone ID: PAT_MRT4530_23623C.1
atggcgccgccgccgtcgtcattgcttcgcgacctcctcgccgctgatggcttcagaaaccgtcgcaagccgcctgacagtaaccctccggccgccccaaggaccacgagcatgcccctccagcaccggcggccgagtaggccagcacggtcgcagtccgacgtcctcacccgcagccgcctcagagaaacaaacaacgtcggtactagcgatggcgacggagtcgacgccggcgaggagcagcggaccgccacacggaggtcatcggcgtcgctgatgagcgcgaggagctacaacaacaacaaggacagcggcggcggcgccatgaggggcggctcagctgccgcggtaccggctctcgacgagtccgtgctcaccgcgttgatctccctggtcgcgggagccgtgaagcggttcgtcagggacgagggcttccgcgcgtcgctccgcggcgggtgcatgtcgtgcctcggcggcgagtccaaccaccgggcggtcctggacctccgcgtgatcgtgcacaccgtcgagagggccgcgagcgaggggctcgacgacccgcgcgacctgaagcgcgcgtcgctcaggctgcacgccatggcgtccctcgacgcgaaggaagcggacgcggtgagcgcggccggcgtgccctaccagcgcctcgccgcgtgcgcgcacctgtacatgtccgtcatctccaagctccaggagaaggaccactcctccgcggtgcacgtgctggaggccttctgcttggcgccgcacgaggcccgcacatccctgcttcccgcgctctgggacaggctcttccgctcgggcctctcgcacctcaaagcgtggcgtgaccgcgagtcggcgaccgcggcgagctcggatacgagggtgaaggacgtggagaagatgttcgtagaggcagtggacgatggcacacgcgcgctcgcatgctactacagagattggcttctggggcgcagccaagccatgtctctcccggttgttcctgctcctcccagcaccgttcttgccagcgcgctgaggttctcgacgtcgacgtcctatgacattggctcggatgtcgcttgtagctccgggagttacagtccagctgtaaagtttgcgctcgacgagactccatcacaatatgatcgagagatcgaagaggaagaagaagcagaggtggacgagaagacagcagatgcagaaagcgtgttccatgagtgcgatggcactgaaccgaagagctacactcactcacttcagacagaagaaaacgagctaatgcctgacaagctagccaacgaggcatctgaacgaaagcttctcagtgaagggcctgatctccagagtgacacagatggcagtcaaatatccatttttgccaccattcctagtgatttcctctgtccactgacgaggcagatcttcaaccgcccggtgacaatcgcagacagaccacaagttcgagcggcatgctatacgttcagtggttcgataaaggcatcagaatgtgcccaattacaggagttaactgcaacattcgtagagaatgtcctttcttctgaatgcgagacgtctgaaaaacttgagaaggcaaggcgtcttatggcaatcggtggcatagactttcttctgcataaatttcatggaggaggagaagatgagaaggcacaagcagctgagctccttttgctctgcatcagggcagaaggaagctgcagaaactacatggccataaggatttgtaactcaagtgttgttcagcttctccacagtgaggtggagccacacagagatagcgtatacagagaagaggctgccaagatcatcacacattctctgagatgctccctgtctgaagaaaatgtcgttgccaacatcaggaaagcactgctgctgctgggagggcatttctccttctcgggcgacctccttgcagaggaccggatgctgaaacaagccggcttcgtcgacggctcacgtgtcacgcgtgccgattctgacgctgccgtacaggacaagggaagagacgaagacgaggtgtggctgagggatgtgaccgcggcgctactcggcagcgggaggaggccgttcctggaggcgctgtccatgtgcatgagctctcccaaccacgacctggcggccgtgtgcctgacgacggctgcgtggctgagccggtcgctcgcgtcgatcgacgccgccgacgtgcagctcgccgcgttctcggccctcatcccgcggctgaagcagcgcctcgccggcgaccggtcgcaggctcagcatcgggtcctcgcgtccgtgacactgtacaacttcagcaagatcccagactgcagggccttgctgatgctgctggctgacggccttcgcgatcacctggtcgagctcgcggagctgacatggacggccggtcaactgatcaccgagctccaagagtga

SEQ ID NO: 18029 - DNA, 2760 bp, Oryza sativa
  Clone ID: PAT_MRT4530_23624C.1
atgaaggcacctgcagagcagacctctaagtctgctaatgtgaccattggcaacactggagatggaagcgggtatggtaatttacctactgtcgcacggggttccaccgtcctaatggggaatgggtcacatgcttctgttcatggtgttggcacggtatatctgaagtttacttcgggaaagatcgtgcagctgaagaacgtgcagcatgtcccttctatcgacaggaatcttgttagtggctctcgtctgactagagacggatttaagttggtttttgagtctaataaagtagtcgtgtctaaacatggatattttattggtaaaggttatgagtgcggaggcctgttccgcttttccctttctgatttctgcaataagtctgtgaaccatatttgtggcagtgtggatgatgaggctaatgtatggcactcacactactggaaggaggctgtccgtagtgaaatggattccattatcgctaacgggacttgggaggtaacagagcgaccctatgggtgtaaacctgtggggtgcaagtgggtgttcaagaagaagctcaagcctgacggtactattgaaaagtacaaggctcggcttattgctaagggctatactcagaaagaaggcgaagatttctttgacacttactcacctgttgctagattgaccacaattcgtgtgctactttccctagcagcctcacatggtcttctcgttcatcaaatggacgttaagacatcttttcttaatggagagctggatgaggagatctatatggatcaacctgatgggtttgtagttgaagtcaatgagatagataaatgtgtgtactatcgccatggtgggggtgagggagttattctgtgcttgtatgttgatgacatactgatatttgggacaaaccttgaggtgataaatgagtcccattatgtagagaagatcttgaatcgctttggctacattgatagtaagccttctccaacaccttatgatcctagcttgttgcttcgcaagaacaagagaattgctaggaatcaactggaatactcccaaatcattggcttgctgatgtacctggctaatgcaactaggcctgatatctcctttgctgtgagcaagttgagccggtttacctctaatccgggagatgatcactggcgtgcacttgagcgagtaatgcgctatctgaaagactactccatcccgctcgctggcgtgcacctgcaatcgggagagcaggtcttcggaacctctgccttcgacgtcctgcaccgggagaaggcggcaataaggtttttgggaagcgcttcgcgcgactgctccctgttcgtccgcgacggctcgccttcctctccgctcgcgtgctgcgcgccttcgtcgacgctcgcaaccgcgagtagttcctgccgagcaaccggtttttccgccacctcgtgcaggcctcagctggggtcctcggctcggatctggggaggacgcgccgcggcggaggcgatgcagggaacaccacaagtgttcgaccatggttccatatcttttggaagatttgagttggaatcactagcatgggagaagtggtctgtatttgccaatgataggcgccatgaagagtttggcaagttcaatggtttggttgctaagaagaaggcatacttcgaagaatacttcaagagaattagggagttaaaggctttacaacaacaaaaccagcaaactgaacttaatcttgactatagtggtgatggtagtgattctagtcagacaggagaggatgtgccaactgcagatcaggcatctccttctggatctggaacccttcttgattccatggtacaaacaggtgttcagactatatttgagaatgatttggaatgctatgatgataatgacaaagagatgttagataaggatatttctccatcagttggaggcacatgtcaaattgagcaagaattcagagaaagtgcaagcggtggtaatcatcctgacagaatggtggatgtgttgcagcaaaacaccaactgtggtccagatgatctgggaaggcccatggagtctatgatgactccgaagagaactgtcaagaaagattcactggttggtcaagctgcaaaaacaatgccaaagactgtcaatatgacttctagtaatattccgggtcatgcagttgttaataagggaactgattcaggcaaatccagtgtggtgaatcgtagagccaagccagaaactattcagcaaaggctaaaagcagtaactggcaatattgttgacatcgttggaagaagcaaacttgtggtaaaagaagtccctggtataatgggtgttagaagaccttcctctccagcactacaacgcccctccaccagggaacgacgacctgtcaccagagatagttcacggaaggctcctgaagttgccaccatgtgccggccttctactgctgaaaggcgccctgccacccgggagttggcaccaaagcaagccaacacagttgttccgtgtcgaccatctacaccaaacaggcgccctatgaccagagagttggcgccagtcactccccagaaggcaattactcaaaagcttgttaagagtagcaagccagaaatgaaaaggtgttccacaccttattctgggaggactttgcatagtcttgttccagcctacactggaatcttgcactgcacttcacggcattcaggagacagcgagatctcaaatatcctcatcaaagagtgcaactcctgcacagactag

SEQ ID NO: 18030 - DNA, 2607 bp, Oryza sativa
  Clone ID: PAT_MRT4530_23625C.1
ctggatttaccttctgcctcagctccggcgagggaggctgccggcggcgaggcatttgtaccgtctctcatcctcacccgctctctccccccgttgcatcgtcccttgcgttgtggacgtttcttgctctgcgaacgcgacgcccgccacctgttcgacggaatgcgtccaggggagacggggaaaagggttaagggatccccatctcgaagcggcggcgccgacgaggatcggattggatgccttccggatggggtcctccaccacatcctcgggttcctgccggcgccggacgccgtgcggacgtgcctgctcgcacggcgctggcgccacctctggaagtccgccacgggcctgcgcatctccgaaggctacggtgtggaaaagctccatgatttcgtgcaccacctgctgctcctccgcgggggcgcgcccctcgacacgtttgagctaggttccatcgatttggccgagggagacaaccgcagcatgaacctctggttccggcatgccctgctgtgccaagtccgggtgctccggctgaatgtcttcggcctcgagctacacgacctgcctttcgtctcccggcacttggtgaagctagagcttcgttttgtgatattgatgcacagtttccttgatttctctagctgtccggtgctagaaaatttagagattgtctcctccgagttgtcagatgccaagaggatctcttcccagtccctgaaacacctcaaccttactcattgcactttcagcgaaaatgtccgaattcgtattgatgtgccgaatctactttccctgtggctacaagattatcgctgccggactcctgtgtttgaggttatgccgctattagtgaaagcatttgtcagtgtaaccggtgactctggggattggttaacttgtacaagtggtaatgctgactccgaggaatgccctcatgacgattgtggaaaatgggaaatgtccagtggttgtttcttgccctgcggccgcgacgcccgccacctgttcgacggaatgtctcctccaggggaggcggggaggaggggcaagggagccgcgcgcccgagcgacgatcggatagggcacctgccggacgaagtactgcatgacatcatcgggctcctgccggcgccggacgccgtgcggacgtgcgtgctggcgcggcggtggcgccacctctggaagtccgccacgggcctgcgcatcgccgacgacgacggggtggggctggtgcccatggaggagctccgcgatttcgtggaccatctgctgctcctccgcgggcgcgcgccgctggacacctgcgagctcagcttcgccgggctgtcgtccgacggcggcggcggcgacgcccgcctcgtggatctctggttccggcatgccgtgctgtgcgaggtccaagctctccggttgaatgcccctcgaagtgcctcacgcctcgtgctagatggcctgcctcttgtgtccgggcgcttggcgaagctagagcttgctcatctgaatttggtgcacaatttcctcgatttctcgagctgtccggtgctggaacatctggagattgtcctctgcagcttgtcagatgccgagaggatctcttcccaatccctgaaacgcctcaacatcactgcatgcgatttcagcgaaatcttccgcactcgagttaatgatgaccttgaggaatgtccttatgacgattgtgacaattgtcccagtgacaacaattgcaaggttctgcaagctttttcacaggctaagaatttggcgttggtcgctgactcacaaaagctgttggacttcattgataaaaagtcggactactccatcccgctcgtcggcgtgcactggcgatcgggagagcaggtctccggaacctctgccttcgacgtcctgcaccgggagaaggcggcaataaggtttttgggaagcgcttcgcgcgactgctccctgttcgtccgcgatggctcgtcttcctctccgctcgcgtgcttcgcgccttcgtcgacgctcgcaatcgcgagtagttcctgccgagcaaccggtctttccgctacctcgttcaaagactactggaaggaggctgtccgtagtgaaatggattccattatcgctaactggacttgggaggtgacagagcgaccctatggatgtaaacctgtggggtgcaagtgggtgttcaagaagaagcttaggcctgacgtcaatgaggcagataaatgtgtgtactatcgccatggtgggggtgagggagttattctgtgcttctatgttgacgacatactgatatttgggacaaaccttgaggtctccggaacctctgccttcgacgtcctgcaccgggagaaggcggcaatacggtttttgggaagcgcttcgcgtgactgctccctgttcgtccgcgatggctcgccttcctctccgctcgcgtgcttcgcgccttcgtcgacgctcgcaaccacgagtagttcttgccgagcaaccggtctttccgtcacctcgttcaaaggaggtgcatccagaaagaagcgcccgtcgttcacctatcaggtgagggagctgcagtctgacgccgccactgccccgacgtcgaaatgttattga

SEQ ID NO: 18031 - DNA, 3120 bp, Oryza sativa
  Clone ID: PAT_MRT4530_23626C.1
atggggagagcaggtctccggaacctctgccttcgacgtcctgcaccgggagaaggcgctgtgatttttactatggctggttttaccgatgcactgaggctggataaattcaccggtgtgcacttcaagagatggcagatcagggtcactctgtggttgatagctatgaaatgtttctgggtgagtactggcaagcctatgggcgttcttaatgctgatcagcagaaagaattctatgaggccactactctctttgtgggatgcattcttagcattcttggcgatcgtctggtcgaggtgtatatgcatatgaccgacgctaaggagttgtgggatgcattgaatactaaattcggtgctactgatgctagcaatgatctgtatatcatggagcagtttcatgactacaagatggctaacaaccattctgtagtcgaacaggctcatgagatacaaaccatggctaaggaactcgaactccttaagtgtgtcttacccgacaaatttgtgcccgggtgcattattgcgaaactacctccatcttggagaggtttcggtactgcactcaaacacaagagacgggaatactccattgaggggttgatagtgtctcttgatgttgaggagaaagcttgggaaaaatatgccgcgtctaagggcgatgctcaacagacaaccaacttcaagaagcagaagaagaacaacaacaatcctaaccaggatgagaggacttgctttgtgtgtgggcaacctggtcatctggctaggaagtgtccacagcgcaaggggatgaaggcacctgcagggcagacttctaagtctgctaatgtgaccattggcaacactggagatggaagcgggtatggtaatttacctactgttttttcagttaatcagtctactaattggtgggttgatactggggccaatgtcgcacggggttccaccatcctaatggggaatgggtcacatgcttctgttcatggtgttggcacggtagatctgaagtttacttcaggaaagatcgtgcagctgaagaacgtgcagcatgtcctttctatcgacaggaatcttgttagtggctcccgtctgactagagacagatttaagttggtttttgagtctaataaagtagtcgtgtctaaacatggatattttattggtaaaggttatgagtgcggaggcctgttccgctttttcctttctgatttctgcaataagtctgtgaaccatatttgtggcagtgtggatgatgaggctaatgtttggcactcacgtttatgtcatattaattttggcttgatgtctcggctttccagcatagttcctaacagaaataaggacaaaacaccatatgagatatggattgggagaaaaccatcactttcttatttgcgcacatgggggtgcttggcaaaagtcaatgtaccaataacgaagaagcgcaaacttggacctaagactgtggactgtgtctttctgggatatgctcatcacagcattgcctatagatttttaatagttaaatccgaggtacctgacatgcatgttggtacaattatggagtctcgtgatgctaccttctttgagagctttttcccaatgaaggatacacatagtggttcgagccaaccctctgaaataattcccagttcaatcacaccaccagaacaaactgaacatacacatgaacatgtctctgaggaggatgtcagtgaagctcctcgaaggagtaaaagacaaaggacggctaagtcttttggtgatgatttcactgtgtacctcgtggatgacactcctaagtcaatttcagaagcatacgcatctcctgatgcagactactggaaggaggatgttcgtagtgaaatggattccattatcactaacgggacttgggaggtgacagagcgaccctatgggtgtaaacctgtggggtgcaagtgggtgttcaagaagaagctcaggcctgacggtactattgaaaagtgcaaggctcggcttgttgctaagggctatactcagaaagaaggcgaagatttctttgacacttactcacctgttgctagattgaccacaattcgtgtgctactttccctagcagcctcacatggtcttctcgttcatcaaatggacgttaagacagcttttcttaatggagagctggatgaggagatctatatggatcaacctaatgggacaaaccttgaggtgataaatgaggttaaatcattcttgtctcaaaattttgatatgaaggatttgggaatagctgatgttatcttaaacattaagctaattagaggtgagaatgagattacactattgcagtcccattatgtggagaagatcttgaatcgctttggctacattgatagtaagccttctccaacaccttatgatcctagcttgttgcttcgcaagaataaaagaattgctaggaatcaactggaatactcccaaatcattggctcgctgatgtacctggctagtgcaactaggcctgatatctcctttgctgtgagcaagttgagccggtttacctctaatccgggagatgatcactggcgtgcgcttgagcgagtaatgcactatctgaaaggtactatggaattagggcttcactatactgggtatcctgcggtacttaagggttatagtgattctaactggatctctgatgtggatgagattaaagccactagtagatatgtcttcacactgggtggtggtgctgtttcgtggaggtcttgcaaacagaccattttgacgaggtcaaccatggaagcagaactgacggcactggatactgctactgttgaggcaggatggctgtgtgatctattaatggatctgcctattgttgaaaaaccagtgccggctatccttatgaactatgacaatcaaacggtaattgtcaaagtgaatagttctaaggataatatgaaatcgtctagacatgtgaaaagacgattgaagtctatcaggaaattgagaaactccggagttataacgttggattacatccaaacagctagaaacctggcagatcccttcacaaagggactatcacgaaatgtgatagacaatgcatcgaaggagatgggtttgagacccatgtga

SEQ ID NO: 18032 - DNA, 4602 bp, Oryza sativa
  Clone ID: PAT_MRT4530_23627C.1
atgaaggcacctgtagggcagacttctaagtctgctaatgtgaccattggcaacactggagatggaagcgggtatggtcgcacgaggttccaccgtcctaatggggaatgggtcatatgcttctgttcatggtctgatcatggtggagagtatttctcaaacgagtttgacttattctatgaggaacatggcattatacatgagaggacgcctccatattctcccgagtctaatgggattgctgaaaggaagaaccgcacactgactgacttggtgaatgccatgttggacatcgcggagctacctaaggcatggtggggggaggcattgttgacctcgaatcatgtgttaaacagagttcctaatagaaataaggacaaaacaccatatgagatatggattgggagaaaaccatcactttcttatttgcgcacatgggggtgcttggcgaaagtcaatgtaccaataacgaagaagcgcaaactgggacctgagattatggactgtgtctttctgggatatgctcatcacagcattgcctatagatttttaatagttaaatctgattctcgtgatgctaccttctttgagagctttttcccaatgaaggatacacatagtagttcgagccaaccctctgaaataattcccagttcgatcacaccaccagaacaaactaaacatacacacgaacatgtcactaaggaggatgtcagtgaagctcctcgaaggagtaagagacaaaggacggctaagtcctttggtgatgatttcactgtgtaccacgtggatgacactcttaagtcaatttcagaagcatatgcatctcctgatgtagactactggaaggaggctgtccgtagtgaaatggattccattatcgctaacgggacttgggaggtgacagagtggccctatgggtgtaaacctgtagggtgcaagtgggtgttcaaaaagaagctcaggcctgcggtactattgaaaacctcacatggtcttctcgttcatcaaatggacgttaagacagattttcttaatggagagctggatgaggagatctatatggatcaacctgatgggtttgtagttgaaggtcaagaaggcaaagtgtacaaattattgaagtctttgtatggtctgaaacaagctccaaagcaatggcatgagaaatttgacaaaacattgacatctgcaggctttgcagtcaatgaggcagataaatgtgtgtaccatcaccatggtgggggtgagggagttattctgtgcttgtatgttgattacatactgatatttgggacaaaccttgaggtgataaatgaggttaaatcattcttgtctcaaaattttgatatgaaggatttggaagtagctgatgttatcttaaacattaagctaattagaggtactatagaattggggcttcactatactgggtatcctgcggtactggagggttatagtgattctaactggatctctgatgtggatgagatcaaagccactagtggatatgtcttcacactgggtggtggtgctgtttcgtggaggtcttgcaaacagatcattttgacgaggtcaaccatgaaagcagaactgacggcactggatactgctactgttgaggcagaatggctgcgtgatctactaatggatctgcctattgttgaaaaaccggtgccggctatccttatgaactatgacaatcaaacggtaattgtaaaagtgaatagttctaatgataatatgaaatcgtctagacatgtgaaaagacgattgaagtctgttaggaaattgagaaactccggggttataatgttagattacatccaaactgctagaaacctggcagatcccttcacgaagggactatcacgaaatgtgatagacaatgcatcgaaggagatgggtttgagacccatatctaatgatgtgttcatgctagtttacatctgcaatgtcatgatttatttatggaataaattaaatcattatgtgcttataatttctacaatccaaaaaccttattataggcgctgtgattttactatggctggttttgccgatgcactgaggccggataaattcaccggtgtgcactttaagagatggcagatcagggtcactctgtggttgacagctatgaaatgcttctgggtgagtactggcaaacctgaaggagttcttactgctgatcagcagaagcaattcgaggaagccactactctctttgtgggatgcattcttagcgttcttggcgatcgtctggtcgaggtgtatatgcatttgactgacgctaaggagttgtgggatgcactgaatactaaattcggtgctactgatgctggcaatgatctgtatatcatggagcagtttcaagactacaagatggctgacaaccgttctgtagtcgaacaggctcatgagatacaaaccatggctaaggaactcgaactccttaagtgtgtcttacccgacaaatttgtggccaggtgcattattgcgaaactacctccatcttggagaagtttcggtactgcactcaatcacaagagacaggaatactccgttgaggggttgatagcgtctcttgatgttgaggagaaagctcgggaaaaagatgctgcgtctaagggcgatggtcgcacgaggttccaccgtcctaatggggaatgggtcatatgcttctgttcatggtctgatcatggtggagagtatttctcaaacgagtttgacttattctatgaggaacatggcattatacatgagaggacgcctccatattctcccgagtctaatgggattgctgaaaggaagaaccgcacactgactgacttggtgaatgccatgttggacatcgcggagctacctaaggcatggtggggggaggcattgttgacctcgaatcatgtgttaaacagagttcctaatagaaataaggacaaaacaccatatgagatatggattgggagaaaaccatcactttcttatttgcgcacatgggggtgcttggcgaaagtcaatgtaccaataacgaagaagcgcaaactgggacctgagattatggactgtgtctttctgggatatgctcatcacagcattgcctatagatttttaatagttaaatctgattctcgtgatgctaccttctttgagagctttttcccaatgaaggatacacatagtagttcgagccaaccctctgaaataattcccagttcgatcacaccaccagaacaaactaaacatacacacgaacatgtcactaaggaggatgtcagtgaagctcctcgaaggagtaagagacaaaggacggctaagtcctttggtgatgatttcactgtgtaccacgtggatgacactcctaagtcaatttcagaagcatatgcatctcctgatgtagactactggaaggaggctgtccgtagtgaaatggattccattatcgctaacgggacttgggaggtgacagagtggccctatgggtgtaaacctgtagggtgcaagtgggtgttcaaaaagaagctcaggcctgacggtactattgaaaagtataaggctcggcttgttgctaagggctatactcagaaagaaggcgaagatttctttgacacttactcatctgttgctagattgaccacaattcgtgtgctaccttccctagcagcctcacatggtcttctcgttcatcaaatggacgttaagacagattttcttaatggagagctggatgaggagatctatatggatcaacctgatgggtttgtagttgaaggtcaagaaggcaaagtgtacaaattattgaagtctttgtatggtctgaaacaagctccaaagcaatggcatgagaaatttgacaaaacattgacatctgcaggctttgcagtcaatgaggcagataaatgtgtgtaccatcaccatggtgggggtgagggagttattctgtgcttgtatgttgattacatactgatatttgggacaaaccttgaggtgataaatgaggttaaatcattcttgtctcaaaattttgatatgaaggatttggaagtagctgatgttatcttaaacattaagctaattagaggtactatagaattggggcttcactatactgggtatcctgcggtactggagggttatagtgattctaactggatctctgatgtggatgagatcaaagccactagtggatatgtcttcacactgggtggtggtgctgtttcgtggaggtcttgcaaacagatcattttgacgaggtcaaccatgaaagcagaactgacggcactggatactgctactgttgaggcagaatggctgcgtgatctactaatggatctgcctattgttgaaaaaccggtgccggctatccttatgaactatgacaatcaaacggtaattgtaaaagtgaatagttctaatgataatatgaaatcgtctagacatgtgaaaagacgattgaagtctgttaggaaattgagaaactccggggttataatgttagattacatccaaactgctagaaacctggcagatcccttcacgaagggactatcacgaaatgtgatagacaatgcatcgaaggagatgggtttgagacccatgtga

SEQ ID NO: 18033 - DNA, 474 bp, Oryza sativa
  Clone ID: PAT_MRT4530_23628C.1
gagggcaaatgatgtgctattatttccaaagtatcaatacatgaagaaacaatatgacgtcagcactgtactcataggcaatatctcgttttttttttgcgtaaacaactaaggtcgcagtattgcttatccacacacagcgatatatttcatccatatgttatattacctatatattaaatacagcatgatacatcaacaacatttgatattacatgccagcatcacagttgtgtagttatgtattctttttgttatcagaatgcgacaagcggaggtccattgactgcagttggttcctgaattcctcattctctgcgatgagacgctcatactcggtaagcaaaccttcagattgcttctgtaaagccaaggtattcgcttcagctgtttttagttcctcagttttcgtttctgacagacgcttgaattcttgcacttgctcattcaacctggaaatctctttctgatatt

SEQ ID NO: 18034 - DNA, 576 bp, Oryza sativa
  Clone ID: PAT_MRT4530_23629C.1
atgggtgcaaaccttgtggtggacccttacgccattgatctcgtagaagctgctgtctgggtcagcgagggcatcggggtcaaggagatcgtcctgaggcaaaggctgggggagaaccattgggacggcgagggccggaggccgcgggagaaggcggcagaatgtcgagggtgtggagccgaggctcccgagagagagagagagagagaacgcgccgtcgccgccgcggaactcctcgccgcgccctgcgacgccgccaccgccgccgtcgacctcctcgccgtgccctacgaggctgccgccgtggacctcctcgctgcaccctatgatactgccgcgccgtcgccactgccgtcgtggacctcctcgccgcgccctgcgaggccgccgccgtggaccactgccgcgccacccctgccgtggatcctcaccgcgccctgccgcgccgccgccctggtcctccttgccgcgtcctaccgcgtcgctgtgctggtcctcctcgccgcaccctgtcgtgccgcccccgtggaccgccagcatagcggcgccatggccaccgctagggaccgtcgctga

SEQ ID NO: 18035 - DNA, 747 bp, Oryza sativa
  Clone ID: PAT_MRT4530_2362C.1
atggagattgcggtgcgagagattgctacgtactggttcgaggaccagcgaacgtgtagaatcatatctcgaacaccaatggagattgcggtgcgagagattgctacgtactggttcgaggaccagcgagcgagtacaatcatctctcgaacaccaatggagcttgcggtgcgggagattcctacgtactggttcaagaaccagcgagcgagtagaatcatctctcgaacaccaatggaagttgcggtgcgagagattgccacgtactggttcgagaaccagcgagcgagtagaatcatctcccgaacaccaatggaggagattgctacgtactggttcgagaaccagctagcgagtagaatcatctcccgaacaccaatggaagtttgctacgtactggttcgagaaccagcgagttgtttccgtataggacatggtatgtggtgggtccataaccctgacagatattatggtaatacactgataataaatttactatcacaagaggaattagatttaaagcagtttttgaatagattagctatgcttctaaaagatgaggagattaagtggtaccaacgtgataaagtaaaggacttgttggaagatgattccaataccaaatactttcagtttgtggctaatggttgggatagagaaaaggatggatgggatgggatgattgaagggattctggatgagccttgtttttctttggagagacatgggcggatgcgtatgggatga

SEQ ID NO: 18036 - DNA, 559 bp, Oryza sativa
  unsure (1)..(559): unsure at all n locations
  Clone ID: PAT_MRT4530_23630C.1
gtctcggtgcggggttcggaccgtcggggttcctgacttcggtcctactccccctgttccacccccggatctccccttcatgggcccctgcatgagtttcncagggagtggccccggccctggganctccccctcgttccccaaagccttccctggacntgcccccgggcangccccccacgacnttgtncnccccatgctccggtccgtgcncccggcgccgatcnctcctcctgccccgctcgctgctctccccccnggtttccccccttgggtccaacggatgggccgagtgcctgccggggctccctcccctcccaagttcccctttccatgtagtggttcccctgctgtccgatacatcgctcctgttcctgtatatcgcttctgtaatctgtcctgttcacttaatgatttgggcccccccccccatttggctggggctccccggcaccccgtttgctcgggccctcccggcccgccgcttttgaatcaatccccgtcttccgttccnggggtttggctgcgcgttttgcattcaggcgtctgcctgggtttt

SEQ ID NO: 18037 - DNA, 3099 bp, Oryza sativa
  Clone ID: PAT_MRT4530_23631C.1
atggctggttttgccgatgcactgaggccggataaattcaccggtgtgcattttaagagatggcagatcagggtcactctgtggctgacagctataaaatgcttctgggtgtatatgcatatgaccgacgctaaggagttgtgggatgcactaaatactaaattcggtgctactgatggtagcaatgatctgtatatcatggagcagtttcatgactacaaaatggctgacaaccgttctgtagtcgaacaggctcatgagatacaaaccatggctaaggaactcgaactccttaagtgtgtcttacccgataaatttgtggccgggtgcattattgcaaaactacctccatcttggaggagtttcggtactgcactcaaacacaagagacaggaatactccgttgaggggttgattgcgtctcttgatgttgaggagaaagctcgggaaaaagatgccgcgtctaagggcgatggtgggcagtccagtgctaatgttgtgcacaaggcccagaacaagagcaaggggaaatacaaagctcagcagaccaccaacttcaagaagcagaagaagaacaacaacaatcctaatcaggatgagaggacttgctttgtgtgtggccaagttggtcatctggctaggaagtgtccacagcgcaaggggatgaaggcacctgcagggcagacttctaagtctgctaatgtgaccattggcaacactggagatggaagcgggtatggtaatttacctactgttttttcagttaatcaatctactaattggtgggttgatactggggccaatgtcgcacggggttccaccgtcctaatggggaatgggtcacatgcttctgttcatggtgttggcacggtagatctgaagtttacttcgggaaagatcgtgcaactgaagaacgtgcagcatgtcccttctatcgacaggaatcttgttagtggctcccgtctgactagagacggatttaagttggtttttgagtctaataaagtagtcgtgtctaaacatggatattttattggtaaaggttatgagtgtggaggcctgttccgcttttccctttctgatttctgcaataagtctgtgaaccatatttgtggcagtgtggatgatgaggctaatgtttggcattcacgtttatgtcatattaattttggcttgatgtctcggctttccagcatgtgtttaattcctaagttttccattgtcaaaggttctaagtgccatagttgtgtgcaatcgaagcaacctcgcaagcctcacaaggctgccgaggagagaaacttggcaccactagaactcctacattcagatctttgtgaaatgaatggggtgttgacgaagggtggaaaacgatatttcatgacattgattgatgatgctactagattttgctatgtgtacttgttgaaaacgaaagacgaggctctagactattttaaaatttataaggcagaagttgaaaatcaacttgacagaaagataaaaaggcttaggtctgatcgtggtggagagtttttctcgaacgagtttgacttattctgtgaggaacatggcatcatacatgagaggacgcctccctattctcccgagtctaatgggattgctgaaaggaagaaccgcacactgactgacttgtgggtgttcaagaagaagcttaggcctgacggtactattgaaaagtacaaggctcggcttgttgctaagggctatactcagaaagaaggcgaagatttctttgacacttactcacctgttgctagattgaccacaattcgtgtgctactttccctagcagcctcacatggtcttctcgttcatcaaatggacgttaagacagcttttcttaatggagagctggatgaggagatctatatggatcaacctgatgggtttgtagttgaaggtcaagaaggcaaagtgtgcaaattgttgaagtctttgtatggtctgaaacaagctcctaagcaatggcatgagaaatttgacaaaacattgacatctgcaggctttgcagtcaatgaggcagataaatgtgtgtactatcgccatggtgggggtgagggagttattttgtgcttgtatgttgacgacatactgatatttgggacaaaccttgaggtgataaatgaggttaaatcattcttgtctcaaaattttgatatgaaagatttgggagtagctgatgttatcttaaacattaagctaattagaggtgagaatgagattacactcttgcagtcccattatgtggagaagatcttgaatcgctttggctacattgatagtaagccttctccaacaccttatgatcctagcttgttgcttcgcaagaacaagagaattgctaggaatcatctggaatactcccaaatcattggctcgttgatgtacctggctagtgcaactaggcctgatatctcctttgctgtgagcaagttgagccgatttacctctaatccgggagatgatcactggcgtgcgcttgagcgagtaatgcgctatctgaaaggtactgtggaattggggcttcactatactgggtatcttgcggtactggagggttatagtgattctaactggatctctgatgtggatgagatcaaagccactagtggatatgttttcacactgggtggtggtgctgtttcatggaggttttgcaaacagacaattttgacgaggtcaaccatggaagcagagctaacggcactggatactgctactgttgaggcagaaaggctgcgtgatctattaatggatctgcctgttgttgaaaaaccggtgccggctatccttatgaactgtgacaatcaaacggtaattgtcaaagtgaatagttctaaggataatatgaaatcgtctagacatgtgaaaagacgattgaagtctgttaggaaattaagaaactccggagttataacgttggattacatccaaacagcgagaaacctggcagatcccttcacgaagggactatcacgaaatgtgatagacaatgcatcgaaggagatgggtttgagacccatagcattcttgaaagaactcacctttgtgagcttgactgttggtcgcagtctatga

SEQ ID NO: 18038 - DNA, 1341 bp, Oryza sativa
  Clone ID: PAT_MRT4530_23632C.1
atggcaaaagtgcaaggagcactactccctgaccgtgatgggcaagctgcagggcccgtcccgttcaaggaggtcgccggcgtcgacgccatcccggctcgccccgtcactgagcacgacgccgccatctccggcatgccgaggcgcctcgtctacaacaacagcctcccgatcctctcctacagggggttctggctgctggaggactgggcgcggggcacggccgccatggccgacgagcgccgcggcggcttcgtggcgcgccccggcgacgtcgtgctcgcgacgctgcccaaggccgggaccacgtggctcaaggccctcgcgttcgccaccatggcgcgcggcttgttcccgccggcgagccccgaccacccgctccgccgcctcaactcgcacgactgcgtgcctaccgtggagagtggcctgttcgcgtgtgggcgggagggtgtgctggacaagctgccgtcgccgaggctcttgaacacgcacctgccactctcgctgctgccttcttcaataaccgacaatgatgattgcccggaggaggatctggaggaggtgaaggctgggaggagaaaacccaccatcacctcgccgctcctcaaggtgacgagaaccacccaacgagatgagaaggacagagcagtctccacatggcacttcatcaagcgtatcaaacgtattggatcagatgtgccattctccgaggtgtacaagtctatctgcgagggcacttctgcctgtgggcctgtctgggatcacatcctcggctactggaacgcaagcaaaaaagagccaagtagggtactcttcctaacatatgaacagatgctccaagatccgatgggcacaattaggcaattagcagagttccttgggcagccgatttctgatgccgaagaagaaacgggtgttgttgcagagatcgtagagctttgcagcctagagagcatgaagaaacaaaagatcaacagggaaggataccagggtgtcggcattacgttctcgaacgatgcctacttcagaaagggagtggcaggagattggctgaaccatatgaccctcgagatgggacaacacctggactcaatccttaacgagaagtttgatggcggagtcgatttagatggaactaaagatgaatacatgtttcatgggcgaatagaaggggcggtgctggaggagggcgtcggcggcggcacggccggaggggaggtgcggcttccctccctctccctcagatctactctccctccgctgctggccgcgacgacaacgccgatgacgacgccgcttggatccggggaggggaggggaggcagcagcgagaggagctga

SEQ ID NO: 18039 - DNA, 436 bp, Oryza sativa
  unsure (1)..(436): unsure at all n locations
  Clone ID: PAT_MRT4530_23633C.1
ttactccacaagtatattgcncgaatgatttgggattgttttttgcccgatattgttcggatttgtggttggttgcatagcacagaaaagcagatacatttgttctaacctcgaggataacagggtccatttttcatctatagtttggattttaaagattgtaatcatagagcacaggagaaagggtcatgcatatcataggcactcctacacaggaaatcgttttccccaaggaatcagattcaagccaagagttaaattggaaaacacaggtggcagtgacttgttctgtagctgtggtgattcacatcccttgctgataaacagtgatagtgttttgtttgcttctattattgctgtaaaaaaaacagtaagtttaatagtctattcatttggttcccagttatacgtagatcagcatgtggttgatgataac

SEQ ID NO: 18040 - DNA, 134 bp, Oryza sativa
  unsure (1)..(134): unsure at all n locations
  Clone ID: PAT_MRT4530_23634C.1
aaaaatgtaaaatnaaggctttcgggttgccaataattttaattaatccacacttctatagtagttcccatacatcagatcanttttaaacaagaacttattctcaattggaatgtcttctgatagtaggttcc

SEQ ID NO: 18041 - DNA, 940 bp, Oryza sativa
  Clone ID: PAT_MRT4530_23635C.1
atgtggaggttgaaggttgcggagagcggtggcacgccgttgctgcggtcgacgaatggcttccttgggcgagcggtgtgggagttcgaccccgaccacggcacgccggaggaccgcgccgacgtcgagagggtgcgccgtgagttcaccgaccaccgccttcaccaccgggagtcagctgacctcctcatgcgcatgcaacaagcatcaacgtcgtcgttatcgtattccacccgtcaataataagcttggagagaaggaggaggtgactgaagaaatcgccatggcttcgttgagacgagctctcgacgagttctcttctctgcaagcagacgacggacactggcctggagacttcagtggtgttatgttcatcatgcctggcttgatatttgccttatatgtcactggatcactggacactatcatatcaccagagcatcggcgggagatatgtcgctatatctataaccatcagaacgaggatggtggatggggcagtttgatgttgagctcgagcaccatgtttggcacatgttcaaactatatcacccttaggcttctcggtgaagagacaagcaatgagcaattagccaaagggcgcatatggatcatattgcatggcggcactacctttgttccacaatggggaaagatatggctctcgatacttggagtgtacgagtgggcaggaaacaaccccatcttccctgagctatggctgaccccacaatttcttccttttcatccaggcaaattctggtgcttaactcgcatggtatacctgccgatggcctacctatacggcaagaagttcgtgggccccaccgcgccgaccatcctggcgctgcgagaggagatttactcggcccactacctcacaatcgattgggcccaggcccgcagcgcctgcgccaagagccatttccacataccgtct

SEQ ID NO: 18042 - DNA, 457 bp, Oryza sativa
  Clone ID: PAT_MRT4530_23636C.1
tgactcagtttctggcctatcctgcataatatgtgtttgttaagttttgagacatatgctgttgtaattcaaataaatagtaacaaaagtataattttttgactaccttgtgtgaagtggcatgtgttgtgctgtcgacgcgtttttctgatgtttttatgtcgctgtcacttggtatgtcttggacattctatgatgaaatgacatttttaatggatattaaaccatgcgttgtgatgtataattaatgcaagtacaattaaatgaaacgattaccttatcagtatggatgcatgactctgattgtttgctcttcttgctgtcactcgttatgtcttggacatcctacgatgaaatatcatatgtaatggatattaaaccttgcgtagtgatgtataattgaatgtaagtacagatgaattatttgattaccttatcagtaaaaaaaaaaaaaaaa

SEQ ID NO: 18043 - DNA, 485 bp, Oryza sativa
  Clone ID: PAT_MRT4530_23637C.1
gttaacaaacaggcaaccagtgcgagacttttccaaatatctcacttgatctgaccagccagggaggattattaacgggagcctagcgcctactaaccaatacattcatatggtggagctagaacaccggccctgagagaaacccgagctccacggcgagttttcagatccgtggcatttctattggcttggttcaactagaagcccacaactgtttggtaactcctttaagagctccggcacaaaactcgttggactccttctcaaaaaaagcaagtttaccttctgagatttttaaacttttgctagaagtccgtataaaagcactggtgattacttttgtcctcatgcacaaccatacatatgagccgtccgtggatgctatcagtgaccagatgactggaccacaccgaggctctggacttcagggagcttaactggaccggtgacttcaaccccaacggataaaatcttatggatgaaca

SEQ ID NO: 18044 - DNA, 300 bp, Oryza sativa
  unsure (1)..(300): unsure at all n locations
  Clone ID: PAT_MRT4530_23638C.1
aaaccatgcgggatcgggactgggatttattcataaattcgggatttnaactggctacactgggcccgggcaacaagataaaccatatttggcaaccactggcttatgattgcagattcacacaaagcctaagactggcactcccccgttttactagaggcttaaatggcaaaagagagtaaaatcaaatccgctttgggagttcaaatttcccaaaatgtcaattgcaagcatttatgggggggatcatcaaagcattcaagcccttggcccgggagctgctttntgggagccagccag

SEQ ID NO: 18045 - DNA, 384 bp, Oryza sativa
  Clone ID: PAT_MRT4530_23639C.1
ttgtcttctgaatctatctctcgagcggccgcggatcctgctaataggagttcctccgtctacgccgcgttgtcggcaatgtccgctctggagctatatgcatacacgatccggtgcggatgctgggacccgctccgacgggcaggcgccatgccctggggcacccaaattctgccgaactagaaccctagccaggaagcgggaagccttatcgcgactgctcaagctataccagccttgatgcggctgagaatgctgcctttggctacaacgcggaggaagaagttgaactcggtgaattggctgataatgacggagatgatgcagctccgcaagaccgtggagatgaaaaatgcccttacgttcaagaacagtgtttgttag

SEQ ID NO: 18046 - DNA, 772 bp, Oryza sativa
  Clone ID: PAT_MRT4530_2363C.1
cctgtccccagaatttaaattggttaatggccgtgggcttaatttatttaaaatggccaaattccgctgttgaaacctaaatctcagtgcctctattcacggtcataaaattcagcacacctctgcaccaccagctcatgtactccctgggacgccgaccgccggatgacttacaccctatccatggctgctgcaaccgggagtcagggctccgatcgagacaactccttccaatccaatccgccccggtactcattcgtcagggcaatccagcagcagtcgacgagctgctgaaggcgatcgtcatgatgaagagccctctctacctcacattttagccacacaaaaccagctgtttgaacggatgctagcaaacagtgaaaatatgggttctgccatggctcacaatgcaaatcaaggacagtccaaattagcagatgttcaacgcacccatcctctacacttctcctctgctagttgcggatccacttgtcgcagatgatttgcttcgcgatattgaggccaagctcaatctttggctgttcatcaggaggtattcaggtctgctcatattctcgccggcctcatggaaatcaataagaaggaatttctcaacctgaaacagggaaacatgccttttatggagttcttggatcgtttcaactatcttggtcgttatcaggaccgtcccgtgaaattcaggggcctgtgcaaaatcttaatagaatgctaaacttaattgctaaaataaaatgaataatttaatacttca

SEQ ID NO: 18047 - DNA, 470 bp, Oryza sativa
  Clone ID: PAT_MRT4530_23640C.1
tggtgtttttaaccctttgtggcctttttttttttttttttttttttttttttttttttttttttttttttaacactggaaaaacccccattccacaacaccccaaaggcaacaataggacccaaaacacccaaatttttaacccaaaaaaaaaaaaccagttttaaaccaccaacaaagggcccattgcgagcaaaaataaacggcccctccaaccaggcccatggcccggggcaaaacttaaccaaccctaaaaaatctcaaaagccgccaggaaaaccccccctttaacgatgctcatttttttttggggggaaccttggacaccccggcacccggtggggcccccttctccacgttcttgaagacccccaccaccaccctttgccccatggcacccccgggaaaacaccccaaagggggggccccaaagaagggccccaccaccacgggcctggggggaaaaattt

SEQ ID NO: 18048 - DNA, 187 bp, Oryza sativa
  Clone ID: PAT_MRT4530_23641C.1
tcacgcttcgtgtgcgtgttctcataggcgagagtgaattctttccctctttcacaataggggttcacatattgctggtgctcccgcccgattcccacgagaggattcaaacttgaacgctgaaaagtactaatggagggaagaagcgctaaagattgttctacagcggcagccaaacatggggagt

SEQ ID NO: 18049 - DNA, 138 bp, Oryza sativa
  Clone ID: PAT_MRT4530_23642C.1
atggcatgcctggtgcttcttcagaagaagacctgtgagcagaacaggttgctatattatggcacggaagtagtaagattgacaaattttgacctagaattgccacaccacattccccaaaaacttcagttgagctga

SEQ ID NO: 18050 - DNA, 1145 bp, Oryza sativa
  Clone ID: PAT_MRT4530_23643C.1
agccccgggctgctggatttcggcacggggcacacacccaaacccaacctcccaaaacacccacccggtttaccagagatccgcgcccgccacttgtaaacctgctgcacccatggcgcccagagcagctacggtggagaaggttgctgtggcgccacccaccgggcttggtcttggcgtcggcggaggtgtcggagccgggggtcctcactacaggggcgtccgcaagcgcccgtgggggcgttacgcagcggagatccgtgaccctgccaagaagagccgggtgtggctcggtacctacgacacggcagaggaggccgcccgcgcctacgacgccgccgctcgagagttccggggtgccaaggcaaaaacaaactttccgtttgcatcacagtcgatggtcggctgtggcggcagccccagcagcaatagcacggtagacaccggtggcggcggggttcagacgcctatgcgggccatgcctctgccgccgactctggacttggatttgttccaccgcgcggctgctgtgactgcagtcgccggcaccggcgttcgctttcctttcagaggatatcccgttgcacgtccagcaacgcatccttactttttctatgagcaggctgcagcggctgccgcagctgaggctggataccgtatgatgaagcttgcaccgccggtcaccgtggcggcggttgcacaaagtgactccgactcctcgtcggtggttgatctcgcgccgtcacctccagcggttacggcgaacaaggcggcagctttcgatctggatctgaaccggccgccgccggtagagaactagctcaggatgggttagctgacgactttgtagtttctctcttattttcttctttgatggatatttctctccgatgttttggtcctctgtgtttttgtttagtagcctgtgagagacggaagagccttgtaaatagtttttctgccgagggcgaaattcatcttgggatctgttaattagaacagatcatgccggcgatgagatggactaaaccgtggagtgtatgtattcctttatattagtatgaagaaattattcagaaagtcacaaaaaaaaaaaaaaacactgagtttgattgacgttttcacgtgccgaattcctgcaaaaa

SEQ ID NO: 18051 - DNA, 2449 bp, Oryza sativa
  Clone ID: PAT_MRT4530_23644C.1
gggcagaaatccacctcggctgcctctgaataccagaataataacagcgtaattgtaaactgactagtagcacatagaaatgaacggagcattttaaacattattgctgaatgcccaacctgaatagcttcttttgtatgtaattttgcttcaacaaggcaggtatgtaagtgtgtaaagcaaacatagacataagaagcaacctatttcttagcctatagaaaccttctctatatttctcttgcacagatgaaaacttgttaagagctaactgtggaaaccatttcatattcacttgccttcctgttcttcgaacaaatgaagaaagcgcctccaaaccgttgctgaaggaactagactacccaaaaacagcatttgccataacttcacgcagatgtaaattctcatgggtcagaaatccacctcgactgcctctgtaaaatggtctcaagctgggcacaaaatgcttagccctgaacacatcatacacatgaggtagcgcacgaatcatggtgcttccaatgtaaaatcccggggaaagtgccttcactttggagcctaagcatgcgtttaagataacctgagggagcaagaacccgtcgagtattaatcccccatatgacacaaggtcctcccagaatgcatgtctattaacccgaggtaagcgagcaacctttctaagcatccttcggttgttgttaaattgcatgtgaacaacccaagctgcgactgcacctataatgtacagtggcaagcatatccaaagcactttcttctcagcagcccatgattgatctttgcttacatccatggaacgtgcagagcatgccaattgaagaagtcgtaactgcatcagaaaggttaccatggtaatgattcgcacaatgacttcattcacctcaagccaaccaccacctgaaagtggaaatgtctgtttgttactgttcttgaagagggcctcaaagttcaacacaagaggtatcatgtaacccaaagagagaactacaagcatggtgattgacatggcaggaagcgcttcaggaaccttcttgacatggaacagttgcacagcaatgaacaaacaggatagtgtcatcgagatcagggccatggtgctttccaagtccattctccacatcgactcatccactttgtctatgtacaacccatacgaagcaatgtccagcggttcaaagaaaagagggtcagtcttcttcctcaagcttctaattgtccccttgacatgctgtgctacttttgtatccaaaggagaaaactgagcagttacaagaatttcacagtccaacgagatattaaccacccgacaagcaatcatacacaaggagcctgtcttagcatcataaacaccctctgcagagatatgctgacggcgaaatgtttctagcgaccaattcccgacatagtgaatgtcatagctgacattaagtaacctatgattcgtctctgtcattatatgataggaatgatctgaatcaaccaaagagttcccatcatatagcattgacccaattgtgactggtgatgcatatccagagccccctcctttctgcaagaagaaccggaatgttaagtcccgatatgaattgctatcagggaactttccctttctcttcttgttcaagccatacttctcataatacttctttgcctcatcaaccttggtgtagttatacttcagacccgaaagacttcccctaaagtatggagctattgtgttggagcttgcagctatgccctcaccgctcttcaggctcgtgttccagaccaaacctgcagcaaagctccgttcctgtagtgaccacacagcgggggaccagaagctcatcccaatcccacactcgcccaccgccaaatccgcacgggatggtcccgaattcacaacgtgacaccctttgagacacagcctgctcctcttctcgtcccagaaaccctccactaccatggccttctcaccaagcataaagtagtatgccgatacatctgtctgattcgcgaacaccacataagctcgcactgcgccattgtcggcacatcgcatccggttgatgaacatgaacctctggtgaagccccagcgatgaggcggtcgactcgctgctgccgttggtgtagtcgagcctgaacgtcgccttgaacagcgaactgaggtgtgcgcatgagaatttactaccttcgaacacctggagcgcgtcgagcctaccggtgggcggcggcgggcacgaggcgctctccgcgtacgcgtatccctcctcggcgtaggtgacgagagagacgggctcgaagaagctgggggagtcggtgctctcgaggctgccggtgacgaaggggcgcgtcaggttggcgcggccggggtagcggacgcggagcacggcggagaggaggttcaccgccgtgccgtcggcggcgcggccggagccggtgccgaccat

SEQ ID NO: 18052 - DNA, 2233 bp, Oryza sativa
  Clone ID: PAT_MRT4530_23645C.1
tcttacagtgggccattaataaatacatcatctctcttctcatttctaattattttctgatctgttatttttgtgtgcacatacatacgtggcatccgccgccattgattggtgccttcacctccacggttgatgaactccgccgccgttgctgatggcgacattgtcttgactgccggccgccgtcatcgccgccgactggtgccctcgccttcacggttggttggtcacatcaccgttgttgggcatctatgtcttcaccgctggccgcctcgtccgccgccaactggtgttctcgcctatacagttggttggtcacaccactattcatgggcgtccacgtcttcatcgaccggcctgcctctgtcgccgccgactggtgtcctcgcctatacggttggttggtcacaccaccgttcatgggcgtccacgtcttcaccgccggctcgccttcgccaccgccgactggtgtctccgcctgcacggctggtttattatgccgtcgttgttgggtgtctacgtcttcaccgaccggtctgcctctgtcgccgccgactggtgtcctcgcctatacggttggttggtcacatcaccgttcatgggcgtccatggcttcaccgaccgacttgccttcgccgctgccgactgatgtctccgcctacacggctggcttattatgccgctgttgttgggcgtctacgacttcatcgccggcctgcctccgttgccgccgactggtgtcctcgcctacacggttggcctattatgccgtcgttgttgggcgtcttcgacttcactgccggcctgcctccgtcgccgccgactggtgtcctcgcctatacggttggtggactccgccgccattgatggacctcgtcatctacaccaccggcttgctcccgccgccgccaactggtgtctttattgttattgatggacgactttgttcccacattggccacctctgccatcaccaaggggaatattacaaagctaagtcatcattattcatggctttaagcttatctcctacgctccaggaatggatcagtcagaacatcaccaccggcttgccctcatccgccgccaactagtgtcttcgcctatacggttggttggtcacaccaccgttgttgggcgtcgttgtcttcaccgaccggccgcctcgttcgccgccgactggtgtcttcgcctatacggttggttggtcacaccaccgttgttgggcgtctacgtcttcaccgaccggccgcctcgtccgccgccgactggtgtttccgcctgcacggttggcctattatgctgctgatgttgggcgtctatgtcttcaccgaccggccgcctcctccgccgccgactggtgttttcgcctgcacggctggcctattatgtcgccgttgttgaacgttaacatcttcaccgaccggccgcctcgtatgatgcctactggtgctaccgtcttcacggttggccacgtcggcgccactgctaataggcgtaatcatcttcaatgcaagctgtctacgtctgctgccgactgccgcgcgtctttgtcatcattgactagcgtcatcctcatcgcctgtttgccttcgccgccgcccatggtgccttgactttcatggctggcctattttgctgccattcaaggacatattcattttcgtcatcattctacttcttccagcgactttatctttattgtcttctgcaccggcaaaaccaattgccgctacttcgcaagttttgctgcttcaccaaccacgacatctacaagagcctcaacatctcggcatgcctcaccaaatatgatgtcgtgttattttacaacaacaagtggtgttacaatcttcaatatttctacttggacatcttcaacatgcatcttcactctagtgatggctgttcgacgacaggaagctatagttctcgactctatgttcaattgctttccaactaaccaaagagtcgggggctacacaaatacaagactcaaaattcgacaagttttatgtcaagatgaagtaatcaatcaatcaatgagtcaactctaggagttattatctttatcttcgcttcagagccgaaatttgacttcagcgactccaattattacaccggcatttggatttctagacgctgccacaatttactctaaaattttcaactatcaagtttgagatttaatctacatgtccgggagtttagagttatcaaccaatcagctcagttt

SEQ ID NO: 18053 - DNA, 2831 bp, Oryza sativa
  Clone ID: PAT_MRT4530_23646C.1
atgacagaatatgatcgtcagatctatactacacccggcggattcaaatccccaaacaggagtctcgtgcgctaccctcttttattattgctaaattcatgtttcgacagttggcgcgccaggtaggggttgcgtcgaatttcccgtcgagaagtgcgatggaatcaactccatgaccaacttcaaatccaatctgacttcggtcagcctccggtcaaccgctacattcatcacatcaatctccgacgtcagcatatacgaggatctacatggctcagccgctaccaagaaatacatcaactctcagccaccgccaatgttttctcgtcaaatatcaaagtttctggcgagattcaattattaacatgaatcggatgcacatacatacgtggcatccgccgccattgattggtgccttcacctccacggttgatgaactccgccgccgttgctgatggcgacattgtcttgactgccggccgccgtcatcgccgccgactggtgccctcgccttcacggttggttggtcacatcaccgttgttgggcatctatgtcttcaccgctggccgcctcgtccgccgccaactggtgttctcgcctatacagttggttggtcacaccactattcatgggcgtccacgtcttcaccgactggcctgcctctgtcgccgccgactggtgtcctcgcctatacggttggttggtcacaccaccgttcatggacgtctacgtcttcaatgactggcctgcctctgtcgccgccgaccggtgtcctcgtctatacggttggttggtcacaccaccgttcatggcgtccacgtcttcaccgaccggcctgcctctgtcgccaccgactggtgtcctcgcctatacggttggttggtcacaccaccattcatgggcgtccacgtcttcatcgaccggcctgcctctgtcgccgccgactggtgtcctcgcctatacggttggttggtcacaccaccgttcatgggcgtccacgtcttcaccgccggctcgccttcgccaccgccgactggtgtctccgcctgcacggctggtttattatgccgtcgttgttgggtgtctacgtcttcaccgaccggtctgcctctgtcgccgccgactggtgtcctcgcctatacggttggttggtcacatcaccgttcatgggcgtccatggcttcaccgaccgacttgccttcgccgctgccgactgatgtctccgcctacacggctggcttattatgccgctgttgttgggcgtctacgacttcatcgccggcctgcctccgttgccgccgactggtgtcctcgcctacacggttggcctattatgccgtcgttgttgggcgtcttcgacttcactgccggcctgcctccgtcgccgccgactggtgtcctcgcctatacggttggtggactccgccgccattgatggacctcgtcatctacaccaccggcttgctcccgccgccgccaactggtgtctttattgttattgatggacgactttgttcccacattggccacctctgccatcaccaaggggaatattacaaagctaagtcatggatccagatccagatatgcataaaagggattcatggctttaagcttatctcctacgctccaggaatggatcagtcagaacatcaccaccggcttgccctcatccgccgccaactagtgtcttcgcctatacggttggttggtcacaccaccgttgttgggcgtcgttgtcttcaccgaccggccgcctcgttcgccgccgactggtgtcttcgcctatacggttggttggtcacaccaccgttgttgggcgtctacgtcttcaccgaccggccgcctcgtccgccgccgactggtgtttccgcctgcacggttggcctattatgctgctgatgttgggcgtctatgtcttcaccgaccggccgcctcctccgccgccgactggtgttttcgcctgcacggctggcctattatgtcgccgttgttgaacgttaacatcttcaccgaccggccgcctcgtatgatgcctactggtgctaccgtcttcacggttggccacgtcgtcgccactgctaataggcgtcatcatcttcaatgcaagctgtctacgtctgctgccgactggtttcttcacctccatggctgcatgattctgccagtgttgattggccttatcatcttcatcgccagtcgtctcgtctgctgttgactggtgtcctcgcctctacggctggtttataccactaccactactgatggacgtcatcgtcttcattgctggccgtcttgtctgacgctgactggcttgttcgcctcgacggccgcgcgtctttgtcatcattgactagcgtcatcctcatcgcctgtttgccttcgccgccgcccatggtgccttgactttcatggctggcctattttgctgccattcaaggacatattcattttcgtcatcattctacttcttccgtcgccgactggttaagccgccgccgactagtgtttttatcttcacaactacgcgtcttcgctaccagtttgcttctgttgccgtcgactcgtgttcacttcatcatggctatgcaaccttttcaccatggtggagcgactttatctttattgtcttctgcaccggcaaaaccaattgccgctacttcgcaagttttgctgcttcaccaaccacgacatctacaagagcctcaacatctcggcatgcctcaccaaatatgatgtcgtgttattttacaacaacaagtggtgttacaatcttcaatatttctacttggacatcttcaacatgcatcttcactctagtgatggctgt

SEQ ID NO: 18054 - DNA, 517 bp, Oryza sativa
  unsure (1)..(517): unsure at all n locations
  Clone ID: PAT_MRT4530_23647C.1
attgggatcctacatgtaacgcgagttccaggatagnctgangnccgtactcgactcgcagacacgcgggcgacgggaggatcttggatgttgccaagcaagctnggctcgggtacagaagtaaatcgcgccatgaggtngccccatatatctgtctaagcatgttntgtcctcgaggcattcgcatnggttgtttaccagatnaaatcgtcgtaacaccagttatttctcgcttaacttactgtgctgcccccaatgaagaaagatagntccactactgtatgagttgtcntcgttagtgaagggtcttatctncaaccctgtaagacgttgccatcgttagtgaacggcgtcttatctacaccccagactttgtacataggtataggtaaccatgtaataaatataagtcatggtatcatctcccttgacagtggaaatcacnttttgtacnatgntaatgatcttaatgacctgaagaccaggtcactgatcccaaaaaaaaaaaaaaaaaaaa

SEQ ID NO: 18055 - DNA, 291 bp, Oryza sativa
  Clone ID: PAT_MRT4530_23648C.1
atggcgtcggaaggtgttgaagggaagatgagttgcctatgcctcacaatgccaccgacgtctattcaccctcgtcaacaatgccgtcttcctcacgctcatcgtcaagctgttcgaggagaacatcggggtgtcattgctaggtgcccgcatgctgtcgtcaagaccgtccataagattttctctttatcacaccagagtcatcggttgtccatccatgatgctttctcctctcgtgttggagtcgtcatgctgtccgtccgtggtaccccccttgtcacgccaagatga

SEQ ID NO: 18056 - DNA, 162 bp, Oryza sativa
  Clone ID: PAT_MRT4530_23649C.1
ctcccgcctcctccgttccaagctcttctttccttcccactgcctgaagtcggaggcggaggcggcctcgccgacggccgccgcctcgccgggaggagaaggggactggggaggcccgggtggagacgaggaggatgcagatggtttcgagcttcgactgag

SEQ ID NO: 18057 - DNA, 1192 bp, Oryza sativa
  Clone ID: PAT_MRT4530_2364C.1
tctcggcgggtacaccatctctttattccgtattccttgtcgagatccagcaaccgttctcgagcgatcgagaaggcgtagagtttggtcttttgtctctacaggatccgacaaggccttatcggctctgggcgtccccagccgaagttcccttaggttcctcggaggccttgtcaagacggcgtaaagggacagtaggataggtttcaacactaggtgtcgtcgtggtaagggatctctgggtaaaacacttagcattattgtgtacctgatatcaacttttgttgaggtagaggtaataggagaatcgttacacctctggtcgaggaccaggtagtagccccaactcgaccacactggtcgaggaccaggtagtagtcgtatcttgaccacttaaagtggaagtagtgggagaaacgctacaccgctggtcgaggaccaggtagtagtcgtaaattgaccactagaagtaaatgtacgagatatcgctacgattaactggttgagaaccagtgagtaggtgtctctcgatcatttggagtcgtggtacgaggaccgctacgctgtcggtcgaagatcagtcgtagctgttcctcaaccatggttcgagagccagcgagcgagtagaattatctctcgaacaccaatggaagtttccggtgcgagagattgctacgtactggttcgagagccagcgagcgagtagaattatctctcgaacaccaatggaagtttccggtgcgagagattgctacgtactggttcgaaaaccagcgaacgagtagaattatctctcgaacaccaatggaagttgcggtgcgagagattgctacgtactggtttgaggaccagggagcgagtagaattatctctcgaacaccaatagaagtttgcggtgcgagagattgctacgtactggttcgagaaccagcgaacgtgtagagttatctctcgaacaccaatggaggttgcggtgcgagagattgctacgtactggttcgagaaccagcgaacgtgtagagttatctctcgaacacatggaggttgcagtgcgagagattgctatgtactggctcgaggaccagtgaacgtgtagagttatctctcgaacaccaatggaggagatggagacagagatttttatacaggttcgggcccctgaattgtcatataataaccctatatcctgttg

SEQ ID NO: 18058 - DNA, 281 bp, Oryza sativa
  unsure (1)..(281): unsure at all n locations
  Clone ID: PAT_MRT4530_23650C.1
atcncttttgttcttagccaccaaggagagaccatccatacacgaggggttctattataccctctctgccacgcgatgtggctgcctcgtcgctctctacgccacctgccaatctcctctaccaatcctaatcctaatccccatccccacaccacaagcaccaccaccaccaccaaaccattcgggcccccaagcccaagcccaagccccagtcaccgccgacgcaatcaccgcgatctcagcctccgccgccgccgcggcaccagacccagcaggcgccc

SEQ ID NO: 18059 - DNA, 1713 bp, Oryza sativa
  Clone ID: PAT_MRT4530_23651C.1
atgcaccggcgatcgggagagcaggtctccggaacctctgccttcgacgtcctgcaccgggagaaggcggcaataagatctaatgatgtgttcatgctagtttacatctgcaatgtcatgatttatttatgtaataaattaaatcattatgtgcttataatttcaacaatccaagaaccttattataggcgctatgattttactatggctggttttgccgatgcactgaggccggataaattcaccggtgtgcactttaagagatggcagatcagggtcactctgtggctgacagatatgaaatgcttctggtcaatttcagaagcatatgcatctcctaatacagactactggaaggaggctgtccgtagtgaaatggattccattatcactaacgggacttgggaggtgacagagctaccctatgggtgtaaacctgtggggtgcaagtgggtgttcaagaagaagcttaggcctgacgcctcacatggtcttctcgttcatcaaatggacgttaagacagcttttcttaatagagagctggatgaggagatatatatggatcaacctgatgggtttgtagttgaaggtcaagaaggcaaagtgtgcaaattgttgaagtctttgtatggtttgaaacaagctcctaagcaatggcatgagaaatttgacaaaacgttgacatctacaggctttgcagtcaatgaggtagataaatgtgtgtactatcgtcatggtgggggtgagggagttattctgtgcttgtatgttgatgacatactgatatttggaacaaaccttgaggtgataaatgaggtcaaatcattcttgtctcaaaattttgatatgaaggatttgggagtagctgatgttatcttaaacattaagctaattagatttgagaatgagattacactcttgcagtcccattatatggagaagatcttgaatcgctttggctacattgatagtaagccttctccaacaccttatgatcctagcttgttgcttcgcaagaacaagagaattgctaggaatgcaccggaatactcccaaatcattggctcgctgatgtacctggctagtgcaactaggcctgatatctcctttgctgtgagcaagttgagccggtttacctctaatccgggagatgatcattggcgtgcgcttgagcgagtaatgcgctatctgaaaggtggtggtgctgtttcgtggagatcttgcaaacagaccattttgacgaggtcaaccatggaagcagagttgacggcactgaatactgctactgttgaggcagaatggctgcgtgatctattaatggatgtgcctattgttgaaaaaccaatgctggctatccttataaactgtgacaatcaaacggtaattgtcaaagcgaatagttctaaggataatatgaaatcatctagacatgtgaaaagactattgaagtctgtcaggaaattgagaaactccggagttataacattggattacatccaaatagctagaaacctggcagatcccttcacgaagggcctatcacgaaatgtgatagacaatgcatcgaaggatatgggtttgagacccatcgaagatgctgtcctgcagagcattcttgaaagaacccacctttgtgagcttgactgttggtcgcagtctatggagattttgggtgaatcttctaggaagcttactaaagacctaggagtatga

SEQ ID NO: 18060 - DNA, 762 bp, Oryza sativa
  Clone ID: PAT_MRT4530_23652C.1
atggggggcggccactcccacctcgtccaccccggccacggcgccctcaggcgcgcggcgtgcggctccgccggggcggcgtgcggcctctgcggcggccgcgtcaggatgggcgagatggcctaccgctgcgccgccgccgagtgcacggccttcttcctccacgacgcctgctaccgctacccggagaggatcaaggccaagggccacttctcggccggccacagcctcgccctcaccgcccgcgccgacgtcgccggcggcgcctgcacggtgtgcgccatgacgctcgacggcttctcccacgtgtacacctgcagcaagtccaggcacctcgcctgcggccgcggcggcttccgcgcgcacccgcgctgcggcaacctcccgccccaagccggcgcgccgtcgcaccagcaccagctcttcctgcgcgcgcccgacggcggcggcggcgttcgcagatgcgtcgagtgcaacgccgtcgccggcggcggcggcggcggcggcaggcaggtggtgcgggcgtggtcgtaccagtgccagacgtgcccggacagcgagctctgcctcgcctgcgcgctcggtcgcgacggcgtcccgccgtgctgctgctgtggccaatgcgtgtgcggcggcggctgcttcgtcggctgcgccgggttggcgggcaacgccatgggacacttcatccatgagctcttccgtggatgcactggacttagtttcaagtcggcgatgggcactgcaagaccaccagcttga

SEQ ID NO: 18061 - DNA, 234 bp, Oryza sativa
  Clone ID: PAT_MRT4530_23653C.1
atgggcttcgcacgcttcagaatggagcgcgtgaggatgatgggcctccctgttgaatttggccagtccctgtcccggcgctgcacatgcgcgacgccaccgccgcagcgccgcgactaccccgtcaactgcccgtcgcagtgcctcctgcctgccatgtgccatcctacgacgccgcctctcctccggcggccagcgcgcctgcgacgccgtctctccagcgaccagcgctag

SEQ ID NO: 18062 - DNA, 3003 bp, Oryza sativa
  Clone ID: PAT_MRT4530_23654C.1
atggctggttttgctgatacactgagaccggataaattcaccggtgtgcactttaagagatggcagctcagggtcactctgtggctgacagctatgaaatgcttctgggtgagtactggcaaacctgaagaaattcttactgctgatcagcagaagcaattcgaggaagccactactctctttgtgggatgcattcttagcgttcttggcgatcgtctggtcgaggtatatatgcatatgaccgacgctaaggagttgtgggatgcactgaataataaattcggtgctattgatgctagcaatgatctgtatatcatggagcagtttcatgactacaagatggctgacaaccattctgtagtcgaacaggcccatgagatacaaaccatgactaagaaactcgaactccttaagtgtgtattactcgacaaatttgtggccagtgccaatgttgtgcacaaggcccaaaataagagtaaggggaaatacaaagctcaacagaccaccaacttcaagaagcagaagaagaacaacaacaatcctaatcaggatgagaggacttgctttgtgtctggccaacctggtcatctggctaggaagtgtccacagcgcaaggggatgaaggcacctgcagggcagacttctaagtctgctaatgtgaccattggcaacactggagatggaagcgggttggtcgcacggggtttcaccgtcctaatggggaatgggtcacatgcttatgtcatggtgttggcacgattttgctatgtgtacttgttgaaaacgaaagacgaggctctagactattttaaaatttataaggcagaaattgaaaatcaacttgacagaaagataaaaaggcttaggtctgatcgtgatggagagtttttctcaaacgagtttgacttattctatgaggaacatggcatcatacatgagaggacgcctccctattctcccgagtctaatgggattgctgaaaagaagaaccgcacactgactgacttggtgaatgccatgttggacaccgcgggactacctaaggcatggtggggggaggcattgttgacctcgaatcatgtgttaaacagagctcctaacagaaataaggacaaaacaccatataagatatggattgggagaaaaccatcactttcttatttgcgcacatgggggtgcttggcgaaagtcaatgtaccaataacgaagaagcgcaaactgggatctaagactgtggactgtgtctttctgggatatgctcatcacaacattgcctatagatttttaatagttaaatctaaggtacctaacatgcatgttggtacaattatggagtctcgtgatgctaccttctttgagagctttttcccaatgaaggatacacatagtagttcgagccaaccctctgaagtaattcccagttcaatcacaccaccagaacaaactgaacatacacatgaacatgtcactgaggaggatgaaagtgaagctcctcgaagtagtaagagacaaaggacggctaagtcctttggtgatgatttcactgtgtacctcgtggatgacactcctaagtcaatttcagaagcatatgcatcttctgatgtagactactggaaggaggctgtccgtagtgaaatggactccattatcgctaacgggacttgggaggtgacagagcgaccctatgggtgtaaacctgtggggtgcaagtgggtgttcaagaagaagcttaggcctaacggtactattgaaaagtacaaggcacgacttgttgctaagggctatactcagaaagaaggcgaaaatttctttcacacttactcacctgttgctagattgaccacaattcgtgtgctactttccctagcaacctcacatggtcttctcgttcatcaaatggacgttaagatagcttttcttaatggagagctagatgaggagatctatatggatcaacctgatgggtttgtagttaaaggctttgcagtcaatgaggcagataaatgtgtgtactatcgccatggtgggggtgagggagttattctgggcttgtatgttgatgacatactgatatttgggacaagccttgaggtgataaatgaggttaaatcattcttgtctcaaaattttgatatgaaggatttgggagtagctgatgttatcttaaacattaagctaattagaggcgagaatgggatcacactcttgcagtcccattatctggagaagatcttgaatcgctttggctacattgatagtaagccttctccaacaccttatgatcctagcttgttgcttcgcaagaacaagagaattgctaggaatcaactagaatactcccaaatcattggctcgctgatgtacctggctagtgcaactaggcctgatatctcctttgctgtgagcaagttgagccggtttacctctaattcgggagatgatcactggcatgcgcttgagcgagtaatgcactatctgaaaggtactatggaattggagcttcactattctgggtatcctgcggtactggagggatatagtgattctaattggatctctgatgtggatgagatcaaagccactagtggatatgtcttcacactaggtggtggtgctgtttcgtggaggtcttgcaaacagacaattttgacgaggtcaaccatggaagcagagctgacggcactggatactgctactgttgaggcagaatggctgcgtgatctattaatggatctgcctattgttgaaaaaccagtgccggctatccttatgaactgtggcaatcaaacggtaattgtcaaagtgaatagttctaaggataatatgaaatcgtctagacatgtgaaaagacgattaaagtctgtcaggaaattgagaaactctggagttataacgttggattacatccaaacagctagaaacctggcagatcccttcacgaaaggactatcacaaaatgtgatagacaatgcatcgaaggagatgggtttgagacccatgtga

SEQ ID NO: 18063 - DNA, 3513 bp, Oryza sativa
  Clone ID: PAT_MRT4530_23655C.1
atgggaagcgccttatacccgctcggcgaaatgcggcggtcgcagcgcgccgacgggctcgccgccgtgctcgccatcggcaccgccaaccctcccaactgcgttacccaggaggagttccccgacttctacttccgcgtcaccaacagcgaccacctcactgccctcaaggacaagttcaagcgtatctgtcaggaaatgggcgtgcagaggcggtacctgcaccacacggaggagatgctgtccgcacacccggagttcgtggaccgcgacgcgccgtcgctcgacgcgcggctggacatcgccgcggacgccgtgccggagctggcggcggaggccgccaagaaggcgatcgccgagtggggccgcccggccgccgacatcacccacctcgtcgtcaccaccaactccggcgcccacgtcccgggtgtcgacttccgcctcgtcccgctcctcggcctccgcccctccgtgcgccgcaccatgctccacctcaacggctgcttcgccggctgcgccgcgctccgcctcgccaaggacctcgccgagaacagccgcggcgcgcgcgtcctcgtcgtcgccgccgagctcaccctcatgtacttcaccgggcccgacgagggctgcttcaggacgctcctcgtccagggcctgttcggcgacggcgcggccgccgtcattgtcggcgccgacgccgacgacgtcgagcgcccgctgttcgagatagtgtcggcggcgcagacgatcatcccggagtcggaccacgccctgaacatgcggttcacggagcgccgcttggacggcgtcctcgggcggcaggtcccggggctcatcggggacaacgtcgagcggtgcctcctggacatgttcggcccacttctcggcggcgacggcggcggcgggtggaacgacctgttctgggcggtgcacccgggctcgtcgacgatcatggaccaggtcgacgcggcgctcggcctcgagcccggcaagctggcggcgagccgccgtgtgctcagcgactacgggaacatgtctggcgctacggtgatcttcgcgctggacgagctgcgccggcagcgcaaggaggcggcggcggcgggtgaatggccggagttgggagtgatgatggcgttcggcccggggatgaccgttgatgcgatgctgttgcacgccacctctcatggtgatggggggcttctcgactttttggatatgtggaacatcaaagctgtcgctaggacgtctccgaagatgcacggtggaaagactctgggaaactactccatcccgctcgccggcgtgcaccagcgatcgggagagcaggtctccggaacctctgcctttgacgtcctgcaccgggagaaggcggcaataaggcactgtgattttactatggctggttttgccgatgcactgaggccggataaattcaccggtgtgcattttaagagatggcagatcagggtcactctgtggctgacagctatgaaatgcttctgggtgagtactggcaaacctgaaggagttcttactgctgaacagcagaagcaattcgaggaagccactactctctttgtgggatgcattgttagcgttcttggcgatcgtctggtcgaggtgtatatgcatatgaccgacgctaaggagttgtgggatgcactgaatactaaattcggtgctactgatgctagcaatgatctgtatatcatggagcagtttcatgactacaaaatggctgacaaccgttctgtagtcgaacaggctcatgagatacaaaccatggataaggaactcgaactccttaagtgtgtcttacccgacaaatttgtggccgggtgcattattgcaaaactacctccatcttggaggagtttcggtactgcactcaaacacaagagacaggaatactccgttgaggggttgattgcgtctcttgatgttgaggagaaagctcgggaaaaagatgccgcgtctaagggcgatggtgggcagtccagtgccaatgttgtgcacaaggcccagaacaagagcaaggggaaatacaaagctcagcagaccaccaacttcaagaagcagaagaagaacaacaacaatcctaatcaggatgagaggacttgctttgtgtgtggccaagttggtcatctggctaggaagtgtccacaacgcaaggggatgaaggcacctgcagggcagacttctaagtctgctaatgtgaccattggcaacactggagatggaagcgggtatggtaatttacctactgtcgcacggggttccaccgtcctaatggggaatgggtcacatgcttctgttcatggtgttggcacggtagatctgaagtttacttcgggaaagatcgtgcagctgaagaacgtgcagcatgtcccttctatcgacaggaatcttgatacacatagtggttcgaaccaaccctctgaaataattcccagttcaatcacaccaccagaacaaactgaacatacacatgaacttgtctctgaggaggatgtcagtgaagctcctcgaaggagtaagagacaaaggacggctaagtcttttggtgatgacttcactgtgtacctcgtggatgacactcctaagtcaatttcagaagcatatgcatctcctgatgcagactactggaaggaggctgtccgtagtgaaatggattccattatcgctaacgggacttgggagtcccattatgtggagaagatcttgaatcgctttggctacattgatagtaagccttctccaacaccttatgatcctagcttgttgcttcgcaagaacaagagaattgctaggaatcaactggaatactcccaaatcattggctcgttgatgtacctggctagtgcaactaggcctgatatctcctttgctgtgagcaagttgagccgatttacttctaatccgggagatgatcactggcgtgcgcttgagcgagtaatgcgctatctgaaaggtactgtggaattggggcttcactatactgggtatcctgcggtactggagggttatagtgattctaactggatctctgatgtggatgagatcaaagccactagtggatatgttttcacactgggtggtggtgctgtttcatggaggtcttgcaaacagacaattttgacgaggtcaaccatggaagcagagctaacggcactggatactgctattgttgaggcagaatggctgcgtgatctattaatggatctgcctgttgttgaaaaaccggtgccggctatccttatgaactgtgacaatcaaacggaaattaagaaactccggagttataacgttggattacatccaaacagcgagaaacctggcagatcccttcacgaagggactatcacgaaatgtgatagacaatgcatcgaaggagatgggtttgagacccatagcattcttgaaggaactcacctttgtgagcttgactgttggtcgcagtctatgaagattttgggtgaatcttctaggaagcttactaaagacctaggagtatga

SEQ ID NO: 18064 - DNA, 1977 bp, Oryza sativa
  Clone ID: PAT_MRT4530_23656C.1
atgcagctgctcgcgctcaccatgtcagctccggcctcctgctcgtcaccacgaccgtgcggccacgacgacaccgtctcccggaatcggccgctctccggcggccaaaggcttatctcgtccggcggacttttcgcgctggggttcttccagcctgatgatagagcgcctaacagatggtaccttgctatttggtacaacaagatctcaaagaccacacccgtctggatagcaaatcgggcgactccaatctctgatccaaacttatcacagttgacagcatcagaagatggcaatttggcattgttcgaccaggccaggtctttgatctgggccacaaatatcactaataacgtcaactccacagttggagttatccttgattcaggcaacttagtgttagctcctgcctccaatacctccaatttcctatggcagagttttgatgaaccgaccaatgtgtggctccctggggccaagcttggacggaacaaaattactggccaaatcacaagatttatctcatggaaaagctctgttgatccatcacctgggtattatacgcttgagattgacccgaatggtggcgaccagttcatccatctatggaacaattctgccatctactgggaaacgggcaaatggattggccaggtaaaaacagtagtatggatggagagcaaaaaagactgggtgcccttcttggcactgccaaaagcacagtgcgccgtgtacttcctttgtggttcttttgccatgtgcactgagaacgccgtcactttctgcagttgtctcaggggtttcagcaagcagtacaacggcgagtggcgatatggcttgtctgaacaattgctcttgtaccgcttattcctacgctggtggttgttctttgtgctaacgaggaaggcaactgttattggggcttcaactgctggagctatccttgtcaccctcattgtgatcattggcatacttctgattctcaggaagaggaatttgagtgaagcgaacaaagtggagggttcgttggtcgtattcaggtataggttcctacagcatgtgacaaaaaacttctctgagaggttgggcaaaggttcttttggtcctgtatttaagggaacgttacctgatgggacactaattgctgtaaagaaacttgatggtgtttctcagggagaaaagcagttccgagctgaagtcagcacaattggcacaattcagcatgtgaatttaatccggttgctgggattttgctcagagaggtccatgaagatgctagtctatgagttcatgccaaatgggtcgttggatcgttacctatttggaagcactccattgactttgagctggaagacaagatatcagattgctcttggaattgccaagggattagcttacttgcatgagaaatgcaggagcctcatcatacactgtgatataaagccagagaatgtactcctaggtgctgatttcatgccaaagatcgcggattttggacttgccaagctcctcggaagggatttcagcagagttttgacaaccatgagaggcactatagggtatcttgccccagaatggataagcggcacagctatcaccacaaaggcagatgttttcagctatgggatgatgcttttcgagatcatatcaggaaacagaaatgcagattggcatcggcaaggtgagcaaggtgcagggacattcttcccagtgctagtggcgatgagactccctgaagggaagattcaagacttgctaggttcagaactaagtgcagatgctaacttagaagaggtggagagggcttgcaaggtggcttgctggtgcatacaagatgatgagaacacaagaccaacgatgggagagattgtccagattctagaaggattggtcgatgtcagctttcctcctgtcctttggtatctacatgttcttgcccagcgctccaacttctccaccgaggaaacgtcacattag

SEQ ID NO: 18065 - DNA, 173 bp, Oryza sativa
  Clone ID: PAT_MRT4530_23657C.1
tttggggtaaattaaagcctgtggggacaacttgcatggcgagccatattcaaaagttggtccaggcacagtggcatcatttttggctatttgggcacattaaaccaaccaatccaacggagaaaaggtcagggtttaccaggagggcggtaggataatcctaaggccagctt

SEQ ID NO: 18066 - DNA, 1227 bp, Oryza sativa
  Clone ID: PAT_MRT4530_23658C.1
atgaaggcacctgcagcgcagacttctaagtctgctaatgtgaccattggcaacactggagatggaagtgggtatggtaatttacctactgtcgcacggggttccaccgtcctaatggggaatgggtcacatgcttctgttcatggtgttggcacggtagttctgaagtttacttcgggaaagatcgtgcagctgaagaacatgcagcatgtcccttctatcgacaggaatcttgttagtggctcccgtctggactactccatcccgctcgccggcgtgcaccggcgatcgggagagcaggtctccggaacctctgacttcgacgtcctgcgccgggagaaggcggcaataagcgctaccgacctggcgaccttgtacggctcggcgctcaccggcgtttacctccccagcccacgggaaggaggcggcgcgcacgtggcagttgcggtgggtgaggctgtgagggcgaagcaggtggcgcacgcgccggcggagctgaacagcccgcggagcagcgcggcgaagcccaagaaccccgacgagatcctcagggacttccacgccctccaccccatcgaggccttctccacctccttcggcggcggcgccgccctcgcctgcgtcgccggccacgcccgcaatggcctctctggctacgagaggatgttctgtgggctggatgacatctactgcgtgttcatggggaggctggacaacctgagcagcctgatccggcagtacgggctgtgcagccgctccaccaacgaggcgctgctcgtcatcgaggcctaccgcaccctccgcgaccgcggcccctaccccgccgaccaggtcgtcaaggatctctccggctccttcgccttcgtcgtcttcgacaacaagtccggcgccgtcttcgccgccctgagtacggatggggaggtgccgttgtattgggggatcgcggcggatgggtcggtggtgatctgcgacgagagggagatcgtgaagggagggtgcggcaagtcgtacgcgccgttcccggtggggtgcatgttccacagcgagggggggctcaagagcttcgagcacccgatgaaccggctgaaggcgatgccgcgggtggacagcgagggcgtcatgtgcggcgccaccttcaaggtcgacaccttcaccaagatcaactccatgccccgcgtcggcagcgccaccaactgggccgccacctgggacgacgctgccgcctga

SEQ ID NO: 18067 - DNA, 349 bp, Oryza sativa
  Clone ID: PAT_MRT4530_23659C.1
tttttgttttttttttttttttttttttttttttttgggtttttttttttttttttttgggggaaaaagcctttggattctcagggcataaaaaaacaaaattatttggtgatcatccccactcggaacaaattttttttgaactaaacccccaagcacatgaaccgggggggtaaccaccctaaaactccccgccttgcacggaccgacgggaggagttcatacttcatggggttgctactggtttgtttgggcccttcttctactaccccatgactggttttgttgggcttattcccgaagaaaagggaaccgactccaatctaatgccatttgaacaccccccatt

SEQ ID NO: 18068 - DNA, 703 bp, Oryza sativa
  Clone ID: PAT_MRT4530_2365C.1
ctaggcctggcatgctcccaccccgacaggctcgccgccacaccgctccagcctccgcgtcagcctcaccgcctccgcagcgcactctcctcgtgccttgctggcctctcgctgccggtcgtgctcctccgtgccacgacaacttcccctcgggagctccaccacaagcctctgtgccatgctctgcatgcgcctcgttggccacccaccgccggccatgcgcctcgtactaagccagtcttcctttgggagccccacacccagcagtcgctgcctgcttctccccatccccgttgtcgtctccaccttcctccaaacattggcaattgcccttcgtcgatgcagcgttaccgcgctgagacattgcatcgctgccgaaattggatatgggagcaccagatctggcaccattaccaccaccttcgcttccgcggccgccctccacagtcgtccatgcatctgccttgaggggcatcagatccgacttgccctttccgtgtctggccgccagggtccggctaccgccgtgcaccacttcatcctcccacgccgaggacgggcctcgtcaggtcttcttgtctctgcagccgccttctcagctggctgctccgccttcccagctggtcgctcgactttccgacggcgaactccgacggaggcgaggtgtcaaggttgggtgggaggtggcggcacgggcggctag

SEQ ID NO: 18069 - DNA, 1968 bp, Oryza sativa
  Clone ID: PAT_MRT4530_23660C.1
atggtggtggtgatggtggagatgatgatggcgatgatgatgattactttgatgattttgatgatggcgacgaagaagaagcttttcaatagagagtttgtggatgctgtgatgcaagagtggtgtaaaacgatgagtaatttgcctgctggtctccgccaagcttatgagatgatggtccgatatttggcgatatttgcaaggcctactcattctaggtccttctcacgagctcttcctggatggctttccagaggtcttgttggaaggtttgagcaagaatgggatttggctgtcgtcaatgctctgactgcatcttgttgcaatgtgatggttcttgggcttctggcaccatgccgctcatatgggagcacatcccgatttgacttccagaatgcaattgagaaacttcccaacaacatttttgagaagagttatcctttgagacagtttgatctacaaaaacgaatcagtgctttcttttacaaagcggcagagcttagcttgttaggggtagttgctggttctattcaaggtggtctctcaaaagccttgtctgcaagaaaggaaaggaggttatcggttaccattccttctgtcagcacaaatgcccttggctatggagccttcctaggactatatgcaaacttgcggtatcaactattgtgtggactggatcagtatatggtcaggcgatttgatgttcttggtgtggcaatcttcttcagcacagcactaagattgacgaatattcagattggtgaatcatcgagacgcacatggcttggggaggaagctgatccacagtactcagatcggctgctgagagcatataaaagaccagtcgaggttgctggagaccaacaagattcaaggtggtttatatcgaaggatgcgattgtatctggccttggtcttctcggcatcaagcaagactactccatcccgctcgccggcgtgcaccggcgatcgggcgagcaggtctccaaaacctctgccttcgacgtcctgcatcgggagaaggcggtaataaggtttttgggaagcgcttcgtgtgactgctccctgttcgtccgcgacggctcgccttcctcttcgctcgcgtgctgcgcgcctttgtcgacgcctgcaaccgcaagtagttcctgccgagcaactggtctttctgccatctcggtctccgaaacctctgccttcgatgtcctgcaccgggagaaggcggcaataaggtttttgggaagcgcttcgcgcgactgctccctgttcgtccgcgacggctcgccttcctctccgctcgcgtgcttcgcgccttcgtcgatgctcgtaaccgcgagtagttcctgccgagcaaccggtctttccgccacctcgatcagggtcactctgtggctgacagctatgaaatgcttctgggtgagtactggcaagcctatcggcgttcttaatgctgatcagcagaaagaattcgatgaggccactactctctttgtgggatgcattcttagcgtgcttagcgatcgtctggtcgaggtgtatatgcatatgaccgacgctaaggagttgtgggatgcactgaatactaaattcggtgctactgatgctagcaatgatctgtatatcatggagcagtttcatgactacaagatggctgacaaccgttctgtagtcaaacaggctcatgagatacaaaccatggctaaggaactcgaactccttaagtgtgtcttacccgataaatttgtggccgggtgcattattgcgaaactacctccatcttggagaggtttcggtactgcactcaaacacaagagacaggaatactccgttgaggggttgatagcgtctcttgatgttgaggagaaagctcgggaaaaagacgtcgcgtctaagggcgatggtgggcagtcgagtgccaatgttgtgtacaaggcccagaacaagagcaaggggaaatacaaagctcaatag

SEQ ID NO: 18070 - DNA, 864 bp, Oryza sativa
  Clone ID: PAT_MRT4530_23661C.1
ctactctgtgatgcgccgtcgctcgtagactacttcatcatgctcgccggcgtgcacctgcgatcgggagagcaggtctccggaacctctgccttcgacgtccttcctctccgctcgcgtgctgcgcacgttcgtcgacacccgcaaccgcgagtagttcgtgctgcgcctcgtcccggccgctcctctccttctccacacgccgccgccctcggcccacaccgtcgcgacctgaggccgcgccgcgccgtgttgccgccaaatcccctcgagggcgccgacaaatccggagccgccgccttccaaatctgcttgtagccctagctcatcatcctcgataaatagccaccaccggcgctctcttttccttttcccgagctctagttgccgccgccacttccacccgtgcgcaatcaacgccgccgccgcctcatcgtttcgccgatgggagccgcgtcgtcgtcgccccatcctcccgaaggcgcgtcgtgcgccgtccatgccgccacacggagctcggtgccgcgccaccacgttcgtctccacctccacattctggcgccgcctttcgccgccgccgacgaacgccgtcacgccgccgtcggtcctcctatcctgagcacaagcatgggtggccaatgaaccaacccaacaaacagcaaagatatgcacatccgccttgacagaagaagcctcaaccttggtaccatctggccccgttcccgggttcaaggccaggggattcatcccacaaagcacgacccttcgtgggttgtgctcggggcacattctcatccggcacccaaggctgacatcctggcctgtcatccccaacctccatctatccccgccggcaaccgccat

SEQ ID NO: 18071 - DNA, 1617 bp, Oryza sativa
  Clone ID: PAT_MRT4530_23662C.1
atgaagaaatactgtgattgctgcaaaagatatgtggaccattccaatggaaagatgaaatgcttccacaggcaaatgagtgctaattttgagcatagcatgatcataccaaacaagttcttggaccaattcggagggaaaatatcaagaacagttgaactagaatcccccaagggcaacgtgtatgtcgtcaaagttagcaagcacatgaataagacagtcctccagtgtggatgggaggcatttgtagatgcccatcagatagaagagaatgactccttattgttccgtcacatcaagaattcccgaagggcctctggtgttcaagaaagaaatgcagatcctatcgatgtttcaagcagcacccatgatgataccgtgcaatcatccgggggtgaaagatttgctagaagtgaaagtggtagtgacagtcagcatagtaaaaccgcgaaattggcagcgacatgttcatctgggggatcagaatgcacaggagaggaggccaaggagagcagcagttctgaacatgagtcatcctatgatctagttgatcctcagatagctccaatgcctggttatgtcttgtcgcgcgggactaatctatctcaagcacatgaggagaaactagatatgcttgtccaggaaattcgacctgaaattcctctatatgtgactaccatgaagcatagcaatgttaactcacaccatgcttcccttgtaattgctaagcattatgcatgtgcgtactttccgcatacgagtcaaaccatcacacttaagtggcatggcaagaacaggaagtggcatcccaaattttacattaggaaagatcaagttgggtacatccttcatgggcgttggatagactttgttcgtcacaaccatgtgaaagagggagatatctgcatctttcacctaaaaaattttaatgggagaaaattcagggcaacagtgcatctactccgtgaaacaattcctcactcctttggtgcactccatattcctaaaaggtttgaatcaaggaatggcagaatgaggctgaaaatgactgatgatagaagagtaagctcaactgaatgtaggagagggacaatggaaccttctacaaccaatgtcaagaaggaagcggacaatgaacaatgcaacaatggtcaaggaaagcgtcaggaacctctcaattttgatgtttctgtggggagttctaagccttacttgacagcagacagagtttctctgactgaagaacagttcatgaaagtggaagagaatgttcactccattcaatctgaaggtcccatttatgtgtcgataatgaacaagagcaatgttggtaccgatgggctctacatcattacccttggcaggcagtttgctataagatacctcccggaaggggagcaaaccttgacgctcctgacgacggggacgggcaaggcatggcaggtcaagatgcgccctcggagcggcgacgcacggatgttcaccctcggctggcgcgatttcgtccgcgacaaccgtctgcaaactgaggacatctgcctcttccagctgacgaagaacagtgagagggggcttgccatgaaagtccacatcattcgtcacaacgagaggagctag

SEQ ID NO: 18072 - DNA, 962 bp, Oryza sativa
  Clone ID: PAT_MRT4530_23663C.1
atgaagagaatgaaagtgagactcagaagcttcctgaatattctacaagtgattcagaagatttctgggaggaggaattgtttcctgaacttattaagcccttgccagatgatgggggtatgcgcttgaaaaatacttttgaagaggaatttgctgaagatacatggtgcaaactgagtaaaaaggttgctttaaatacatcccaaagtgttgtctcacttgcttcgttcaaagactactccatcccgctcgccggcgtgcaccagcgatcgggagagcaggtctccggaacctctgcctttgacgtcctgcaccgggagaaggcggcaataaggcactgtgattttactatggctggttttgccgatgcactgaggccggataaattcaccggtgtgcattttaagagatggcagatcagggtcactctgtggctgacagctatgaaatgcttctgggaatactctgttgaggggttgatagcgtctcttgatgttgaggagaaagctcggaaaaaagatgatgcgtctaagggcgatggtgggcagtctagtgccaatgttgtgcacaaggcccagaacaagagcaaggggaaatacaaagctcagcagaccaccaacttcaagaagcagaagaagaacaacaacaatcctaatcaggatgagatgacttgctttgtgtgtggccaagttggtcatctggctaggaagtgtccacaacgcaaggggatgaaggcacctgcagggcagacttctaagtctgctaatgtgaccattggcaacactggagatggaagcgggtatggtaatttacctactgtcgcacggggttccaccgtcctaatggggaatgggtcacatgcttctgttcatggtgttggcacggtagatctgaagtttacttcgggaaagatcgtgcagctgaagaacgtgcagcatgtcccttctatcgacaggaatctt

SEQ ID NO: 18073 - DNA, 4266 bp, Oryza sativa
  Clone ID: PAT_MRT4530_23664C.1
atgccggagcgaagctgccgcttcccccgcggcgacgccacgccgccgccgccgccggcagcagcatccacatgcgggcgcttgggcgcgggcaccaggacaagcccagctggtggcgcctgtgccggcagcggacgcttcgtgtgcatatcgccgcgcaaggggatgaaggcacctgcagggcagacttctaagtttgctaatgtgaccattggcaacactagagatggaagcgggtatggtaatttacctactgtcgcacggggttccactgtcctaatggggaatgggtcacatgcttctgttcatggtgttggcacggtagatctgaagtttacttcgggaaagatcgtgcagctgaagaacgtgcagcatgtcccttctatcgacaggaatcatgttagtggctcccgtctgactagagacggatttaagttggtttttgagtctaataaagtagtcgtgtgtaaacatggatattttattggtaaaggttatgagtgcggaggcctgttccgcttttccctttctgatttctgcaataagtctgtgaaccatatttgtggcagtgtggataatgaggctaataagcgcaaacttggacctaagactgtggactgtgtctttctgggatatgctcatcacagcattgcctatagatttttaatagttaaatccgaggtacctgacatgcatgttggtacaattatggagtcccttgatgctaccttctttgagagctttttcccaatgaaggatacacatagtggttcgagccaaccctctgaaataattcccagttcaatcacaccaccagaacaaattgaacatacacatgaacatgtctctgaggaggatgtctgtgaagctcctcgaaggagtaagagacaaaggacggctaagtcctttggtgatgatttcactgtgtacctcgtggatgacactcctaagtcaatttcagaagcatatgcatctcctgatgcagactactggaaggaggctgtccgtagtgaaatggattccattatcgctaacgggacttgggaggtgacagagcgaccctatgggtgtgaacctgtggggtgcaagtgggtgttcaagaagaagcttaggcctgacggtactattgaaaagtacaaggctcggcttgttgctaagggctatactcagaaagaaggcgaagatttctttgacacttactcacctgttgctagattgaccacaattcgtgtgctactttccctagcagcttcacatggtcttctcgttcatcaaatggacgttaagacagcttttcttaatggagagctggatgaggagatctatatggatcaacctgatgggtttgtagttgaaggctttgcagtcaatgaggcagataaatgtgtgtactatcgccatggtgggggtgagggagttattctgtgcttgtatgttgacgacatactgatatttgggacaaaccttgaggtgataaatgagtcccattatgtggagaagatcttgaatcgctttggctacattgatagtaagccttctccaacaccttatgatcctagcttgttgcttcgcaagaacaaaagaattgctaggaatcaactggaatactcccaaatcattggctcgctgatgtacctggctagtgcaactaggcctaatatctcctttgctgtgagcaagttgagccggtttacctctaatccgggagatgatcactggcgtgcgcttgagcgaataatgcgctatctgaaaggtactatggaattggggcttcactatattgggtatcctgcggtactggagggttatagtgattctaactggatctctaatgtggatgagatcaaagccactagtggatatatcttcacattgggtggtggtgctgtttcgtggagcattcttggcgatcgtctggtcgaggtgtatatgcatatgaccgacgctaaggagttgtgggatgcactgaatactaaattcggtgctactgatgctagcaatgatctgtatatcatggagcagtttcatgactacaaaatggctgacaaccgttctgtagtcgaacaggctcatgagatacaaaccatggctaaggaactcgaactccttaagtgtgtcttacccgacaaatttgtggccgggtgcattattgcaaaactacctccatcttggaggagtttcggtactgcactcaaacacaagagacaggaatactccgttgaggggttgattgcgtctcttgatgttgaggagaaagctcggaaaaaagatgccgcgtctaagggcgatggtgggcagtccagtgccaatgttgtgcacaaggcccagaacaagagcaaggggaaatacaaagctcagcagaccaccaacttcaagaagcagaagaagaacaacaacaatcctaatcaggatgagaggacttgctttgtgtgtggccaagttggtcatctggttaggaagtgtccacagcgcaaggggatgaaggcacctgcagggcagacttctaagtctgctaatgtgaccattggcaacactagagatggaagcgggtatggtaatttacctactgtcgcacggggttccaccgtcctaatagggaatgggtcacatgcttctgttcatggtgttggcacggtagatctgaagtttacttcgggaaagatcgtgcagctgaagaacatgcagcatgtcccttctatcgacaggaatcttgttagtggctcccgtctgactagagacggatttaagttggtttttgagtctaataaagtagtcgtgtctaaacatgtatattttattggtaaaggttatgagtgcggaggcctgttccgtttttccctttctgatttctgcaataacatgtgtttaattcctaagttttccattgtcaaaggttctaagtgccatagttgtgtgcaatcgaagcaacctcgcaagcctcacaaggctgccgaggagataaacttggcaccactagaactcctacattcagatctttgtgaaatgaatggggtgttgacgaaggaagttgaaaatcaacttgacagaaagataaaaaggcttaggtctgatcgtggtggagagtttttctcgaacgagtttgacttattctgtgagaaacatggcatcatacatgagaggacgcctccctattctcccgagtctaatgggattggtgaaaggaagaaccgcacactgactgacttggtgaatgccatgttggacaccgcgggactgcctaaggcatgtgaagctcctcgaaggagtaagagacaaaggacagctaagtcttttggtgatgatttcattgtgtacctcgtggatgacactcctaagtcaatttcagaagcatatgcatctcctgatgcagactactggaaggaggctgtccgtagtgaaatggattccattatcgctaacgggacttgggaggtgacagagcgaccctatgggtgtaaacctgtggggtgcaagtgggtgttcaagaagaagcttaggcctgacgcctcacatggtcttctcgttcatcaaatggacgttaagacagcttttcttaatggagagctggatgaggagatctatatggatcagcctgatgggtttgtagttgaaggtcaagaaggcaaggcttcgcagtcaatgaggcagataaatgtgtgtactattgccatggtggagtcccattatgtggagaagatcttgaatcgctttggctacattgatagtaagccttctccaacaccttatgatcctagcttgttgcttcgcaagaacaagagaattgctaggaatcaactagaatactcccaaatcgttggctcgttgatgtacctggctagtgcaactaggcctgatatctcctttgctgtgagcaagttgagccgatttacctctaatccgggagataatcactggtgtgcgcttgagcgagtaatgcgctatctgaaaggtactgtggaattggggcttcactatactgggtatcctgcggtactggagggttatagtgattctaactggatctctgatgtggatgagataaaagccactagtggatatgtcttcacactgggtggtggtgctgtttcatggaggtcttgcaaacagaccattttgacgaggtcaaccatggaagcagagctgacggcactggatactgctactattgaggtctccggaacctctgccttcgacatcctgcaccggctcgtcttcctctccgctcgcgtgcttcgcgacttcgtcgacgctcgcaaccgcgagtag

SEQ ID NO: 18074 - DNA, 3249 bp, Oryza sativa
  Clone ID: PAT_MRT4530_23665C.1
atggctggttttgccgatgcactgaggccggataaattcaccggtgtgcactttaagagatgcagaagcaattcgaggaagccactctttgtgggatgcattcttagcgttcttgacgatcgtctggtcgaggtgtatatgcatatgaccgacgctaaggagttgtgggatgcactgaatactaaattcggtgctactgatgctagcaatgatctgtatatcatggagcagtttcatgactacaagatggctgacaaccgttctgtagttgaacaggctcatgagatacaaaccatggctaaggaacttgaactccttaagtgtgtcttacccgacaaatttgtggctgggtgcattattgcgaaactacctccatcatggagaagtttcgcgtctcttgatgttgaggagaaagctcgggaaaaagacgccgcgtctaagggcgatggtgggcagtctagtgccaatgttgtgcataaggcccagaacaagagcaaggggaaatacaaagctcaacagaccaccaacttcaagaagcagaagaagaacaacaatcctaaccaggatgagaggacttgctttgtgtgtgggcaacctggtcatctggctaggaagtgtccacagtgcaaggggatgaaggcacctgcagggcagacttctaagtctgctaatgtgaccattggcaacactggagatgggagcgggtatggtaatttacctactgttttttcagttaatcagtctactaattggtgggttgatactggggccaatgtcgcacggggttccaccgtcctaatggggaatgggtcacatgcttctgttcatggtgttggcacggtagatctgaagtttacttcgggaaagatcgtgcagctgaagaacgtgcagcatgtcccttctatcgacaggaatcttgttagtggctcccgtctaactagagacaaatttaagttggtttttgagtctaataaagtagtcgtgtctaaacatggatattttaatggtaaaggttatgagtgtggaggcctgttccgcttttccctttctgatttctgcaataagtctgtgaaccatatttgtggcagtgtggatgatgaggctaatgtttggcactcacgtttatgtcatattaattttggcttgatgtctcggctttccagcatgtgtttaattcctaagttttccattgtcaaaggttctaagtgccataggtgtgtgcaatcgaagcaacctcgcaagcctcacaaggctgccgaggagagaaacttggcaccaatagaactcctacattcagatctttgtgaaatgaatggggtgttgacgaagggtgaaaaacgatatttcatgacgttgattgatgatgctactagattttgctatgtgtacttgttgaaaacgaaagacgaggctctagactattttaaaatttataaggcagaagttgaaaatcaacttgacagaaagataaaaaggcttaggtctgatcgtggtggagagtttttctcgaatgagtttgacttattttgtgaggaacatggcatcatacatgagaggacgcctccctattctcccgagtctaatgggattgctgaaaagaagaaccgcacactgactgacttggtgaatgccatgttggacaccgcgggactacctaaggcatggtggagggaggcattgttgacctcaaatcatgtgttaaacagagttcctaacagaaataaggacaaaacaccatatgagatatggattgggagaaaaccatcactttcttatttgcgtacatgggggtgcttggcgaaagtcaatgtactaataacgaagaagtgcaaacttggacctaagattgtggactgtgtctttctgggatatgctcatcatagcattgcctatagatttttaatagttaaatccgaggtaccggacatgcatgttggtacaattatggagtctcgtgatgctaccttctttgagagctttttcccaatgaaggatacacatagtggttcgaggcaaccctctgaaataattcccagttcaatcacaccaccagaacaaactgaacatacacatgaacatgtctctgaggaggatgtcagtgaagctcctcgaaggagtaagagacaaaggacggctaagtcatttggtgatgatttcactgtgtacctcgtggatgacactcctaagtcaatttcagaagcatatgcatctcctgatgcagactactcgaaggaggctgtccatagtgaaatggattccattatcgctaacgggacttgggaggtgacagagcgaccctataggtgtaaacctgtggggtgcaagtgggtgttcaagaagaagcttaggcttgacggtactattgaaaagtataaggctcggcttgttgctaagggctatactcaaaaagaaggcgaagatttctttgacacttactcacctgttgctagattgaccacaattcgtgtgctactttccctagcagcctcacatggtcttctcgttcatcaaatggacttctcgttcatcaaatggacgttaagacagcttttcttaatggagagctggatgaggagatctatatggatcaatctgatgggctttgcagtcaatgaggcagataaatgtgtgtactatcgccatggtgggggtgagggagttattttgtgcttgtatgttgacgacatactgatatttggaacaaaccttgaggtgataaatgaggttaaatcattcttgtctcaaaattttgatatgaaggatttgggagtagctgatgttatcttaaacattaagctaattagagaacttgggaggaatgtgctggtccacgtgcgcccacgtcgatcggctgggagctccccacagaacacgttgttcgcgagtgcgagaccttgcaacgacgtcatgttgaagaaactcggcgggatctctccggtgaggctgttctgcgacaaggctaacatgcggagcgccgggaggtgtgacaagccgtcggggatggaacttcccagaaggttctggtcgaactcgagctgcacgatcttcgtgaggttcgccagcgatggcgggaagtggccggagagcgagttgtggctgagctggagcaccgtgagattcggcaacgcgtcaagccaccgtggaatgccgccgacgatcgaggttgttgtttttgaggtacgcgacgtcgagggcggtgcaattgtggagcgcgtcaggtatctcgccggcgaacgcgttgtcgcatag

SEQ ID NO: 18075 - DNA, 2169 bp, Oryza sativa
  Clone ID: PAT_MRT4530_23666C.1
atgaaatgcttatgggtgagtactggcaaacctgaaggaattcttactgctggtcagcagaagcaattcgaggaagccactactctctttgtgggatacattcttagcgttcttggcgatcgtctggtcgaggtgtatatgcacatgaccgacgctaaggagttgtgggatgcactacatactaaattcggtgctattgatgctagcaatgatctgtatatcatggagcagtttcatgactacaggatggctgacaaccgttctgtagtcgaacaggctcatgagacacaaaccatggctaagaaactcgaactccttaagtgtgtcttacccgacaaatttgtggccgagtgcatttgtgtcctgaagtttacttcgggaaagatcgtgcagctgaagaacgtgcagcacgtcccttctatcaataggaatcttgttaggggctcccgtctgactagagatggatttaagttggtttttgagtctaataaagtagtcgtgtttaaacatagaaattttattggtaaaggttatgagtgcggagatctttgtgaaatgaatggggtgttgacgaatggtggaaaacgatatttcatgacgttgattgatgatgctactagattttgctatgtgtacttgttgaaaacgaaagacgaggctctagactattttaaaatttataaggcagaagttgaaaatcaacttgacagaaagataaaaggactcagatttttaatagttaaatctgaggtaactgacatgcatgttggtacaattatggagtctcgtgatgctaacttctttgagagctttttcccaatgaagaatacacatagtagttctagccaaccttctgaaataattcccagttcaatcacaccaccagaacaaactgaacatacacatgaacatgtcactaaggaggatgacagtgaagctcctcgaaggagtaagagacaaaggacggctaagtcttttggtgatgatttcactgtgtacctcatggatgacactcctaagtcaatttcagaagcatatgcatcttctgatgcagactactggaaggaggctatccgtagtgaaatggattccattatcgctaacgggacttgggaggtgagagagcgaccatataggtgtaaacctgtggggtgcaagtgggtgttcaagaagaagcttaggcctgatgcctcacatggtcttcttgttcatcaaatggacgttaagacagcttttcttaatggagagttggatgaggagatctatatggatcaacctgatgggtttgtagttgaaggtcaagaaggcaaagtgtgcaaattgttgaagtctttgtatggtctgaaacaagctcctaagcaatggcatgagaaatttaacaaaacattgacatctgcaggctttgcagtcaatgaggcagataaatgtgtgtactatcgccatggtgggggtgagggagttattctatgcttgtatgttgatgacatactgatatttggtacaaaccttggggtgataaatgaggttaaatcattcttgtctcaaaattttgatatgaaggatttgggagtagctgatgttatcttaaacattaagctaattagaggtgagaatgggattacactcttgcaatcccattatgtggagaagatcttgaatcgctttggctacattgatagtaagccttctccaacaccttatgatcctagcttgttgcttcgcaagaacaagagaattgctagaaatcaactggaatattcccaaatcattggctcgctgatgtacctggctagtgcaactaggcctgatatctcctttgctgtgagcaagttgagccggtttacctctaatccgggagatgatcactggcgtgcgcttgagcgagtaatacgctatctgaaaggtactatggaattggggcttcactatactgggtatcctgcggtactggagggttatagtgattctaactggatctctgatgtggatgagattaaagccactggtggatatgtcttcacactgggtggtggtgctgtttcgtggaggtcttgcaaacagaccattttgacgaggtcaaccatggaagcagagttgacggcactggatactgctactgttgaggcagaatggctgcttgatctattaatggatctgcctttttgttga

SEQ ID NO: 18076 - DNA, 281 bp, Oryza sativa
  Clone ID: PAT_MRT4530_23667C.1
taatatgctgatcagcatttttcctatcatatataaccggctgatgcaatcaaatttccgtaatacctacttttattacgagtgtattatactgtgtattctaacacataaaaccgtataaaaaagaggactagaatcagatagtagaaaagggagaggctgaaattggaaatatgcatactacacaaactgctcttctattctaaacaaaggcacttaggattcccttggggatgcagtgtggtggccaatgcacgtcctaggtaagtatatggccattt

SEQ ID NO: 18077 - DNA, 129 bp, Oryza sativa
  Clone ID: PAT_MRT4530_23668C.1
atggggacgccgcagcccggcggctcagttcggtcggcttatcaactgggccgcctggtccgtgtcggggacggcgcgatgggcttcctcaacggcccaagtcacccagatgggcctatgaaaatttag

SEQ ID NO: 18078 - DNA, 421 bp, Oryza sativa
  Clone ID: PAT_MRT4530_23669C.1
gtcgcatcaatgaagcttgagccatagtacccatccaccgtctcaattttgtgcggattaaccggcctacggggccttccaactcctcttggcggatgcggctctacaaccgcacaccgatggtgtgctatgttccagtgatttgaaaggtcttttgctctgaagagcacaagcatgctgttgtactatgttcaaccggtcctcttatcacctcttttgttgatctggtttaaacatgatatatagggcttgaaatagctacctcggtgtacacaaacaggatccatatattgaagcatatgcgttccacttataaagtcgtgctgcttgcaactctaacttgaactagttctatgacgaagttgtatgcttgcgaaagattgaacccgataaagatgtacgacaatctgcagataatgca

SEQ ID NO: 18079 - DNA, 485 bp, Oryza sativa
  Clone ID: PAT_MRT4530_2366C.1
cttgaaccactcaacctgaaaaagggtaacccagaagaaaagatgagagctatcaatgacaaaaggcaataaaaccagcagatttgacggcgtgaaagacatgcttaagaggtgggagattacaggtcggcatctagataaagtgcgaaatgacctccacctcctaatgccaaatagtcggtggagcacactgtgaaatagttattagcaccagtcggtcgatatatactaggattgctgtgtaaattagtgaaaacaaagcagctattgctcccctgatatttctttgcactggttggctgcaatggagcctcaactaaaccgccaaaaactgcaccttctttatccccaactacaaccatagaattttattggaataaagtgctatcacagtatcacccacgtaagaatattccatgcctccatgtgctgtatagcaagacccagttcattcctttggcaagaacaggaaaagatgcataaaa

SEQ ID NO: 18080 - DNA, 822 bp, Oryza sativa
  Clone ID: PAT_MRT4530_23670C.1
atgggaaaagtcactgttcatcggccgccaagtgttcgacgtggttcccctagcgctagcccctcctctgccacgccgcctcgcgcaccgcgcgccgcgcgccgctccgcctcctctctgtcgccgcccgtcgcgtcgccgctgtcgccgtcgccgtcgacgtcccatcgccgcctcgcgccccgagccgccgcgccgtcaccatcgtcgcctgccgccgcgcatcgtcgcccgcgcctcgagcccgcgcgtcgcccgtcgccaccaccgtgcgccaagccccgcgctacctcgcgccccgagccgcccgtcccatcgccgctcgcccgtcgtctcgccctgtcgccgtcgcgccgcgctaccgtcgcgtcccgccccgagccgcgcgccaccgctgtcgccgccgccgtcaacgtcccgtcgccgcgcgtcccatcgccacctcgcgccccgcgccgccgcgccgctgtcgcgtcgcccctccccttccctttctttccccctcctctcccctataaaactccacccctccccatttctccccactccatctccccatcctctccctcttccccttctccacgcgccgccgttctcgtgccgttgcgccgccaccttcgaagtcgccgcgccgccgttcccgtgccgccgcgctgtcattcccgtgacgccgcgccgtcgttcccgcgccgccgttcccgtgccgccgtgtcgccgctcccacgccgtcgtgcgccaccgtcgccgccgccgtcgtcgccgctgccgccgccggtgagccgccctcttttccccttgcgtccaccgccgccgctcgggtga

SEQ ID NO: 18081 - DNA, 1101 bp, Oryza sativa
  Clone ID: PAT_MRT4530_23671C.1
atgagcgccgccgccgccgccgcagccgcctcggctgccaatgtcgccgtcatcgggggcggaagtaagcagacgcagcccattccaatccctcatcctctctctctgatccgattgctcccgtttgaactgacccgtacctgcgatcccctttttggtttgtccaccgatgcagtatcgggcgctgtatgcgcgtcgctgctggccgcgcgcggcgtggcggtgacgctcttcgactccggccgcggggccggtggccgcatggcgcagcggagggaggtgatggaggacggcacggagctgcgattcgaccacggcgcgccatacttcaccgtgagcaacgacgaggttgctcgggtcgtgagcgggtgggaggcgcgggggctcgtcgccgagtggaaggccatgttcgcgtgcttcgatcgggaggccggcaaattcactgatttcgagaaggagggaacaattaagaagtatgtgggagtgccaggcatgaactcaatatgcaaatcactttgtctagaggatggtgtggtggccaaatttggtgtcaccattggcaggatggactggattcaagataggagttcatggttactggctagtttggatgggagagatcttggccattttgattatgttgtagcaaccgataagaatatagcatcaccaagattttctgggctaactggaagaccaccgcctcttgatttgtcattgcttccacaattgtcaatgatgattcaggatatccctgttcgcccctgttttgctcttatgttagcattctcagagcctttgactaaggtacctgttcaaggtttctcattcaataattctgactacctaagctgggccttttgtgatagtagcaagccaggacgtgctcatgtaccgcttaacagtcagtcttgggtattgcattcgacagctgagtatgcttcaaagaaacagttaatcaaaccccaactgagagttgagggccatattgtttaccgaccaattagtttatttgctttattatctattccatgtcatatagaaaagccaggttccactggaagtgctgtttctctgttggcctactatgccttggactaa

SEQ ID NO: 18082 - DNA, 288 bp, Oryza sativa
  Clone ID: PAT_MRT4530_23672C.1
atggctggtggtggtggatccagtgatggggagccactagagatgaggatgacgatggctggtcctgatcttttttttgatgttgtcatcgccgtcgaggtcgaggaggacgccccgagaagcgctgatcgccgtgctcatcgccgctggccgctcccatctatcaaggggccgcctcagccggatctggccgtcatgcggtggtggaggaggaagagccgaggcgtgcgatcgccacagcaatccccaccgctcctaaggccgacgtggcctcttcagtcacacaat

SEQ ID NO: 18083 - DNA, 430 bp, Oryza sativa
  Clone ID: PAT_MRT4530_23673C.1
ccgggcgggacataaccattcaggtccgttactactacaacatcatgcgcatccataaatgcgccccgtattgtatcgtcacagtttgggttggtcctcttgtgtaatggctctctagcccagcagctataaggccagagcactagccgacgccagactgctcgtcgtggaagtccgagacaatgcaggttctataggttgcaagcatttgagccagttcagagggtgagggctctggctgccactactgagttcgtctatgtctctaaagaacaatttcaatgtaccggagtatctgttgcccatccagctcttgaacctagaggtcgtgtactagcccgttacactaatggtgcatcgtctaatatatatcctcgaaggcatatcgtatatatgggccgcctttcccaaggtggcctgagtcctaccc

SEQ ID NO: 18084 - DNA, 132 bp, Oryza sativa
  Clone ID: PAT_MRT4530_23674C.1
atgcgaagttctggaactgaagccccatcttcaagcgccgcaacccagtcgaagtcagctaaaggttcaaccctgacggagcggaagaagtcaatcaagaagagaagaccgcccaacctatcttcttgctag

SEQ ID NO: 18085 - DNA, 234 bp, Oryza sativa
  Clone ID: PAT_MRT4530_23675C.1
atgacgcggttcggagatgatcaacctgtcattgggccctaccgccctggccggtcagaccgacatagggtggccggtcagaccggcctaggcttggttagaccgccaccagctcggtctgaccgacctcggctctggcggctctgtatcggccacccaaagcgcaaccttccggccactagggggccggtcattgcccctcttaatagtacggcgaagctaaaaataaactag

SEQ ID NO: 18086 - DNA, 438 bp, Oryza sativa
  Clone ID: PAT_MRT4530_23676C.1
atggaggacgctgatgttggcgaggcgaggccggagaacgtgacaagcgaggcggtgcagccgtggtgcgcgacgaggcgccgcagcagctcggccatcggtatgacgtggccagcgaaggggctggcgatgaggatgacgtgcgatggcgatgggcgagccgtcgcctgcggccgtgccttgccccgccgccacctgcacccagcccgccgtgcgccgcccccgtcagtcccatgcatcgccaccgcctgcaccagcccgccgtgcaccgccgccggcagccctgtgcccctccgccacctgcgcccgtgctgtgcgcttccgccacctgcgcccggcccgccgtgcgccgccgctggccgtgccgtgcgcccgatgttcctgacggcgtgtgctactgcctgctccaaccgtggtactacgccactgctcctctag

SEQ ID NO: 18087 - DNA, 526 bp, Oryza sativa
  Clone ID: PAT_MRT4530_23677C.1
tctgtccgggttaggcgactcggcggcggcgggcgctgcttccggttccggcggccgttccggccggctccggcggcctttccctcctggtcttcctcgctcgtgctcccaagatgtctaggttgttgagcctagacacccatccccgccatcgtcgctttcgttcgtctccagatcctcctcttctcccttcccccccagatctgcctgcttccctagcctctcccacccttgagttcttcccccccactagatctgcacagtcacctccctcctctttgccttccagctcttcggctgtaccctctgtggcattctctctgggggagctggtgacagatcgagcagctgtcaacggtgcgttcgtcactcgcgctgcccaagatcttggcccgttccctcaatgcctcggtgcgccgaaagctctctctcacagttccaagcgtctttactcccaggtggttggcggcgtcgtctcaatctccagctgcttgtcttaatgccttcatccctcgcagcccttctc

SEQ ID NO: 18088 - DNA, 1306 bp, Oryza sativa
  Clone ID: PAT_MRT4530_23678C.1
ggctggttatatcatggaaattttaaaaagggaccaaaaggatagcttaaaaacagagctgaagggaacgtaatgttttcacgtggatacaatttcactgccctaataaccaaagcgaaaagaaatcacttatcgacaataacaatgtcctccctccgttttacaatataagtcattctagcatttttcatattcatattgatgttaatatatctagacatatatatctatctaaattcattaacatcaatatgaatggggaaaatgctaaaatgacttccattgggaaacggaggaagtatcttatactacacacattgtacacaacaatcgctagagatcactgatatcatcagctgacaggatcacgttgcggtacacgattgtagagcgggagctcgaagaggaagcccatcttgaaccatccaggcagggctccatacacagctggtggtagtgggataagaggacttgtagtgttcttgtacgtgcggtattcttcgttctgtccaaagcgcttatcagcagaagcctccagaagtgggattccactaacgaagagaagcaagagcgtcaggaatacaggtccgaggatcacgagccattcagctcctgagagaactggagtagatgctacaaatattccccaccaaaggaatatctcgccaaagtaatttggatggcgagtataactccaaagacccacattacaccaccttccacgattgctcggagaattcttgaacgtaagcttctgctgatcagctattgcttccatacctgccccgatcagccacatgatccaaccaataatatcacgggcttcaattgagggatcgctgtcacttgcgttcacaattgtaacaggcaagctgacagtccatacccaaacagcctggaaaatccagaaaactgctagttttcccaagttatcgcgcatttcatcaaaccgtttgtcctctccccattgaagaatcctcattaataagaatagtcctaagcgaagaccccaaatcacaacgagcacagtcaatacaacctgacggaaatgccatgctcccttcaaagctagcgtgaggattgcaagtatgatgaaattcgtacttcctgcgaaatcagtgactttatcgaaccgcaggagcgcggtgatgatgaagaacaccagctgatatcccacagtgacgatggccgtgagcgccaggaagtgggagtccagcacggttcccatcgcggcctcctccgtttatcctcctcctctcacctgtctctgctcctgctgctggtgctggtgccaaactgccaatcg

SEQ ID NO: 18089 - DNA, 210 bp, Oryza sativa
  Clone ID: PAT_MRT4530_23679C.1
ctgtataacggacgagtgcagattactagggcgggctgaaatgggacaacatggtaccaatataacgttcccgggctcagtacacacgaagcccaataccgtatgggcaagaagagcttatataaaggtttgccaacatagccaacatgcttacccttggttctgcccaaacatgagggttattgaaacccccgcggtgggccatgcatt

SEQ ID NO: 18090 - DNA, 580 bp, Oryza sativa
  Clone ID: PAT_MRT4530_2367C.1
cgtgcaaatccgttcgtctgacttgggtataggggcgaaagactaatcgaaccatctagtagctggttccctccgagctggtcctgcggcgggaacggagcatcacagcgccatttcagctagacagagatacagagagcatagcgtggtaacgggtaactatctctgttacctctgttccatattacatgtcgtttttagttatattctaagttgaacttgtatagttttgatcgagttacatataaaagtaaatactactccactataagagcaggtacaatagcaaattataagctagctatacacatattttaagaagataaaataggggagagaaaagcagtcggctacatatttgtagccagctatagtatggactctgagacacattgtgtgtgtatgatagatgagaccagatttaatagggtagtatgtaactgttgtatgaattagctattaaattaactatagatgatttaaagctattagttggctatactattaaaaaaaaaaaaaaaaaaaaaaaaaaaaaaaaaaaaaaaggggggagcctgcagcccgggggatccactagttc

SEQ ID NO: 18091 - DNA, 2556 bp, Oryza sativa
  Clone ID: PAT_MRT4530_23680C.1
atgaaggcacctgcagggcagacctctaagtctgctaatgtgaccattggcaacactggagatggaagcgggtatggtaatttacctactgtcgcacggggttccaccgtcctaatggggaatgggtcacatgcttatattcatggtgttggcacggtagatctgaagtttacttcgggaaagatcgtgcagctgaagaacgtgcagcatgtcccttctatcgacaggaatcttgttagtggctcccgcctgactagagacggatttaagttggtttttgagtctaataaagtagtcgtgtctaaacatagatattttattggtaaaggttatgagtccggaggcctgttccgcttttccctttctgatttctgcaataagcgggccccaccggcagcggctcaagggcgccggtccaccgtggaccgagaccaccgaggcggtccaccgtcagtccacgggaaccgacggcccggatcggcccaaagccgatcggacggccacgaggcggcgcggctggggcacgggcacggcatgaagccggctcggccgagacatggcgcggcggcggcaagggggaggcggcaagggggaggcaaggggctgcagcagccggcgacgtggaacggcggcgggcggccggaggacagcggcgcgcacggggacggcgacgcaccccaagaggcggcgagctcaccggcgaccgaggaaggaggagctccggcggatttccggcgaagaggggcggcggccgaggtcctcctcgtccttgcggagctgagggaggcaacggcgcgagtcgacgtcgaccgaagcggcggcgcgacgcggctggaggcgagcgaccctatgggtgtaaacctgtgggagtgcaagtgggagttcaaaaagaagctgaggcctgatggtaccattgaaaagtacaaggctcggcttgttgctaagggctatactcagaaagaagcctcacatggtcttcatattcatcaaatggacgttaagacaacttttcttaatggagagttggatgaggagatctatatggatcagcctgatgggtttgtagttgatggtcaagaaggcaaggtgtgcaaattgttgaaatctttgtatggtctgaaacaagctcctaagcaatgtcatgagaaatttaacaaaacattgacatctgcaggctttgcagtcaatgaggcagataaatatgtgtactatcgccatggtgggggtgagggagttattttgtgcttggatgttgatgacatactgatatttgggacaaaccttggggtgataaatgaggttaaatcatttttgtctcaaaattttgatatgaaggatttgggagtagctgatgttaccttaaacattaagctaattagaggtgagaatgggattacactcttgcaatcccattatgtcgagaagatcttgaatcgctttggctacattgatagtaagccttctccaacaccttatgatcctagcttgttgcttcgaaagaacaagagaattgctaggaatcaattggaatattcccaaatcattggctcgctgatgtacctggctagtgcaactaggcctgatatctcctttgctgtgagcaagctgagccggtttacctctaatccgggagatgatcaccggcgtgcgcttgagcgagtaatgtgctatctgaaaggtactatggaattgaggcttcactatactgggtatcctacagtcctggagggttatagtgattctaactggatctctgatgtggatgagatcaaagccactagtggatatatcttcacactgggcggtggtgctgtttcgtggaggtctcgcaaacagaccattttgataaggtcaaccatggaagcagagctgacgacactagatactgctactgttgagtcagaatggctgcgtgatctattaatggatctgcctattgttgaaaaaccggtgccggctatccttatgaactgtgacaatcaaacgggcaagcggcgcacgtgcacgacgtacgcgtcgattgactactccatcccgctcgccggcgtgcaccggcgatcgggagagcaggtctccggaacctctgccttcgacgtcctgcaccgggagaagggggcaataaggtttttgggaagcgcttcgcgcgactgctccctgttcgtccacgacggctcgccttcctctccgctcgcgtgctgcgcgccttcgtcgacgcccgcaaccgcgagtagttcctgccgagcaaccggtctttccgccagctcggcaaccgtgcctcgctgccgccgccgcgacaacggcttcaaccgccggtggatgagattgagggccggtctcgtagacgaggatgccgtcgatgttcccgtcgacgaatgccggattctagtaggcaatggcgcgctccgcagcctcgccgtcaattgcagcctcctcgatgactccgccgtgccggccgtcgtgaagagaagccttctcgagctctcgctgctgaagtgctcgtccttctcctggtacctctttgtggcagttggtgagatcgagatgcaaaattttaag

SEQ ID NO: 18092 - DNA, 997 bp, Oryza sativa
  Clone ID: PAT_MRT4530_23681C.1
cccacgcgtccgctcccctctcctttcctcttcttccccaccggcgagtcggcggcgaccgatccctccccgagccgccgccgccgccgcgatgtcgtcgccgggagagagcgggccttcggcttcggcaaaggacacggatgccgcgcagagggcgcaggagcaggagcccgggaagcaggggggcgcgacgagggagcggcggatggagtcgctggggtggctgacggagtcggcggtgatgccgaagaagcacaaggccatcgagggggtcggcgccgcgtccatcctcgacctcaaggcgcagctctaccgcacccaggaggaggcccgcaagcccaccgcccacgacgccgccgcggcggctgctgcctcgggcgagttccgccgggccaagaagcgcgccgctcctggtgaccccctcggcgcgaagaattccggcgtcgatgcccgcgcccacaaagataagttggagctaaaagctgtgaaggatggttcagtaagttatgctgccttagaaaagaaggcagaattgtatgaaaaattatcaagaggcgagatacctgatgaagaagacaaggaaaaatattgtgttgactttttccaaaagagtttcgatcatgtctatgagcctcggcaaccagagagccagagtgttattgacagggcagaaccagaaaatgacaatgatgattctatgtcaagtgccaaaccagtaggccttggtcgaactggcactactattgacagagatgagcacaagcgctttgtaaggaccgtttgtaaatctttacaagctgtgttcatcggcacgatggaggttcatgaggaagtaagtgaggcaaggcagaaggcttcaacaatgaaatcccgacgacaagagcaggaggctgctcgtagagagaaactcaagcaggcttatttgaagaaacgcctggagaagttacttgctgagaaacgggccacttcagcaaccgacgaccaaccagctagctag

SEQ ID NO: 18093 - DNA, 2427 bp, Oryza sativa
  Clone ID: PAT_MRT4530_23682C.1
atggctaaggaactcgaactccttaagtgtgtcttacccgacaaatgtgtggccgagtgcattattgcgaaactacctccatcttggaggggtttcggtactgcactcaaacacaagagacaggaatactccattgaggagttgatagcgtctcttgatgttgacgaaaaagctcgggaaaaggacaccatgtctaagggcgatgttaatcagtctactaattggtgggttgatactggggctaatgtcgcacggggttccaccatcctaatggggaatgggtcacatgcttctgttcatggtgttggcacagtagatctgaagtttacttcgggaaagatcgtgcagcatgtcccttctatcaacaagaatcttgttagtggctcccgtctgactagagacggatttaagttggtttttgagtctaataaaattttgctatgtgtacttgttgaaaagaaagacgaggctctaaactattttaaaatttataaggcagaaattgaaaatcaacttgacagaaagataaaaagacttaggtctgatcgtggtggagagtttttctcaaacgagtttgacttattctgtgaggaacatggcatcatacatgagaggacgcctccctattctcccgagtctaatgggattgctgaaaggaagaaccgcacactgactgacttggtgaatgccatgttggacacgcgggactacctaaggcatggtgggggagaacaatctgaacatacacatgaacatgtcactgaggaggatgacagtgaagctcctcgaaggagtaagagacaaaggacggctaagtcttttggtgatgatttcactgtgtacctcgtggatgacactcctaagtcaatttcagaagcatatgcatctcctgatgcagactactggaaggaggctgtccgtagtgaaatggattccattatcgctaacgggacttgggaggtgacagagcgaccctatgagtgtaaacctatggggtgcaagtgggtgttcaagaagaagcttaggcctgacgcctcacatggtcttctcgttcatcaaatggacgttaagacaacttttcttaatggagagctggatgaggagacctatatggatcaacctaatgggtttgtagttgaaggtcaagaaggcaaggtgtgcaaattgttgaagtctttgtatggtctgaaacaagctcctaagcaatggcatgagaaatttgacaaaacattgacatctgcaggcttcgcagtcaatgaggcagataaatgtgtgtactattgtcatggtgggggtaaggaagttattctgtgtttgtatgttgatgacatactgatatttgggacaaaccttgaggtgataaatgaggttaaatcattcttgtctcaaaattttgatacgaaggatttgggagtagctgatgttatcttaaacattgagctaattagaggtgagaatgggattacactcttgcagtcccattatgtggagaagatcttgaatcactttggttacattgatagtaagccttctccaacaccttatgatcctagcttgttgcttcgcaagaacaagagaattgctaggaatcaactggaatactcccaaatcattggctcgctgatgtacctggctagtgcaactaggcctgatatctcctttgctgtgagcaagttgagccggtttacctctaatccgggagatgatcactggcgtgcgcttgagcgagtaatgcgctatctgaaagttactatggaattggggcttcactatactgggtatcatgcggtactggagggttatagtgattctaactggatctctgatgtggatgagatcaaagccactagtggatatgtcttcacactaggtggtggtgctgtttcgtggaggtcttccaaacagaccattttgacgaggtcaaccatggaagcagagctgacggcattggatactgctactgttgaggcagaatggatgcgtgatctattaatggatctgcctattgttgaaaaaccagtgccggctatccttatgaactgtgataatcaaacgttttgttttgctacgggaaattcggatttgttttgttttggaaacattccgaaaaatccggtgcgtgaaaacggcgtggagtccggggtttgcctcctactctgtggtgcgccgtcgctcgtagactactccatcccgctcgccggcgtgcaccggcgatcgggagagcaggtctccggaacctctgtcttcgacgtcctgcaccgagagaaggcggcaataaggtttttgggaagcgcttcgtgcgactgctccctgttcgtccgcgacggctcgccttcctctccgctcgcgtgctgcgcgtctttgtcgacgcccacaaccgcgagtagttcctgccgagcaaccggtatttccgccacctcgatctaa

SEQ ID NO: 18094 - DNA, 1298 bp, Oryza sativa
  Clone ID: PAT_MRT4530_23683C.1
cacaccaccaagaccaccaccttcatcttggttggcttcgttcactccgcctacctacctacctctgcagttggtttgctgaaccctcctcaagaacccacgcctctcctctcgcggcggcagctaaccgagccatggcgcgcaagaagatccgggagtacgactccaagcgcctcctcaaggagcacctcaagcgcctcgccggtatcgacctccagatcctctccgcccaggttacacaatcgacggacttcacagagctggtaaaccagcagccatggctgtcaaccatgaagttggtcgtgaagcccgacatgctgttcgggaagcgtggcaagagcggacttgtggccctcaacctagatattgctcaagtcaaggagtttgtgaaggagaggctgggagttgaggtcgagatgggtggctgcaaggctccaatcaccaccttcattgtggagccatttgtaccccatgatcaagaatactacctttctattgtctcggagaggctgggcagcaccattagcttctcagagtgtggaggaatagaaattgaggagaactgggacaaggttaagacaatttttctttccactgagaagccaatgacacctgatgcatgtgctcccttgattgctacccttccattggaggcacgtggaaaaattggtgatttcattaaaggagtctttgctgtcttccaagacttggatttctcatttctcgagatgaacccatttaccatcgtgaatggagagccgtatcctctggacatgagaggagaattagatgacacagcagctttcaaaacttcaagaagtggggaaatatcgaattcccactaccattcggtagagttctcagttctacagaaggctttatccatgacttggatgagaagtgcatctctgaagttcaccgttttgaacccaaaggggcgcatctggacaatggttgctggaggtggtgccagtgtcatatatgctgatacatgtgcgactgctgatcctgatggccgcaagagagctcttctcattggagggggtatagctaacttcaccgacgtcggggccacatttagcggcatcattcgggccttaagagagaaggaatccaagttgaaggctgcaaggatgcacatctatgtccgacgtggtggtccaaattaccaaactgggctggctaaaatgcgcaagcttggcgcagaactcggcgtcccgattgaggtgtatgggccagaagcgacgatgactggaatctgcaagcaagcaattgaatgcgttatggccgcagcataa

SEQ ID NO: 18095 - DNA, 3855 bp, Oryza sativa
  Clone ID: PAT_MRT4530_23684C.1
atggctagttttgccgatgcactgaggccggataaattcactggtgtgcattttaagagatggcagatcagggtcactctgtggctgacagctatgaaatgcttctggaagcaattcgaggaagccactactctctttgtgggatgcattcttagcgttcttggcgatcgtctggtcgaggtgtatatgcatatgaccgacgctaaggagttgtgggatgcactgaatactaaattcggtgctactgatgctagcaatgatctgtatatcatggagcagtttcatgactacaagatggctgacaaccgttctgtagtcgaacaggctcatgagatacaaaccatggctaaggaactcgaactccttaagtgtgtcttacccgacaaatttgtggtcggatgcattattgcgaaactacctccatcttggagaagtttcggtactgtactcaaacacaagagacaggaatactccgttgaggggttgatagcgcctcttgatgttgaggagaaagctcgggaaaaagatgccgcgtctaagggcgatggcgggcagtccagtgccaatgttatgcacaaggcccagaacaagagcaaagggaaatacaaagctcagcagaccaccaacttgaaaaagcagaagaagaacaacaacaatcctaatcaggatgagaggacttgctttgtgtgtggccaacttggtcatctagctaggaagtgtccacagcgcaaggggatgaaggcacctgtagggcagacttctaagtctgctaatgacgcacggggttccaccgtcctaatggggaatgggtcacatgcttctgttcatggtgttggcacggtatatctgaagtttacttcgggaaagatcgtgcagctgaagaacgtgcagcatgtcccttctatcgacaggaatcttgttagtggctcccgtctgattagagacagatttaagttggtttttgagtctaataaagtagtcgtgtctaaacatggatattttattggtaaaggttatgagtgcggaggcctgttccgcttttccctttctgatttctgcaataagtctgtgaaccatatttgtggcagtgtggatgatgaggctaatgtttggcactcatgtttatgtcatattaattttggcttgatgtctcggctttccagcatgtgtttaattcctaagttttccattgtcaaaggttctaagtgccatagttgtgtgcaatcgaagcaacctcgcaagcctcacaaggctgccgaggaaagaaacttggcaccactagaactcctacattcagatctttgtgaaatgaatggggtgttgacaaagggtggaaaaagatatttcatgactttgattgatgatgctactagattttgctatgtgtacttgttgaaaacgaaagacgaggctctagactattttaaaatttataaggcagaagttgaaaatcaacttgacagaaagataaaaagacttaggtctgatcgtggtggagagtttttctcaaacgagtttgacttattttgtgaggaacatggcatcatacatgagaggacgcctccctattctcccgagtctaatgggattgctgaaaggaagaaccgcacactgactgacttgattgggagaaaaccatcactttcttatttgcgcacatgggggtgcttggcgaaagtcaatgtaccaataacgaagaagcgcaaactgggacctaagactgtggactgtgtctttctgggatatgctcattacaacattgcctatagaattttaatagtcaaatctgaggtacctgacatgcatgttggtacaattatggagtctcgtgatgctaccttctttgagagcttttttccaatgaaggatacacatagtagtttgagccaaccatctgaaataattaccagttcaatcacaccaccagaacaaactgaacatacacatgaacatgtcactgaggaggatgacagtgaagctcctcgaaggagtaagagacaaaggacggctaagtcctttggtgatgatttcactgtgtacctcgtggatgacactcctaagtcaatttcagaagcatatgcatctcctgatgcagactactggaaggaggttgtccgtagtgaaatggattccattatcgctaacgggactttggaggtgacagagcgaccctatgagtgtaaacctgtgggatgcaagtgggtgttcaagaagaagcttgggcatgacggtactattgaaaagtacaaggctcggcttgttgctaagggctacactcagaaagaaggcgaagatttctttgacacttactcacctgttgctagattgaccacaattcgtgtgctactttccctagcagcctcacatggtcttctcgttcatcaaatggacgttaagacatcttttcttactggagagctggatgaggagatctatatggatcagcctgatgggtttgtagttgaaggtcaaaaaggcaaggtgtgcaaattgttgaagtctttgtatggtctgaaacaagctcctaagcaatggcatgagaaatttgacaagacattgacatctacaggcttcgcagtcaatgaggcagataaatgtgtgtactatcgctatggtgggggtgagggagttattttatgcttgtatgttgatgacatactgatatttgggacaaaccttgaggtgataaatgaggttaaatcatttttgtctcaaaattttgatacgaaggatttgggagtagttgatgttatcttaaacattaagctaattaaaggtgagaatgggattacactcttgcagtcccattatgtggagaagatcttgaatcgctttggctacattgatagtaagccttctccaacaccttatgatcctagcttgttgcttcgcaagaacaagagaattgctaggaatcaactggaatactcccaaatcattggctcgttgatgtacctggctagtacaactaggcctgatatctcttttgttgtgagcaagttgagccgatttacctctaatccgggagataatcactggcgcgcgcttgagcgagtaatgcgctatctgaaaggtactgtggaattggggcttcactatactgggtatcctgcggtactggagggttatagtgattctaactggatctctgatgtggatgagatcaaagccactagtggatatgtcttcacactgggtggtggtgctgtttcatggagatcttgcaaacagaccattttgacgaggtcaaccatggaagcagagctgacggcactggatactgctactgttgaggcggaatggctacgtgatctattaatggatctgcctattgttgaaaaaccggtgccggctatcgttatgaactgtgacaatcaaacggtaattgtcaaagtgaatagttctaaggataatatgaaatcgtctagacatgtgaaaagacgattgaagtctgtcaggaaattaagaaactccggagttataacgttggattacatccaaacagctagaaacctggcagatcccttcacgaagggactatcacgaaatgtgatagacaatgcatcaaaggagatgggtttgagacccatcgaagatgctgtcctgcagagcattcttgaaagaactcacctttttgagcttgactgttggtcgcagtctatggagattttgggtgaatcttctaggaagcttactaaagacctaggattttgttttgctgcaaattcggattcgtttttgttttggaaacgttccgaaaaatctgattactccatcccgctcgccggcgtgcacctgcgatcgggagagcaggtctccggaacctctgccttcgacgttctgcaccgggagtag

SEQ ID NO: 18096 - DNA, 206 bp, Oryza sativa
  unsure (1)..(206): unsure at all n locations
  Clone ID: PAT_MRT4530_23685C.1
ctcgtcgagatggccgggattggtccgatcagacaggactnggagccggtggtggtgcggaagaaggcgcccaccgccgccgccaagaaggntgagaaggccgtcaacgccgcccnccgttccgggncgagatcgagaccatcaagangtataacgctggaacaaacaangcggcgtccagtggcacatccctnaacaccaagcgg

SEQ ID NO: 18097 - DNA, 370 bp, Oryza sativa
  Clone ID: PAT_MRT4530_23686C.1
ccgcacgcgtccggccgtcgacgaaggaggagggggagccttggaagctgacgtggcgggaggtggaggcgctcaccggcggcttcgaggaggcggcggtggtggggcgaggtggctccagcacggtctacctggcaagcagctgcagggtcgccgtcgtctcgccgcccgtggcggtgaaggtgcaccggtggtgcgccggccagctatggcttttctcgttccattcaaaccccagccatggacctctacctgcgctacctcaacatcgtattcatcaccaactacttcgttcaccacaacgaggccatgcacctcatttttgagggccctttccagattatacctcaacctctcctatatacagtcc

SEQ ID NO: 18098 - DNA, 2079 bp, Oryza sativa
  Clone ID: PAT_MRT4530_23687C.1
ttctttaccaccaccttcatcttggttggcttcgttcactccgcctacctacctacctctgcagttggtttgctgaaccctcctcaagaacccacgcctctcctctcgcggcggcagctaaccgagccatggcgcgcaagaagatccgggagtacgactccaagcgcctcctcaaggagcacctcaagcgcctcgccggtatcgacctccagatcctctccgcccagatgcggcgattgggcgtcggcggcgcgggagcagtgcggtggcggcgcgcagggccacagggtgcaagcggcggcggcgtcaaggagggcatcggccgcgattagggggctgtgccgcaggaggcagtgagtagtacttgattgtgcgactgctgatcctgatggcgcgcaagaaagctcttctcattggagggggtatagctaacttcaccgacgtcggggccacatttagcggcatcattcgggccttaagagagaaggaatccaagttgaaggctgcaaggatgcacatctatgtccgacgtggtggtccaaattaccaaactgggctggctaaaatgcgcaagcttggcgcagaactcggcgtcccgattgaggtgtatgggccagaagcgacgatgactggaatctgcaagcaagcaattgaatgcgttatggccgcagcataaatgaagatgcaagttctgggatctgcaggcaagatgctgaatgcgtgatgggtgcgacatggatgagagtgtggtgtagttgcagtagttctctgcagatggctgatttgtttcttgatacatgttatacttggacgagatctggataggttattgatgtactgaaactactactgcgatgcaataaaagtgagagtagcgtttcctgaaaaaatatccaaaaaaaaaaagttacacaatcgacggacttcacagagctggtaaaccagcagccatggctgtcaaccatgaagttggtcgtgaagcccgacatgctgttcgggaagcgtggcaagagcggacttgtggccctcaacctagatattgctcaagtcaaggagtttgtgaaggagaggctgggagttgaggtcgagatgggtggctgcaaggctccaatcaccaccttcattgtggagccatttgtaccccatgatcaagaatactacctttctattgtctcggagaggctgggcagcaccattagcttctcggaatgtggaggaatagaaattgaggagaactgggacaaggttaagacaatttttcttcccactgagaagccaatgacacctgatgcatgtgctcccttgattgctacccttccattggaggcacgtggaaaaattggtgatttcattaaaggagtctttgctgttttccaagacttagatttctcatttctcgagatgaacccatttaccatcgtgaatggagagccgtatcctctggacatgagaggagaattagatgacacagcagctttcaaaaacttcaagaagtggggaaatatcgaattcccactaccattcggtagagttctcagttctacagaaggctttatccatgacttggatgagaagacaagtgcatctctgaagttcaccgttttgaacccaaaggggcgcatctggacaatggttgctggaggtggtgccagtgtcatatatgctgatacagtcggagatttgggatatgcttcagaattaggaaactatgcagagtatagcggtgctcccaatgaggaggaggttctgcagtatgctagagtagtacttgattgtgcgactgctgatcctgatggccgcaagagagctcttctcattggagggggtatagctaacttcaccgacgtcggggccacatttagcggcatcattcgggccttaagagagaaggaatccaagttgaaggctgcaaggatgcacatctatgtccgacgtggtggtccaaattaccaaactgggctggctaaaatgcgcaagcttggcgcagaactcggcgtcccgattgaggtgtatgggccagaagcgacgatgactggaatctgcaagcaagcaattgaatgcgttatggccgcagcataa

SEQ ID NO: 18099 - DNA, 2721 bp, Oryza sativa
  Clone ID: PAT_MRT4530_23688C.1
atggagatggaaacattgcagctgcgtgctgggacaggctgcttatgggtttgcctcctcctctgtgttgcgccgtcgctcgtggactactccatcccgctcgccagcgtgcaccggcgatcgggagagcaggtctccggaacctctgccttcgacgtcctgcaccgggagaaggcggcaataaggtttttgggaagcgcttcgtgcgactgctccctgttcaaccgcgacggttcgccttcctctccgctcgcgtgctgcacgccttcgtcgacgctcgcaaccgcaagtagttcatgccgagcaaccggtctttccgccacctcgatcagggtcaatctgtggctgacagctatgaaatgcttctgggtaagtactggcaagcctatgggcgttcttaatgctgatcagcagaaagaattcgatgaggccactactctttttgtgggatgcattcttagcgtgcttggcgatcgtctggtcgaggtgtatatgcatatgaccgacgctacggagttgtgggatgcactgaatactaaatttggtgctactgatgctagtaatgatctgtatatcatggagcagtttcatgtctacaagatggctgacaaccgttctgtagtcgaacaggctcataagatacaaaccatggctaaggaactcaaactccttaagtgtgtcttacctgacaaatttgtggccgggtgcattattgcgaaactatctccatcttggagaggtttcggtactgcactcaaacacaagagacaggaatacttcgttgaggggttgatagcgtctcttgatgttgaggagaaagctcgggaaaaagatgtcgcgtctaagggcgatggtgggcagtccagtaccaatgttgtgcacaaggcccaaaacaagagcaaggggaaatacaaagctcagcagaccaccaacttcaataagaagaagaaaaacaacaatcctaatcaggatgagaggacttgctttgtgtgtggtcaacctggccatctggccaggaagtgtccacaacgcaaggggatgaaggcacctgcaggacagacctctaagtctgctaatgtgaccattggcaacactggagatggaagcgggtatggtcgcacggggttccaccgtcctaatggggaatgggtcacatgcttctgttcatggtgttggcacggtagatctgaagtttacttcgggaaagatcgtgcagctgaagaatgtgcagcatactactggaaggaggatgtccgtagtgaaatggattccattatcgctaacgggacttgggaggtgacagagcgaccctatgggtgtaaacctgtggggtgcaagtgggtgttcaagaagaagctcaggcctgacgcctcacatggtcttctcattcatcaaatggacgttaagacaacttttcttaatgaagagctggatgaggagatctatatggatcaacctgatgggtttgtagttgaaggctttgcagtcaatgaggcagataaatatgtgtactatcgccatggtgggggtgagggagttattctgtgcttggtttgcctcctcctctgtgttgcgtcgtcgctcgtggactactccatcccgctcgccagcgtgcaccggcgatcgggagagcaggtctctggaatctctgccttcgacgtcctgcactgggagaaagcggcaataaggtttttgggaagcgcttcgtgcgactgttccctgttcaaccgcgacgagggtgatgctgcagatagggcgagcaacttgacagatgccactgttgacagcttgattgagtctatcatcattaaagatggggtgaaagccaagtttttctttaacattatgtctcttgctaactctgcaggagagaagttgcttgccttcagtcaatatatacttcccatgaaatttttggaaaggttgttggttaagaggctgggctggcatgtagggaaggagattttcatgatatctggtgatactagtgcagacgacagagaagtggcgatggatcagtttaacaactctgccgatgcaaaagttttgtttggttccatcaaggcctgtggagagggaatctcccttgttggtgcatctcgagtcatcattctagatgttcatttgaacccatctgtcacccgtcaagcaatcggacgtgcattcaggcccggacagcagaagaaagtgtttgtgtacaggcttgttgctgctgattctccagaggtgaagttccatgaaactgcattcaagaaagaagttatcccaaagctatggtttgaatggagtgagctctgcactactgaagacttcaaactgaatcaagttgatattgatgactctgaagatgaactattggaggctaatgctattcgccaggatatcaaggctttgtatagaagggttggcaagggcctgtcggcggcagcggcggcgtcgaagcggagatggacgttggcgttggcagcgaagaaggtagtggggcggaagctgggtgggccgaagaagccggtgccacgctccgtcaaggccgggctccagttcctcgtaagccgctacctcgagaacggccggcacgcgcaacgcgtcggcactggcacccccgtctacctcgctgccgtcctcggcgtagctgtggcggccgcggcgaggaggagggaggggagtagcagcagcgcggggacacccatggctgtcgcggcgacggcggcgaggtggtag

SEQ ID NO: 18100 - DNA, 190 bp, Oryza sativa
  Clone ID: PAT_MRT4530_23689C.1
atgggtctcaaacccatctccttcgatgcattgtctatcacatttcgtgatagtcccttcgtgaagggatctgccaggtttctcgctgtttggatgatacccagtatagtgaagccccaattccacagtacctttcagatagcgcattactcgctcaagcgcacgccagtgatcatctcccggattagag

SEQ ID NO: 18101 - DNA, 867 bp, Oryza sativa
  Clone ID: PAT_MRT4530_2368C.1
atggccatggcggcaccggcgcgcgacgacgaggagccccaggacggctactactccatcgtctacgagttgcatgctccgggggacgacgagtggctgctccggcacctgtggagggaggcgcacccgatggcgcaggcaggcggggaggccggggccccggttctcgggaggatgatggcggcgatgaggaggtggtggtggcgcgcggatccgcagctacatctcgggagggcccgtctgcttctccgcaggtggagggcgggctccgcctccgcgcgccgcctcgcgaggtggaggagggagggcggcgtcacgccgcgggtgctcctgcagtctgcagaggtggtggcggcgcgtccatccacaggtcgtgctcaggggcttgacggccttgggggtcgccaccatgcgctgccatctttcttcctccgctacgagcgggtgatgcacgacttcgttgtggcgggcgggatcaccgtactcaccccgttcatctggggcgccctcgtcgccatcatggttggtctgggcgctgacatgggcccgcttctggagttagatgttcttggtattaccgatcgattttgctatatctcactcgaaagatttttccttatctctcactcgattttctcactcaaatttacagtgcattttcttctagatggccgccctgtggtgccggagccggagcagcaagtccatcagccggatccggatgagcccgagcacgtgtaccgcgtcgtcctgcacggcgaggagttcacgttcctcaccaacattccgagagccaagttctatctcctgatagctgctgtttttgtcgtcgttttcttgttccaccccttcagcgctgagacctga

SEQ ID NO: 18102 - DNA, 1523 bp, Oryza sativa
  Clone ID: PAT_MRT4530_23690C.1
atgcaggcccgcgtcgtcgtcttccccgtcaagggaagggcctggtgcttcgccagcccgcgcgccaccgcgcccgccgccgcttgcgggggcggcgatgggggcgccctactacccccaccgccgccaaccgtcaaggacctctggcgcggcatcgccggcgggggccgcacggcgtcggagaacgcggaggccgtcgtcgacttcgtcgcggacaaggtgctcgactcgacggggagcgccttctcgtctctcgccttaactgcattctcgcatgccgcccgcatttggggggtttctgatggtggggttttggctgccgcagatgaaccgggcgtggatcgggttcgggagcgcgccggaggggtcgatgaagaaccggatccacaggtcgggagtcttcgggctgaagctgctctcgcgggtgcggccgtcggaggtgctgctcaagtcggtgaccaaggacgtctccctactcgagatcgtgcatccggcaagcttgtagctgcttgttttttgaacctctgtgcgtgctccgtaactgtaaaatgtataaatcctcgtcttgtgcgtcgacggttgcggcatattgctgtcagctcaatttatatctttcctcacccttctgtttctgcaatgtttctgagaaccaggggtgcatcagttcacaggaaatttctttatggctcagtttgtttgcttccagttacaagtgttttcatggtactgcctttgccaaacataccatttttctgggtgctgtttcgtgcttattctcattggagagctctgcagggaagtgagaggctccagttgttagtttctgacagctcagatcaatggaaaatccttcttgagaagcagaaagagatgagttccagaaaggatggcaacccttgtgaaaacactcaatatgctccttggaatttgcagccttcgaagaagcttgatgggttccttgagagcagaaaattgaatgaaggattggattgtgataccatttcgaggatttgtcaggcatatgatttggacaagattgatgttctgaagtacagggatttggagtaaccacatccagtttcttggctgccgtggtgatttttttgccagctaatgtttgtgtggtagaaatgaattccgtcgtggagaactagctgaactgctgaagggtacacgagtgacacgagacttccaaaattagtgactaatgcagatttttttttttgcaagggatttggagtagtagcattacaattcacaagttttgttgttcctcagtctgctgctggtttacaaggcagaaaaacagacaggacctaaaactgtagtgcccatggtgacatctaattctgtacccaccatgtaaatagaggtggaggcatcctttccccactagcattttctttggtttcagcaccactcagtagtcagtactctgtaaggagatttgcttcaatggattttgcagctgctataacttcaaaagtccctgcagcccggggatccactagtttagacgccgc

SEQ ID NO: 18103 - DNA, 125 bp, Oryza sativa
  Clone ID: PAT_MRT4530_23691C.1
tccggtcggatttcgggtggaccatgcgttcgtccacgcgtacggttgtagttccaagagctcaaagatgataagtctgagggctgtcagctgtttttggttgagtgaactgaaccttgtggatt

SEQ ID NO: 18104 - DNA, 2607 bp, Oryza sativa
  Clone ID: PAT_MRT4530_23692C.1
atgaggtggaggatgaggtcgtcctccgtccgagcttccttctcgccagcggtgcgcgggctccgccgattctttccaccgacgacacaaagaggggacgaggagcagtgtttggagcagcgacgacgagacacgacggcgtggagtgcgctccccatctcctctgatgccttccatcgcgccaccgttgtctccaccgccatctcccttttcgccttctccacccgccgccggtctacctcgccgtcgcccctctccgcccaccaccggtctacctcatcatcggcccactccgcccgccgccgccccgctccatcctgccggctccatgcgccgccgctccacggtttaacaggtctccagaacctctgccttcgacgtttttgcctccgactctgtgctgcaccgtcgctcgtagattactccatcccgctcgccggcgtgcacctgcgatcgggagagcaggtctccagaacctctgccttcgacgttccgcaccgggagaaggcggcaataaagtttttgggaagcgctttgcgcgactgctccctggtcactctgtggctgacagctatgaaatgcttctgggtgagtactggcaaacctgaaggagttcttactgctgaacagcagaagcaattcgaggaagccactactctctttgtgggatgcattcttagcgttcttggcgatcgtctggtcgaggtgtatatgcatatgaccgacgctaaggagttgtgggatgcactgaatactaaattcggtgctactgatgctagcaatggtctgtatatcatggagcagtttcataactacaagatggctgacaaccgttctgtagtcgaacaggctcatgagatacaaaccatggctaaggaactcgaactccttaagtgtgtcttacccgacaaatttgtggccgggtgcattattgcgaaactacctccatcttggagaagtttcggtactacactcaaacacaagagacaggaatactccgttgaggggttgatagcgtcttttgatgttgaggagaaagctcgggaaaaagatgccgcgtctaagggcgatggtggacagtccagtaccaatgttgtgcacaaggcccagaacaagagcaaagggaaatacaaagctcagcagaccaccaacttcaagaagcagaagaagaataacaacaatcctaatcaggatgaaaggacttgctttgtgtgtggccaacttggtcatctggctaggaagtgtccacagcgcaaggggatgaaggcacctgcagggcagacttctaagtctgctaatgtgaccattgacaacactggagatggaagcaggtatggtaatttacctactgacgcacggggttccaccgtcctaatggggaatgtgtcacatgcttctgttcatggtgttggcacggtagatctgaagtttacttcgggaaagatcgtgcagctgaagaacgtgcagcatgtcccttctatcgacaggaatcttgttagtggctcccgtctgactagagacggatttaagttggtttttgagtctaataaagtagtcgtgtctaaacatggatattttattggtaaaggttatgagtgcggaggcctattccgcttttccctttctgatttctgcaataatgaagctcctcgaaggagtaagagacaaaggacggctaagtcctttggtgatgatttcactgtgtacctcgtggatgacactcctaagtcaatttcagaagcatatgcatctcctgatgcagactactggaaggaggttgtccgtagtgaaatggattccattatcgctaacgggacttgggaggtgacagagcgaccctatgggtgtaaacctgtgggatgcaagtgggtgttcaagaagaagcttaggcctgacgagctggatgatgagatctatatggatcagcctgatgggtttgtagttgaaggtcaagaaggcaaggcttcgcagtcaatgaggtggggcccacctgtcgggtccttcccccacctcccgccgatcccggcgcgccgccgcgccgaaaccgccgccgcgcccacgcctccgtctctcccgggccacgtcggccacgcccgcgcgtgcgccgcgtctcccgcgccctttcccctctccctcccgttcgcgcccgcgcccgagatggccgggattcggaaaccgaatcccgcctctctctcctccccactccccccacgctcgtcgccgtctcgcgccgtcgccgccgttagcttcgcggggtcgagatctacctcggccgcctcttccccgtcgaggttcgtcgccggagccctcatccccacgcgcacggggcacgccgaagctcgtccgccgtcgccgtcgcctcccgtggcccgccgtcgccgttcgccatcgtcttcctccgcgccggccaccctcggtgaggcatctcctctcctctcctttcccgtttccccgtgcgtcgccgccacccgcgctcgccgtcgctttgggtcgttgccgccgtccgctgccgccgcttttgcgtcgcctccgccgccgggtgccgtcgccggcaacccgttcgcgcgcgcgccgtcgccgtcgccgcggccggtcggccggtcttga

SEQ ID NO: 18105 - DNA, 4542 bp, Oryza sativa
  Clone ID: PAT_MRT4530_23693C.1
atggctggttttgccgatgcactgaggccggataaattcaccggtgtgcattttaagagatggcagatcagagtcactctgtggctgacagctatgaaatgcttctgggtgagtactggcaaacctgaaggagttcttactgctgaacagcagaagcaattcgaggaagccactactctctttgtgggatgcattcttagcgttcttggcgatcgtctggtcgaggtgtatatgcatatgaccgacgctaaggagttgtgggatgcactgaatactaaattcggtgctactgatgctagcaatgatctgtatatcatggagcagtttcatgactacaagatggctgacaaccgttctgtagtcgaacaggctcatgagatacaaaccatggctaaggaactcgaactccttaagtgtgtcttacccgacaaatttgtggctgggtgcattattgcgaaacaacctccatcttggagaagtttcggtactgcactcaaacacaagagacaagaatactccgttgaggggttgatagcgtctcttgatgttgaggagaaagctcgggaaaaagatgccgcgtctaagggcgatggtgggcagtccagcgccaatgttgtgcacaaggcccagaacaagagcaaggggaaatacaaagctcagcagaccaccaacttcaagaagcagaagaagaacaacaacaatcctaatcaggatgagaggacttgctttgtgtgtggccaagttggtcatctggctaggaagtgtccacagcgcaaggggatgaaggcacctgcagggcagacttctaaatggaagcgggtcgcacggggttccaccgtcctaatggggaatgggtcacatgcttctgttcatggtgttggcacggtagatctgaagtttacttcgggaaagatcgtgcagctgaagaacgtgcagcatgtcccttctatcgacaggaatcttgttagtggctcccgtctgactagagacggatttaagttggtttttgagtctaataaagtagtcgtgtctaaacatggatattttattggtaaaggttatgaatgcggaggcctgttccgcttttccctttctgatttctgcaataagtctgtgaaccatatttgtggcagtgtggatgatgaggctaatgtttggcattcacgtttatgtcatattaattttggcttgatgtctcggctttccagcatgtgtttaattcctaagttttccattgtcaaaggttctaagtgccatagttgtgtgcaatcgaagcaacctcgcaagcctcacaaggctgccgaggagagaaacttggcaccactagaactcctacattcagatctttgtgaaatgaatggggtgttgacgaagggtggaaaacgatatttcatgacattcattgatgatgctactagattttgctatgtgtacttgttgaaaacgaaagacgaggctctagactattttaaaatttataaggcagaagttgaaaatcaacttgacagaaagataaaaaggcttaggtctgatcgtggtggagagtttttctcgaacgagtttgacttattctgtgaggaacatggcatcatacatgagaggacgcctccctattctcccgagtctaatgggattgctgaaaggaagaaccgcacactgactgacttggtgaatgccatgttggacaccgcgggactgcctaaggcatggtggggggaggcattgttgacctcaaatcatgtgttaaacagagttcctaacagaaataaggacaaaacaccatatgagatatggattggtagaaaaccatcactttcttatttgcgcacatgggggtgcttggcgaaagtcaatgtaccaataacgaagaagcgcaaacttggacctaagactgtggactgtgtctttttgggatatgctcatcatagcattgcctatagatttttaatagttaaatccgaggtactggacatgcatgttggtacaattatggagtctcgtgatgctaccttctttgagagctttttcccaatgaaggatacacatagtggttcgaaccaaccctctgaaataattcccagttcaatcacaccaccagaacaaactgaacatacacatgaacttgtctctgaggaggatgtcagtgaagctcctcgaaggagtaagagacaaaggacggctaagtcttttggtgatgattttactgtgtacctcgtggatgacactcctaagtcaatttcagaagcatatgcatctcctgatgcagactactggaaggaggctgtgacagagcaaccctatgggtgtaaacctgtggggtgcaagtgggtgttcaagaagaagcttaggcctgacggtactattgaaaagtacaaggctcggcttgttgctaagggctatactcagaaagaaggcgaagatttctttgacacttactcacctgttgctagattgaccacaattcgtgtgctactttccctagcagcctcacatggtcttctcgttcatcaaatggacgttaagacagcttttcttaatggagagctggatgaggagatctatatggatcaacctgatgggtttgtagttgaaggtcaagaaggcaaagtgtgcaaattgttgaagtctttgtatggtctgaaacaagctcctaagcaatggcatgagaaatttgacaaaacattgacatctgcaggctttggagtcaatgaggcaaataaatgtgtgtactatcgccatggtgggggtgagggagttattttgtgcttgtatgttgacgacatactgatatttgggacaaaccttgaggtgataaatgaggttaaatcattcttgtctcaaaattttgatatgaaagatttgggagtagctgatgttatcttaaacattaaactaattagaggtgagaatgggattacactcttgcagtcccattatgtggagaagatcttgaatcgctttggctacattgatagtaagccttctccaacaccttatgatcctagcttgttgcttcgcaagaacaagagaattgctaggaatcaactggaatactcccaaatcattggctcgttgatgtacctggctagtgcaactaggcctgatatctcctttgctgtgagcaagttgagccgatttacctctaatccgggagatgatcactggcgtgcgcttgagcgagtaatgcgctatctgaaaggtactgtggaattggggcttcactatactgggtatcctgcggtactggagggttatagtgattctaactggatctctgatgtggatgagatcaaagccactagtggatatgttttcacactgggtggtggtgctgtttcatggaggtcttgcaaacagacaattttgacgaggtcaaccatggaagcagagctaacggcactggatactgctactgttgaggcagaatggctgcgtgatctattaatggatctgcctgttgttgaaaaaccggtgccggctatccttatgaactgtgacaatcaaacgacatgtgaaaagacgattgaagtctgtcaggaaattaagaaactccggagttataacgttggattacatccaaacagcgagaaacctggcagatcccttcacgaagggactatcacgaaatgtgatagacaatgcatcgaaagagatgggtttgagacccatatgcagcctccttttgcagttttgttttgctgcaaattcggattcgtttttgttttggaaacgttccgaaaaatccggatatgcgaaaatcaatctagggtttgcctcctactctgtactgcgccgtcgctcgtagactactccatcccgctcgccggcgtgcaccagcgatcgggagagcaggtctccggaacctctgcctttgacgtcctgcaccgggagaaggcggcaataaggtgttcgcggagaacccagagcactgagaacgtcgaggaagcggacgacgccaaccagctcgccgtcgtcggcgtccaccacccacacctgcgtcacgcggataaggcgacggaggcaacaccgtcgaccaccgcgagcgcgcgcccgaacgggtgcgccgccgccggcagcgaggatgacgccgacgatggctcgccttcaccgtcagactccgtgccggtagaagaatcggatgttgccgacttgtggtcgacggtgaccggcttcgcgcttccagagtcgggcggcttggtgtggtcgacagtgacttgctccaacgacgcccttgcgccgctgtcgtgcagaggctcgggcttcgcgctttcggcgtcgggcgacgacagtgaatggccagagaacgacgggccgccgccaccgctactgtcaaccataggcttcatgccaccggcgacgggcggcgaaggggaagagccagagaacgaggcctcctcctacggtgaatgcccagagaacacctacggcggccgcctcctcctctccgcggtgcttccccactacagccgccgccgacaacgccggctgccgtcggcgccccagcggcctcctccccaaccgccggacggcttgcacagataa

SEQ ID NO: 18106 - DNA, 159 bp, Oryza sativa
  Clone ID: PAT_MRT4530_23694C.1
atggatatgaggacaaaatggctatctaaggatctcttgtccaaaaagaaaaaggttgatttggggagagttctaagcttcttggattacaaggaatactccatttctgttctaagaaagttagacactctacccttgtacatgtacaataatatataa

SEQ ID NO: 18107 - DNA, 3042 bp, Oryza sativa
  Clone ID: PAT_MRT4530_23695C.1
atggagggcacggtgctctgctccgccaaccacgcgccgctcacgcccatcagcttcctcgagcgcaccgcgctcgtgtaccccgaccgtctcgctattgtcgcctcggatggcagcgccggcgtggccgtgtcgcgcacctggcgggacactcgggcccgctgcctccgcctcgccgccgccctcaccggcctcctcggcgtccagcgccacgacgtggttgcggtgttcgcgcagaacattcctgctgtttgcgagctccacttcggcgtccccatggccggcgccgtcatctgcacgctcaactcgcgcctcgacgccgccatggcggccgtcctgctgcgccactccgaggccaaggtcgtcttcgtcgaccgcgctctgctcggcgtcgcccagaaagccctcgtgctcgtcgccgaagccggagccaggcgtcccgtcttggttctcatcagcgagctcctcgacgaaaacgaacgatcacctcctgatgccaagatcaaggtcacccgagtcgattacgagtacgagcacctcctgagcgccgccgccgccggatcgtcgccggacttcgcgatccggtggccggccgacgagaacgagccgatcgccctgaactacacctccgggacgacgtcgaggcccaagggcgtgatctacagccaccgcggcgcgtacctgagcagcctcgccgccgtgatcgtgaacgccatggcggagacgccggtgtacctgtggaccgtgccgatgttccactgcaacgggtggtgccaggtgtggggcgtggcggcgcagggcggcacgaacgtgtgcgtccgcagggtgaccgcggcggccatcttcgacagcgtggcgcggcacggcgtgacgcacatgggcggcgcgccgacggtgctgagcatgatcgtgaacgcgacggcggacgagcggcggcggcagccgggcgggaggaggaggagggtgacggtgatgaccggcggcgcgccgccgccgccgcaggtgctgttccggatggaggagcaggggttcctggtgatccactcgtacgggctgacggagacgtacgggccggcgacggtgtgcacgtggaagccggagtgggacgcgctgacggcggaggagcgcgcccggatcaagtcgcggcaggggctccaccacgtcgggctggaggcggcggacgtgaaggacccggcgacgatgcggagcgtgccggcggacgggcggacggtcggggaggtgatgctccgggggaacacggtgatgagcgggtactacaaggacggcggcgcgacggcggaggcgctcgccggcgggtggctccggtcgggcgacctggcggtgcgggaggaggacgggtacatcaagatcctggaccggtccaaggacatcatcatctccggcggggagaacatcagcacggtcgaggtggaggcggcgctgttcgggcacccggcggtggaggaggcggcggtggtggggcggccggacgagtactggggcgagacgccgtgcgcgttcgtgaagctgagaggaggaggaggaggaggaggaggcggcgcggcggtggaggaggagctgatggcgttctgccgcgcgcggctgccgcgatacatggcgccgcggacggtggtggtggtggaggaggagcttccgaagacggcgacggggaaggtgcagaaggtggcgctgcgggagcgggccaaggccatgggcagcctccccgccgccgcctcttcctcctccaggcgcgcacccacagggacagctggtgcaaccaaggtccttaggccatttttcaatcacatggcattgatgctggtgctggcggagttccagcgcaagcacggcactggcaggtggctgctcaacctgctcacttattactccatcccgctcaccggcgtgcatcggcgatcgggagagcaggtctccggaacctctgccttcgacgtccctgcacgccggcgatcgggagagcaggtctccggaacctctgccttcgacgtcctgcacagccggtctttctaccacctcgaagttgaaaatcaacttgatagaaagataaaaagacttaggtctgatcgtggtggagagtttttctcaaacgagtttgacttattctgtgaggaacatgacattatacatgagaggacgcctccctattctcctgagtctaatgggattgctgaaagggagaaccgcacactgactgacttggtgaatgccatgttggacacacttgaacaaactgaacatacacatgaacatgtcactaaggaggatgacagtgaagctcctcgaaggagtaaaagacaaaggacggctaagtcctttggtgatgatttcactgtgtacctcgtggacgacactcctaagtcaatttcagaagcatatgcatctcctgatgcagactactggaaggaggctcctcacatggtcttctcgttcatcaaatggacgttaaaaacagcttttcttaatggagagctggatgaggagatctatatggatcaacctgatgggtttgtagatgaaggcttcgcagtcaatgaggcagataaatgtgtatactatcgccatggtgggggtgagggagttattctgtgcttgtatgttgatgacatactgatatttgggacaaatcttgagtcccattatgtggagaagatctcgaatcgctttggctacattgatagtaagccttctccaacaccttatgatcctagcttgttgcttcgcaagaacaagagaattgctaggaatcaactggaatactaccaaatcattggctcgctgatgtacctggctagtgcaactaggcctgatatctcctttgctgtgagcaagttgagccggtttacctctaatccaggagatgatcactggcgtgcgcttgagcgagtaatgcgctatctgaaagattactacatcccgctcgccggcgtgcaccggcgatcgggagaccaggtctccggaacatctgccttcgacttcctgcaccaggagaaggcagcaataaggtttttgggaagcgtttag

SEQ ID NO: 18108 - DNA, 1396 bp, Oryza sativa
  Clone ID: PAT_MRT4530_23696C.1
atggcggcgggcggtggtggcgaggagggtcgaggcggcggcacggccacggcggcgagggcggttgaggcggtggcggcggctcccggccgccccctctctcccagatctggagtgaagacggcgggtcgtggccgtgcggcggctgcgcggacaatggcgggccgcggccgcggacctattgcgcgcttgcgaaaatcaactattttcgtaggcgttgaggtgcaggcgtatggcttgtccgcctgcgaaaatatgattctgccgactgggaaaagagtttttctagtcgttccaggagggtggatcctcaatgggcagaagcgatggccggccaacggcagttttgcggatgtgttcgtcgttcttgcctgcaataccagtaataatcagattaacgggttcattgtgaatggtgggtccccagggcttaagatcagcaagatcgagaacaagacgtcgctgagggttgtccagaactgtgacattctgctggaggacgtgttcgtccctgacgatgaccgtcttcccggcgccaactctttccaagacctagtgaaggccctctctttctcttgcgtcatcgttgcctggatcagcatcggcattgcagcaggggtttatgatgcatgcttacggtatctgggggagaggaagcagttcggggcgccattagcggcgttccagctgaaccaggagaagctagtgaggatgctgggcaacatccaggcgatgtggctcctcggctggcgtctctgcaagctgcacgattccggcaggatgaccactggccaggccagcctggggaaggcatggatcacaaagcaggcacgggagacggtcgccttgggcagggagttgctcggtggcaacggcatcgtcaccgattttcacgtcggcaaggcattctgcgacatggaatccatatacacgtatgagggcagctacgaagtaaacgtgctcgtcgctgcccgagagatcacgggcatcgccagcattaggccgactagccggctctagttgctgaacatcgtgctgtgcacatatggcacaccaagtaacagctagctagcgcgtataagaaggaacgtccatgcgaccaggcccggtgttaaagcacaaatttctaggctagctagctgtctctgaaggtctgattggaacatctttccaataattttatggtatatgaagttcatctcgtaatatatacttgttggtatacacagtacatccaaccatcaagttaaattaacacttcatagcttttttctgtacacaatatatgtgtcgtggtattgtaacacatatacatatatatataacaggttacgcgtatgattattatctcttaaaaaagcaaaaaaaaactcgagactagttctctccctcgtgc

SEQ ID NO: 18109 - DNA, 3501 bp, Oryza sativa
  Clone ID: PAT_MRT4530_23697C.1
atggctggttttgccgatacactgaggccagataaattcaccggtgtgcactttaagagatggcagatcagggtcactctgtggctgacagctatgaaatgcttctgggtgagtactcgcaaacctgaaggaattcttactgctcctcagcagaagcaattcgaggaagccactactctctttgtgggatgcattcttagcgttcttggcgatcgtctggtcgaggagaaagctcgggaaaaagacgccgcgtctaagggcgatggtgggcagtccagtgccaatgttgtgcacaaggcctataacaagagcaagggaaaatacaaagctcaacagaccaccaacttcaagaaacagaagaagaacaacaacaatcctaatcaggatgagaggacttgctttgtgtgtgggcaacctggtcatctggctaagaagtgtccacagcgcaaggggatgaaggcacctgcagggcagacttctaagtctgctaatgtgaccattagcaacactggagatggaagcgggtatggtaatttacctactgttttttcagttaatcagtctactaattggtgggttgatactggggccaatgtcgcatggggttccaccgtcctaatggggaatgggtcacatgcttctgttcatggtgttggcacggtagatctgaagtttactttgggaaagatcatgaatcttgttagtggctcctgtctgactagagacggatttaagttggtttttgagtctaataaagtagtcgtgtctaaacatggatattttattggtaaagattatgagtgcggaggcctgttccgcttttccctttctgatttctgcaataagcctgtgaaccatatttgtggcagtgtggatgatgaggctaatgtttggcactcacgtttatgtcatattaattttggcttgatgtctcggctttccagcatgcgtttaattcctaagttttccattgtcaaatgttctaagtgccatagttgtgtgcaaccgaagcaacctcgcaagcctcacaaggctgccgaggagagaaacttggcacaactagaactcctacattcagatctttgtgaaatgaatggggtattgacgaagggtggaaaacgatatttcatgacgttgattgatgatgctactagattttgctatgtgtacttgttgaaaacgaaagacgaggctctagactattttaaaatttataaggcagaagatgaaaatcaacttgacagaaagataaaaagacttaggtctgatcgtggtggagagttcttctcaaacgagtttgacttattctgtgaggaacatggcatcatacatgagaggacgcctccctattctcccgaatctaatgggattgctgaaaagaagaaccgcacactgactgacttggtgaatgccatgttggacaccgcgggactacctaaggcatggtggggggaggcattgttgatctcgaatcatgtgttaaacagagttcctaacagaaataaggacaaaacaccatatgagatatggattgggagaaaaccatcactttcttatttgcgcacatgggggtgcttggcgaaagtcaatgtaccaataacgaagaagcgtaaacttggacctaagactgtggaccgtgtctttctgggatatgctcatcacagcattgcctatagatttttaatagttaaatccgaggtacctgacatgcatattggtacaattatggagtctcgtgatgctacctactttgaaagctttttcccaatgaaggatacatatagtggttcgagccaaccctctgaaataattcccagttcaatcacaccaccagaacaaactgaacatttatatgaacatgtcactaaggaggatgtcagtgaagctcctcgaaggagtaagagacaaaggacggctaagtcctttggtgatgattttactgtgtacctcgtggatgacactcctaagtcaatttcagaagcatatgcatctcctgatgcagactactggaaggaggttgtccgtagtgaaatggattccattatcgctaacaggacttgggaggtgacagagcgaccctatgggtgtaaacctgtggagtgcaagtgggtgttcaagaagaagtttaggcctgacggtactattgaaaagtacaaggctcagcttgttgctaagggatatactcagaaagaaggcgaagatttctttgacacttactcacctattgctagattgaccacaattcgtgtgctactttccctagcagcctcaaatggtcttctcgttcatcaaatggacgttaagacaacgtttcttaatagagagttggatgaggagatctatatggatcaacctgatgggtttgtagttgaaggtcaagaaggcaaagtgtgcaaattgttgaagtctttgtatggtctgaaacaagcttctaagcaatggcatgagaaatttgacaaaacattgacatctgcaggctttgcagtaaatgaggcagataaatgtgtgcactatcgccatggtgggggtgagggagttattctgtgcttgtatgttgatgacatactgatatttgggacaaaccttgaggtgataaatgaggttaaatcattcttgtctcaaaattttgatatgaaggatttgggagtagctgatgttatcttaaacattaagctaattaaaggtgagaatgggattacacttttgcagtcccattatatggagaagatcttgaatagctttggctacattgatagtaaggcttctccaacaccttatgatactagcttgttgcttcgcaagaacaagagaattgctaggaataaactggaatactcccaaatcattggctcgctgatttacctggctagtgcaactaggcctgatatctcctttgctgtcagcatggtgagccggtttacctctaatccgggagatgatcactggcgtgcgcttgagcgagtaatgcgctatctgaaaggtactatggaattagggcttcactattctgggtatcctgcggtactggagggatatagtgattctaactggatctctgatgtggatgagatcaaagccactagtggatatgtcttcacactgggtggtggtgctgtttcgtggaggtcttgcaaacagactattttgacgaggtcaaccatggaagcagaactgacggcactggatactgctactattgaggcagaatggctgcgtgatctattaatggatctacctattgttgaaaaaccggtgccggctatccttatgaactgtgacaatcaaacggtaattgtcaaagtggatagttctaaggataatatgaaatcgtctagacatgtgaaaaaacgattgaagtctgtcaggaaattgagaaactccggagttataacgttggattacatccaaacagctagaaacctggcagatcccttcacgaagggactatcacgaaatgtgatagataatgcatcgaaggagatgggtttgagtcccatgtga

SEQ ID NO: 18110 - DNA, 825 bp, Oryza sativa
  unsure (1)..(825): unsure at all n locations
  Clone ID: PAT_MRT4530_23698C.1
cgtcttgtatgatggttgatggggaatgggtgggtactaattggaactggaagtgctgccttttttagcgctgagctatttgcaggcggcctattgccgcttgcgaaataactttttcgaggcgtgggtgcaggcgtatggctgccgctgcaaaatatgattctgccgctgggaaaagagttttctagtcgnggagctcgtaaaaatatctagttccaattagttacccatttgctaaaagattgcgaatttactgatcaaattccatgctctgcattaattatctaatatttcccacgcgtccgtatgattctgccgactgggaaaagagtttttctagtcgtgagagctcgtaaaaaatatctagtatccaattagtatacccttttgctcagaagattgcgaatttcactgatcaaattccatgctctgcattaattatctaatatttggtgtaggttccaggagggtggatcctcaatgggcagaagcgatggccggccaacggcagttttgcggatgtgttcgtcgttcttgcctgcaataccagtaataatcagattaacgggttcattgtgaatggtgggtccccagggcttaagatcagcaagatcgagaacaagacgtcgctgagggttgtccagaactgtgacattctgctggaggacgtgttcgtccctgacgatgaccgtcttcccggcgccaactctttccaagacctagtgaaggccctctctttctcttgcgtcatcgttgcctggatcagcatcggcattgcagcaggggtttatgatgcatgcttacggtatctgggggagaggaagc

SEQ ID NO: 18111 - DNA, 612 bp, Oryza sativa
  Clone ID: PAT_MRT4530_23699C.1
atggccagcgccaggccgccagacgacgacgacgacgacgggtgcatgaggcaacgacgggatccgctcctcgccagcctttctcgttcctccctcgccatcgagccgccccgtcgcccttgtcatgccgctgatggccgacgccgaaggactcatgcgccgtcaagccaccccgtcgacaacggcaacggcaacctcggggacgacgacagtggatggcgacgactggcgacggtgcagatgacggcgacagcggctggcgacctcgtcgacaatggtggcgctccagcgtgggttcaagacgctcgccgtgatgcgcaccgtcgtgctctccgccgccggcctgcacttctgcgccgcatcgagcttggatccccaagaaccccgccatggctccctcctcactgggcggcagcggcccagcgcccgtggccaaggggctccaccacaccatcgtggagatgcaggcggcgcatggaagccggtgctcgcggcggtgcacggcgcttgcgtcggcggcggcgtcaaggacgtggccgcctgcgccatcgtggagaagagccgaaggagatggggggaggaatctatgtggggcccatggttggccagtga

SEQ ID NO: 18112 - DNA, 200 bp, Oryza sativa
  Clone ID: PAT_MRT4530_2369C.1
gcggcagaaccggggggacgaacgaggccgacgaaacatgatacattacagcaaaaagctagctagataggcaatggcctgaacgtcctccaccagactaggcgaggctgaaactaccgagctgcccaatgcatggcgggggaggaggcggaggcggccggtcctttacggcggtcgctcttcgagcttggcgcgctcga

SEQ ID NO: 18113 - DNA, 470 bp, Oryza sativa
  Clone ID: PAT_MRT4530_236C.1
gtgttttttttttttttttttttttttttttttttttttttttttttttttttttttttttttttttttttttttttttttttaaaaaaacccttttgggggggggccctagcattcaaatttttttttttaaaaaacttttacaggacataacagcaacccaattgcttgcaatttatttatttatttatttaggtattttttatccccattgccaacttaaaaggattcccccccattataaaccttttgggagctttttttttgggggggggggaatgcccccaacccatttccttttttttgcttgagcccctgagcctttttttttgagaagcgatatgcctttgctaaaacaacaattgggaaagccccgaaaaaggaaccctttcctgcaaggggggttaccaaaaagaaaggggttgtcttaaaagcaaagaaaacacaaccttctttttgggccctcttta

SEQ ID NO: 18114 - DNA, 2283 bp, Oryza sativa
  Clone ID: PAT_MRT4530_23700C.1
atgacagaaaatagattccttgacaagacgtcgccaaaagacgaatcagagggtgcccaaatcgccacgccgatcagtggcgacgagacgccgagttcttccacaatgactagactcgtccaatacaactcctgccgctcggcgacgtcaacggtggcggcgaacctccccagaagcatgaggcggagatgggggacaagcacgacggccgcctcagtgccggtccaatgtcctcggtgccgcccaccgcccgccgcccgcctcactctccccaccgtgcgtgccgcacgcggcacccaccgcgccctcctagaggaggactcgtcgcccatcaccattgatgtggagctcgagaggggtctccagaacctctgccttcgacgccctgcactgggagaaggcggcaataagatttttgggaagcgcttcgcgcgactgctccctattcgtccgcgacggctcgccttcctctccgctcgcgtgctgtgcgccttcgtcgacgcccgcaaccgcgaggtcactctgtggctgggagctatgaaatgcttctgggtgagtactggcaagcctatgggcgttcttaatgctgatcagcagaaagaattcgatgaggccactactctctctgtgggatgcattcttagcgtgcttggcgatcgtctggtcgaggtgtatatgcatatgaccgacgctaaggagttgtgggatgcactgaatactaaattcggtgctactgatgctagcaatgatctgtatatcatggagcagtttcatgactacaagatggctgacaaccgttctgtagtcgaacaggctcatgagatacaaaccatggctaaggaactcgaactccttaagtgtgtcttacccgacaaatttgtggccgggtgcattattgtgaaattacctccatcttggagaggtttcagtactgcactcaaacacaagagacaggaatactccgttgaggggttgatagcatctcttgatgttgaggagaaagctcgggaaaaagatgtcgcgtctaagggcgatggtggccagtccactgccaatgttgtgcacaaggcccagaacaagagcaaggggaaatacaaagctcagcagaccaccaacttcaagaagaagaagaagaacaacaatcctaatcaggatgagaggacttgctttgtgtgtggtcaacctggccatctggccaggaagtgtccacaacgcaaagggatgaaggcacctgcaggacagacctctatgtctgctaatgtgaccattggcaacactggagatggaagcgggtatggaaagatcgtgcagctgaagaacgtgcagcatgtaccttctatcgacaggaatcttgttagtggctcccgcttcgcagtcaatgatgcaatgatgcagataaatgtgtatactatcgccatgatggggtcccattatgtggagaagatcttgaatcgctttggctacattgatagtaagccttctccaacaccttatgatcctagcttgttgcttcgcaagaacaagagaattgctaggaatcaactggaatactcccaaatcattggctcgctgatgtacctggctagtgcaactaggcctgatatctcctttgctgtgagcaagttgagccggaaattgagaaactccggagttataacattggattacatccaaacaactagaaacctggcagatcccttcacgaagggactatcacgaaatgtgatagacaatgcatcgaaggagatgggtttgagacccatcgaagatgctatcctgcagagcattcttgaaagaactcacctttgtgagcttgactgttggtcgcagtctatggatattttgggtgaatcttctaggaagcttactaaagaccacccgagcgtgcacctgcgatcgggagagcaggtctccggaacctctgccttcgacgccccgcactgggagaaggcagcaataaggggtgacagtcgatctacgagggctatggaatgggtgggtggcgagacggtggtgtcggtgccaccggagccacaggtggaggagcaccacgacgagcaacagaagcacatcgggcgccggctaggtgaagagaaactcatgagggctgaacattggaaatgggaaaggaaggtttgggatggcgagaatacaagggccaagaagtgtggcaaggagatggtagaaattgacaactcttgcaaggtcagggagaagccttgcaaggtcaagaacgttccaaagtactcggaacaaaatgttctagcactcaagaacgtctag

SEQ ID NO: 18115 - DNA, 1457 bp, Oryza sativa
  Clone ID: PAT_MRT4530_23701C.1
cacgaggctagttaccacagttttgcccagaacaattttacttggaccagtgaaatcgttgccgcttgctgcggataaactggggatgcaagggtcctatgcttttctggctgatgggaacaatattgctggacagttgcaacctgacctattcagcaagtgcaacagctcaaggggtttcattgtggacgtcagcaacaacttgataactggcgggattccagtcgagattggctcattgtgcagctctctagtcgttcttggtgttgctggtaatcagctctctggtttgataccaacaagtatcgggcaattgaattatcttatcagcttggatttgagtaggaaccatcttggtggtgaaattcctacttccgtgaagaacctgccaaacttagagcgcctctctttgggccataactttctcaatggtaccattccaaccgagattaatcagctgtactctctgaaggttctggacctgtcctcaaacctcctcacaggagagatccctggtgcccttgctgatttgagaaatctcactgccctactccttgacaacaataaacttactgggaagataccttctgcattcgctaaatcaatgtcacttaccatgttcaacttgtcatttaacaatttgtctggtccagtgccagcaaatagcaacacagttcggtgtgatagcgttattgggaatcctttattacaatcatgtcatatgtataccctggctgtcccatcagctgcacagcagggccgtggtttgaactccaatgactataatgatacatcatctgcggattcacagaatcaaggaggaagcaattcattcaatgcaattgaaatagcttcgataacttctgcaacggccattgtttctgtccttcttgctctgattgtgctctttatttacacaaggaagtgtgctccccgaatgtcaagtcgctcatctcgaagaagagaagttataactttccaagacatcggagtgccaatcacttatgagactgttgttcgagcaactgggagtttcaatgcgagcaattgcattggaagtgggggctttggagccacttataaagctgaaatttcacctggagtgttggtagctataaagaggctctctgttgggagattccaaggtgttcaacagtttcatgctgagattaaaactctggggagattaaggcatccaaacctggttaccttagtaggataccatcttggtgagtctgaaatgtttctcatatataactacttgcctggaggaaatcttgagaggtttattcaggagagatcaaagagacctgttgactggaagatgctccacaagattgctttggacattgcaaaagcacttgcttatctgcatgatacttgtgttcctcgtatccttcaccgtgatgtgaaaccaagcaacattttgttggacaccgagtataatgcttatctct

SEQ ID NO: 18116 - DNA, 445 bp, Oryza sativa
  Clone ID: PAT_MRT4530_23702C.1
tgaaaatgattctcaagattgatgacattatcacacagtctgactgctgaatgctgatgacaacctgcccagctggtgaatccattatttcttccttgcctctttttctcaacataaaatatgaaaaggaaaaagaaagaactggtctcttgttttgtcttgctaccatctgccaaacctttgtttcaggcaagcctgtgcatcgcatgaaaacataacaagtcacatctgaattagtgtaactttttttatggagaaggaccttttgctgtattcttttcatatgatcgatgctagtgggctgcttagtatcatacttttactggtgagctgaagttaggaacacgtttgctctgttttgattgtttgtaatattttctcttctcttagcgaggaagaaagggtttatcataatgaggaaaggttggttatctggtgaacatgg

SEQ ID NO: 18117 - DNA, 920 bp, Oryza sativa
  Clone ID: PAT_MRT4530_23703C.1
ggtcttcaattaatcttctgaaccacttccgacgctctcacgaaccttcacaacgacggaaacgacaagctaacacgcaaaacaaagaaaaagactaatacaaaccaaataaacagtacatataaagattacccaaatgatcaaccgaaaccggcgaacggaaccggcggctctgaacggctctaaactataggacgactccacaaggatgaacgaaacacggggaacacctcgtttgaacgaacgagcgaacgactcaacaacagctgcggctaaaccgggaacggaaaggaggcctcactggggaagaccgaagaggaagaggcaacggcaacgccggcgacaacgcacggagacgacgacgacgacgctagggccaaacaagattagattaaattggattaagtccctagggataaactacaccggtaaacgacatgggcgacgacggacggcgacggaagatggccggcgacgagcttcgaagggcggtgaggtactgtccacggcggcgacgactttccggcgatgtgcggcgacaacggaggggtggccaggcttcgtcttggtgctgcgatgccgaaggagggagcagctctgaccagggacagccggaacgacggcgaacggcggctgtagatcaaaagacggcggcaacccactggttcacgacgaggacggcttccggcgagatttcggtgcaagggaaccggctgccgggcttctcctcctccttgcgaatccaacggcggcggcggcgcgaccgaaggagacgatggacgacgacgaacggcgtggctggagcggcggccggcgcttggagagagaaagcgagctcggggaggggcggctagggcacttcgaaggacgggacttgaggggataggtagaggacgactagggggtcctttatataggca

SEQ ID NO: 18118 - DNA, 401 bp, Oryza sativa
  Clone ID: PAT_MRT4530_23704C.1
gggttgggttttttttttttttgttttttttttttgggggccccacttttataccaatatgggacccttttaaactactttgggtaaaaggaggggtgcgtaaaaaaaacaattattttcactttccaaatattttacatagcaaactcaaaacaggctggcctagctaagtttaaatacacaacaaaacccaaactttttccaggatttcccaaaatgagagtttaagtactttatgaagctgctaccatcacattttaattacataaaatccaacatcagggattggtccaaatgacaaactataaccttttttgaccgaaaaaaagtggcggcccgataaaaaaaccctgcttttcccctccccgtcgcctttgggttgcgccgcccgccccgacccc

SEQ ID NO: 18119 - DNA, 354 bp, Oryza sativa
  Clone ID: PAT_MRT4530_23705C.1
ctaccgcaatgttcgcctgcgctctcgccaccgcacgaagactccggcctccgctctatttgctcctcctcgctccgcacatcctccctcctcgcgtgtccccgccgccaccgcactccaccgctgcccccaccggagcctaggtcttccgccgccgccgcgctccaccgttgcgcccgccggagctgaggtcgtccccagccgctgccgcaccgacgccgtcgcctgccgtttgctccgcggctcttcccattccttggaggtcgcacgcctatggcaccatcggtcaccgccgcacatactctttgccgccccttcctctccctccatcacccgcagcgagaaaacctccat

SEQ ID NO: 18120 - DNA, 285 bp, Oryza sativa
  Clone ID: PAT_MRT4530_23706C.1
ccgtgggaagtcgccgttgctgccggatccgcttgcgggaagtcgctgatgtcatcagatccacccgcgggaagccacacgacgccaccagatccacccgtggaagccagtggaggatgccatcgctcgtggtggggggagggggctgccgctgcccatgctaagggagggcgccgccgccgccgccactcgcagggccacatcactgttgggccacgcacgtttgatgggccaagggcaagccggtgggtccaacacaacgcagcgaggaggagttgggggaga

SEQ ID NO: 18121 - DNA, 456 bp, Oryza sativa
  Clone ID: PAT_MRT4530_23707C.1
atggttgatgactctaaaagacgctatcatactggagtatctcctatgtatgcggcgctgtactcaaccggcgttcgtcctttgacatgggaacagcggtcgactacaatacgtgccaccctcgacgacggccgcggcggggacggtgacccgttgcaatcagagaaggacgcggcagctgcctgcggcgagggaggcaagcggcagcggaggcaaaggccaagggccaatgacccaattaatgtccaaacaaatgatgcatccttggtaaaggcttttgtggactatccaaattttgctgcaatatccagccctgatactttcctagctagcaccatgcattgtcacgggtttgtcacagtgggcagcgtcttctccgtcgatgtttttcaagggtcggccaaagggtttgaaaagccggagtacaattcaattgttgagatcgatcggatcgag

SEQ ID NO: 18122 - DNA, 115 bp, Oryza sativa
  Clone ID: PAT_MRT4530_23708C.1
gcacgaggctatatattagggacatgcttgccgtcgcgtctcgtcttctcatggttgcaactctccaagaatcatctcaagtgtaaacacgtacgcgctgcaaccttatttccca

SEQ ID NO: 18123 - DNA, 301 bp, Oryza sativa
  Clone ID: PAT_MRT4530_23709C.1
ggtggttaagggtgctcgattgcgctgttgaactatcaatctaatagtataggcgatcatgcatatgatagcacctgtgcatgcggacgatgtcagtcatatttggtagttggattgatagagtgtgcttgtggaggctatacacagggtggctgggtgcgtaccgattcatgcattgcacgccacacggcataatctgtgagactaggccacgtaggaatgtgaagactagaaagctgtgaacatgatcgtgagtgtgaattgattatactgagcctatcatacttaataggcagcttaa

SEQ ID NO: 18124 - DNA, 145 bp, Oryza sativa
  Clone ID: PAT_MRT4530_2370C.1
cgctaaattgtgtggcgctgaacttagacacctcagcgccacgtcaactggcgctgaatgtcgtgccaccacggatggaaggctgagtcagcgtgctaccatggtatctaagttcaacgctacacgatttggcgctgaaaaaagg

SEQ ID NO: 18125 - DNA, 303 bp, Oryza sativa
  Clone ID: PAT_MRT4530_23710C.1
atgccgcctacctgtgcggggaaatccctctgcagtgcaacgccgacctgcggggcgacggcgattgacggcgacctgccgggacggcgcgggggcggcggatggggaagcgacgtggcgaggaagggatggggacgccggggaggcaagcaggcggggcggcagatggggaagtggcgcggcgaggaggggatggggacagctcaggggtatcgcaatgggggcgccgacggtggaggcgttgtgggggcgcggcgatgggggcggcgcgatgtgggaggcgtggtgggggaggcagagtag

SEQ ID NO: 18126 - DNA, 1025 bp, Oryza sativa
  unsure (1)..(1025): unsure at all n locations
  Clone ID: PAT_MRT4530_23711C.1
atggagaaggccgcgccgcgcggacgcgcgagaaaaaaccgctcctcctcctcttctccgcgtccccaccacgtgctccacctccggggccccactctcttcgttgcgcccccaccacgccccgcgtccgcgcctcccctgcctcctcaactcctcgtcatcgtcggttcccctgtgtgcctccctcgccgccgcggccgccgggggcggttccctactctgcctcccccaccacgcctcccacatcgcgccgcccccatcgccgcgcccccacaacgcctccaccgtcggcgcccccatcgcgacacccctgagctctgcaacgccgccgaccgccgctcctgctcgccctcatctacgacgccgccgtcacgcccctctcttcgctgcgctgcctccctcccccgcgtccccatcccctcctcgccgcgccacttccccatctgccgccccgcctgcttacctccccggcgtccccatcccttcctcgccacgtcgcttccccatccaccgcccccgctgcgcgcctcacgccgcaaccccgcagcggaacccaccggcgagctaaccgccgtcccggcaggtcgccgtcaatcgccgtcgccccgcaggtcggcgttgcactgcagagggatttccccgccgaacggtcgccgcagcaggtctacgccaccttcttcccacgccgactccatgtctaatccctacctcaccacagggattttgtctttgaagaagtgaagcaattggagatttattaaatctaaggctacatgctaggctgctatgaggtaatctgaggaattcaaatttatatattggctgtgttctggaaaaatatctgacagtttagcacctcaagagaggacattaatttgtaatatatgactcctgcatttccttttacctcaagttcaggagtactcacatgagttctctccccatgctaatgctnatatgaaatttgataatacatttcaaaaatcnaatgcatcccagttcagggagattcaccatgagtctga

SEQ ID NO: 18127 - DNA, 411 bp, Oryza sativa
  unsure (1)..(411): unsure at all n locations
  Clone ID: PAT_MRT4530_23713C.1
atggagctaacttcacccttacatagtgttcaagtgactagctttctgtatcatatcaacgctacatttcaggattcatgtggcagccacgctggcggcggcggcgtgacggcgacaaccggcggcggcggcgtgccgcgccgggggcgaggcgaggcggccttggggcgccggcctgggcgcgccgccggcaaggcgacgcgagacgaancgaggcggcggtggcacgccggcgatggcgccgacccgacggcggcggcggcttccgcgcccggcctgggcacgccagcttgggcgcgccgccggatctggcgaggcgagacgaccggcggcggcgcgccggcgatggcgacgaccggcggtggcgcgccggcgacggagacggagacgaccggcggcggcggcagctag

SEQ ID NO: 18128 - DNA, 273 bp, Oryza sativa
  Clone ID: PAT_MRT4530_23716C.1
atggagatggcggcggcggtgttatcgtcctcggtgtcatcggcctcggcggcggcggcgtgtcacgcccagaaattcccgaatagaattccaagcagaatgtgcattaaaacccccgtccaggaccggccggggtacacaaacgacaatgttgacatacagatccaccgggaacaccactccacaggcatcctcgacggcacggacgaagcctactcctcggagaacccaccatcggacacatactcatactccggggttgggggaaaatag

SEQ ID NO: 18129 - DNA, 329 bp, Oryza sativa
  unsure (1)..(329): unsure at all n locations
  Clone ID: PAT_MRT4530_23717C.1
agtagctaatcattaatcaccactcgtaacagtgcgcaatcgtttattattccttatttacacaaagggtgtgcacaaggatcattggctattaggcaaatctatcctgctagctatactgaggtacaagcaaatatgtgtgtccggacgcttattatggctcaagaatgaacattaaagaggggttcagcgtcatgcttgctcactatgtgctgggtgaacagcacacagtgacttgacgcagacatgtagaaatgttatcagctggtatatgatatcnaggtcaacctactgtcaggactcaccacggtggcacatgaactacacga

SEQ ID NO: 18130 - DNA, 549 bp, Oryza sativa
  unsure (1)..(549): unsure at all n locations
  Clone ID: PAT_MRT4530_23718C.1
ccacgcgtccgcagggaaccgtcgccgccgggttaccgccggtgttcgccgttgggccactcagcccggcgcccattccggcgaaagattcaggcagctacttgccgtggctcgacgcgcagccggcgcggtcggtggtttacgtcagcttcggcagccgcaaggcgttgccaagagaccagctgagcgagctcgccgccgggctagaagcaagcggccaccgtttcttgtgggtggtgaagggcgccgtcgtggacagagacgacgccggcgagctcaccgacctgctcggagaagccttcctgcagagaatccatggccgtggcctcgtgaccatggcgtgggtgcgtcaagaggaggtcctgaaccacccctccgtcggtctgttcatcagccactgcgggtggaactcggtgacggaggcggcggcgagcggcgtgccggtggtggcgtggccgaggttcgccgaccagcgggtgaacgccggncgtggtggcgcgcgcggggatcggcgtgtgggtggacacctggagctggagggggaggatg

SEQ ID NO: 18131 - DNA, 467 bp, Oryza sativa
  Clone ID: PAT_MRT4530_23719C.1
acccacgttttgaagaagccaagcagcttataaggagtggtgcttttggcacctatgactatgctcccctcttggattctcttgaaggaaattctggatttggtcgtggtgattatttcctcgttggctatgatttcccaagctatattgatgcacaggcccaggttgatgaagcctacaacagcggcagcgtcggagcgagcggcgagcggcagcggcgggcggcgagcggcggcggcggagcggtggcggcagcgtgcggagcggcggcgagtaacaacggcagcagcggcgagcggcagcggcggcggagcgacggcagcggtgagcggcaacggcggtgcggcggcggcagcattgcggagcggcggcgagcagcagcggcgtcgagcagcaacggcgccgcagcggcagcagcagcggcggtgacggcgccggagttgaagcagcggggagagagagcttga

SEQ ID NO: 18132 - DNA, 300 bp, Oryza sativa
  Clone ID: PAT_MRT4530_2371C.1
atggctgtgggaggcagcagctcggcggtgggcggcgaggcggcggcggtgccaccgaagccacagggtcggaagctggcggtggctggtggtggcgccccgccgctggagacggggaagacagtcgtcatcggcttgaggaaagaagaggagagggaggtggagggggaaggggaggggagggtgctggccgaggggacctcgccggcgccgttgactcccttcggccagccagcgaggcgggcggcggcgcgttggggtggtggcggcgggggatcaggcggtgcggaggtggattag

SEQ ID NO: 18133 - DNA, 474 bp, Oryza sativa
  Clone ID: PAT_MRT4530_23720C.1
caaaaaacaaaaaaaatctaaaaaggggggccaaaaaaacccccaaaaaaaggtttgggaaggacaaagggagccctaatttacccccggggttatccccccaaaaaacccccaaaaaataaatgggtggctggcccacccggagggggacctttaacaaaaaaaaatttttgagggggaaaaaattatcaggcccccaaggggaaaagcccccgggttaataaaaaaaacggggaaccccctttgggattaaaagccggccgaaaagttttgggggaaaacctcgccaacaacccggaaccccccgtttttaaaaaggaaacggacgaaaaagggccccttgacccccccctccctttggagccaccaggggtaaaccaaaaacccttgggggccccccaagtcctggccgcccttttcttggacccccccccaaaaaagggcaacgtgggggacaaccctaaaactttttcc

SEQ ID NO: 18134 - DNA, 1034 bp, Oryza sativa
  Clone ID: PAT_MRT4530_23721C.1
cggaaacaccctcgacccagcgtccgcttctcccttcactccgctagggttttaccccgcgatggccgccgccgccgccgccgccgcgcggaggctcctctcccgccgcgccacctccttctcggcctccgctctcctccgccgcggcggccccggtgcgccggagtcgctgctgcgccccaccgtcgccgcggtctcgcgcgtcggcttccttcgcgggttcgcgcggcggccgggcggcgatgggtactccccgatgcggtccggtggcggcggaggaggaggcggagaccgcgcgccgacggagatggccccgctgttccccgggtgcgactacgagcactggctcatcgtgatggacaagccaggcggggagggcgccaccaagcagcagatgattgactgctacatccagaccctcgccaaggtcctcggaagtgaggaggaggcgaagaagaagatctacaacgtctcctgcgagagatactttggtttcgggtgcgagatcgatgaggagacgtccaacaagctggaagggcttcctggtgttctgtttgtcctccctgattcctatgtcgaccctgagtacaaggactatggagctgagctcttcgtcaatggagagattgttcagaggtccccggagaggcagaggcgggtagaacctgtcccacaaagagcatcagataggcctaggtacaatgacaggacccgatacgcccggaggagggagaaccaacggtgatctgattatcagaagccaaataacaaagccgcctgggtggcttgaggccttactagcatatgctgaatggaacaatctaaaaattgctttaatagttttgtcgctggtattgctatttttcatgctggtgattctcacatctttggatgtatcgcattctgtaattactggaaaacttgaaagtacctggcttggaatgcattgctgctgctgaactcttcggccatgtgcacacttgtaaatcagttagatgattttcacagcgagctaaaaaaaaaaaaaaaaaaaa

SEQ ID NO: 18135 - DNA, 434 bp, Oryza sativa
  Clone ID: PAT_MRT4530_23722C.1
cgacgtacgcgtcgaatggtccgcaaaattggctcctcatccttgcacagatgcagcctccttttgtagttttgttttgctgcgggaaattcagatttgttttcttttggaaacattccgaaaaatccgatgcgtgaaaatggtgtggagtccggataagttacacgcgacttatccggttcggttatgcggagtggagatcgtgcggcgccctgatcaagcgacctatctctatataaaccgagccgccgcttacatacaacacacgcgaaatcaatctaaggcggcaataaggtttttgggaagcgcttcgcgcgactgctccctgttcgtccgcgacggctcgccttcctcttagctcgcatgctgcacgccttcgtcgatgcccgcaaccgcgagtagttcctgccgagcaaccggtctttccgccacct

SEQ ID NO: 18136 - DNA, 429 bp, Oryza sativa
  Clone ID: PAT_MRT4530_23723C.1
acagccaggaaaccaaactcagattactggttgccaaccagacagaattttatgcacagagtacaggaaatgctggggggccattctgtaagaggataaatccaggcaatggatgactacccagcagatgactactgtttgttcccccaactaatgtatgagaaaaggcagtacactcatcgactcatcgggggggaggatattgaagatatgttctccaaggccggatgacggattaaccaaggcgaaaaaccgagggaaattcagtgcatgaagtacaagagggagatgatcagattactgacgagatcatgcttcccatcctatgagaacgggggcccgagcaacacggttgacaccgagggtgaaggggcccatgcggaggccggaggggaggctcttgtacatatgctttaaatccctggaccc

SEQ ID NO: 18137 - DNA, 744 bp, Oryza sativa
  unsure (1)..(744): unsure at all n locations
  Clone ID: PAT_MRT4530_23724C.1
tcacatggtcttctcgttcatcaaatggacgttaagacagcttttcttaatggagagctggatgaggagatctatatggatcaacctgatgggtttgtagttgaaggtcaagaaggcaaagtgtgcaaattgttgaagtctttgtatggtctggctagtgcaactaggtctgatatctcctttgctgtgagcaagttgagccggtttacctctaatccgggagatgatcactggcgtgcgcttgagcgagtaatgcgctatctgtcggtcgtcttcctcctctagccggttggagccgagccccaaccgccggcgccccacctccccacgccgcccgccttctccgcccctcttcgcgccccactccgcgcccgcgtcgccgcccaccttccccacatctcccggcccgtgcgcgcgctcgagagggcgggattcnatttngaatcccacccctctctctctctccccccacctttccacgtcgccggcgcaatagggtgggttcccggccacgtccgcctccccctccgctctcccgtgccgtctaccgccctcgcgccgcgcacccgagctccgccgcccgccgcccatctccggccgcgcgccgccgccgctagagccaccgccgcgccgcgtagtcgccaccgtcacgctcaccgagcccgcttgcacctcggccaccattcggttgccgccaatcgtcgccggagcgccgtttctctcgcacgccggtgagctctccat

SEQ ID NO: 18138 - DNA, 690 bp, Oryza sativa
  Clone ID: PAT_MRT4530_23725C.1
ctaagcctctgaccagttgggtgggaaagatagtgatgctaacttaaggtggtgacaatccaaatctttcttgccaagcacaattagagccgcatgaggttcaagaaattctccaaaacctaatacctcgcccaaaaacggcggatcagagggaactcctataccagagaactcatatatccactgctttgctgcagtctgctccaggatctcatccatctgcctgcgaaacaacatgaggcgcccgaccgccctcccggtcatcctccccgccaccctcgcgatcttgatcatgtcgctgcgcttcatcatgagggagcacgccccaaggatgaccacgagctggccggtggagaaccccagcatcttgcctccccacgcgaatcaccggccgccgccgagaaggggaagaggaatcccgcctttcaaccggctcctggtagaagatggaagccctcgaagcccgcacgtttcttggagaaagcgcgccgagcggggataacccccgccccggcgccgccggcgagcgggcggcgggggcgggtcgaggtttggcctacggggcaggcccgcgcgccgcccgtgcaagggatcaagcctcgccggagttggctgaggcttagggtggacgcgaccgaatcgcggcggcgcggggggttgccggcggcgagggaggaagaagaggagaag

SEQ ID NO: 18139 - DNA, 2001 bp, Oryza sativa
  Clone ID: PAT_MRT4530_23726C.1
atggaggacgccaaagctctgcgacgtctcctgaacgacaccgacctcgatcttgtcagtgatcgggaaagacaagcctactacatgctgagtgaccgggagtatgctcacatgcgagaatacgctccggagctgctgaaaaagataggaatacggttgatctacaccggcaagatcaacaacccacggagaggcgtgcacctgcgatcgggagagcaagtctccggaacctctgccttcgacgtcctgcaccgggagaaggcggcaataaggtttttgggaagcgcttcgcgagactgctccctgttcgtccgcgacggctcgccttcctctccgctcgcgtgctgcgcgccttcgtcgacgcccgcaaccacgagtagttcctgccgagcaaccgatctttccgccacctcgtggcttggcgatcgtctggtcgaggtgtatatgcatatgaccgacgctaaggagttgtgggatgcactgaatactaaattcggtgctactgatgctagcaatgatctatatatcatgcagcagtttcatgactacaagatggctgacaaccgttctgtagtcgaacaggctcatgagatacaaaccatggctaaggaacttgaactccttaagtgtgtcttaccagacaaatttgtggccgggtgtattattgcgaaactacctccatcttggagaggtttcggtactgcactcaaacacaagagacaggaatactccgttgaggggttgatagcgtctcttgatgttgaggagaaagctcgggaaaaagacaccgcgtctaagggcgatggtgggcagtgcagtgccaatgttgtgcacaaggccaagaacaagagcaaggggaaatacaaagctcaacagaccaccaacttcaagaagcagaagaagaacaacaacaatcctaaccaacatgagaggacttgctttgtgtgtgggcaacctggtcatctagctaggaagtgtccacagcgcaaggggatgaaggcacctgcagggcagacttctaagtctactaatgtgaccattggcaatactggagatggaagtgggtatggtaattttcctactgtcgcacggggttccaccgtcctaatggggaatgggtcacatgcttctgttcatggtgttggcacggtagatctgatgtttacctcgggaaagatcgtgcagctgaagaacgtgcagcatgtcccttctatagacaggaatcttgttagtggctcctactactggaaggaggctgtccgtagtgaaatggattccattatcgctaacgggacttgggaggtgacagagcgaccctatgggtgtaaacctgtggggtgcaagtgggtgttcaagaagaagcttaggcttgacgcctcacatggtcttctcgttcatcaaatggacgttaagacagcttttcttaatggagagctggatgaggagatctatatggatcaacctgatgggtttgtagttgaaggctttgcagtcaatgaggcaaacaaatgtgtgtactatcgccatggtgggggtgagggagttattatgtgcttgtatgttgacgacatactgatatttgggacaaaccttgagatgataaatgagtcccattatgtggagaagatcttgaatcgctttggctacattgatagtaagccttctccaacacattatgatcctagcttgttgcttcgcaagaacaaaagaattgctaggaatctactggaatactcccaaatcattggctcgctgatgtacctggctagtgcaactaggcctgatatctcctttgccgtgagcaagttgagccggcgtgcacctgcgatcaggagagcaggtctctggaacctctgccttcgacgtcctacactgggagaaggcggcaataaggtttttgggaagcgcttcgcgcgactgctccctgtttgtccgcgacggctcgccttcctctccgctcgcgtgttgcgcgccttcgtcgacgcccgcaaccgcgagtag

SEQ ID NO: 18140 - DNA, 2892 bp, Oryza sativa
  Clone ID: PAT_MRT4530_23727C.1
atggtggtgcggatcggagaagaagtcgggagtggagcggggaaggcggtggcgtggccaggaaggaggagggcgatgcgtgcgcgaccatgggaggaagtggcggcgcggccgggggaggaggccgatacgcgtgcagctagggaaggagaagattactccatcccgctcgccggcgtgcacctgcgatcgggagagcaggtctccggaacctctgccttcgacgtcctgcaccgggagaaggcggcaataagaaaaatccggttaaatcattatatgcctataatctcaacaatccaaaaaccttattataggcactgtgattttactatggctggttttgccgatgcactgaggccggataaattcaccggtgtgcattttaagagatggcagattagagtcactctgtggctgacagctatgaaatgcttctgggtgagtactggcaaacctgaaggagttcttactgctgaacagcagaacattcttggcgatcgtctggtcgaggtgtatatgcatatgaccgacgctaaggagttgtgggatgcactgaatactaaattcggtgctactgatgctagcaatgatctgtatatcatggagcagtttcatgactacaagatatctaacaaccgttctgtagtcgaacagactcatgagatacaaaccatggctaaggaactcgaactccttaagtgtgtcttacccgacaaatttgtggccgggtgcattattgcgaaactacatccatcttggagaagtttcggtactacactcaaacacaagagacaggaatactccgttaaggggttgatagcgtctcttgatgttgaggagaaagctcgggaaaaagatgccgcgtctaagggcgatggtgggcagtccagtgccaatgttgtgcacaaggcccagaacaagagcaaggggaaatacaaagctcagcagaccaccaacttgaagaagcagaagaagaacaacaacaatcctaatcaggatgagaagacttgctttgtgtgtggccaacttggtcatctggctaggaagtgtccacagcacaaggggaagaaggcacctgtagggcagacttctaagtctgctaatgtgaccattggcaacactggagatggaagcgggtatggtaatttacctactgttttttcagttaatcagtctactaattggtgggttgatactggggccaatgtacatgtttgtgctgacatctcattgttttcttcttatcaggtcgcacggggttccaccgtcctaatggggaatgggtcacatacttctgtttatagtgttggcacggtagatctgaagtttacttcgggaaagatcgtgcagctgaagaacgtgcagcatgtcccttctatcgacaggaatcttgttagtggctcccgtctgactagagacgaatttaagttggtttttgagtctaataaagtagtcgtgtctaaacatggaaattttattggtaaaggttatgagtgcggaggcctgttccgcttttccctttctgatttctgcaataattctgtgaaccatatttgtggcagtgtggatgatgaggctaatgtttggcactcacgtttatgtcatagtaattttggcttgatgtctcggctttccagcatgtgtttaattcctaagttttccattgtcaaaggttctaagtgccatagttgtgtgcaatcgaagcaacctcgcaagcctcacaaggctgccgaggaaagaaacttggcaccactagaattcctacattcagatctttgtgaaatgaatggggtgttgacaaagggtggaaaacgatatttcatgactttgattgatgatgctactagattttgctatgtgtacttgttgaaaacgaaagacgaagctctagactattttaaaatttataaggcagaagttgaaaatctacttgacagaaagataaaaagacttagagttcctaacagaaataagggcaaaacaccatatgaaatatggattggaagaaaaccatcactttcttacttgagcacatgggggtgcttggcgaaagtcaatgtaccaataacgaagaagcgcaaacttggacctaagactgtggactgtgtctttctgggatatgcttatcacagtattgcctatagatttttaatagttaaatctgaggtacctgacatgcatgttggtacaattatggagtctcgtgatgctaccttctttgagagcttttttccaatgaaggatacacatagtagttcgagccaaccatctgaaataattcccagttcaatcacatcaccagaacaaactgaacatacacatgaacatgtcactgaggaggatgacagtgaagctcctcgaaggagtaagagacaaaggacggctaagtcttttggtgatgatttcactgtgtacctcgtggatgacactcctaagtcaatttcagaagcatatgcatctcctgatgcagactactggaaggaggctattcgtagtgaaatggattctattatcgctaacgggacttgggagtgggtgttcaaaaagaagcttaggcctaacggtactattgaaaagtacaaggctcggcttgttgctaagggctatactcagaaagaaggcgaagatttctttgacacttactcacctattgctagattgaccacaatttgtgtgctactttccctagcagcctcacatggtcttctcgttcatcaaatggacgttaagacagcttttcttaatggagagctggatgaggagatctatatggatcagcctgatgggtttgtagttgaaggtcaagaaggcaaggctttaattagcgaagatgttgtcctgcagagcattcttgaaagaactcacctttgtgagcttgactgttggtcgtag

SEQ ID NO: 18141 - DNA, 263 bp, Oryza sativa
  unsure (1)..(263): unsure at all n locations
  Clone ID: PAT_MRT4530_23728C.1
aagactctggcccatntngttggattttttggaaggtttggaaccgcttttcgacgcaattggcatttacgtccccccctnattncccagtggtcaaagaatttccnccctncttcccatatttncgaaataatntcccatggggtggtgntctttcatgcaatcccccccttgtctggggtacgtgtgcacccgatccgtagtncaataaagttggcgatatatatgttgtcccaaaaaaaaaaaaaaaaaaaaaaaaaaaa

SEQ ID NO: 18142 - DNA, 5205 bp, Oryza sativa
  Clone ID: PAT_MRT4530_23729C.1
cccttgcgcagatgcagcctccttttgcagttttgttttgctgcgggaaattcggatttgttttgttttgccttttgcagttttgttttggttttgttttgctgcgggaaattcggatttgttttgttttgccttttgcagttttgttttgctacgggaaattcggatttgttttattttggaaacattccgaaaaatccggtgcgtgaaaacggcatggagtccggataggttacgcgcgacttatccggttcggtttacgcgggcgccctgatcaggcgatcgtctggtcgaggtgtatatgcatatgaccgatgctaaggagttgtgggatgtactgaatactaaattcggtgctactgatgctagcaatgatctatatatcatggagcagtttcatgactacaagatgactgacaaccgttctgtagtcgaacaggctcatgagatataaaccatggctaaggaactcgaactccttaagtgtgtcttacccgacaaatttgtggccgggtacattattgcgaaactacctccatcatggagaagtttcggtactgcactcaaacacaagagacaggaatactccgttaaggggttgatagcatctcttgatgttgaggagaaagctcgggaaaaagacgtcgtgtctaagggcgatggtgggcagtccaatgccaatgttgtgcacaaggcccagaacaagagcaaggggaaatacaaagctcaacagaccaccaacttcaagaagcagaagaagaaaaacaacaatcctaaccaggatgagaggacttgctttgtgtatgggcaacctggtcatctggctagaaagtgtccacagcgtaaggggatgaaggcaccttcagggcagacttctaagtctgctaatgtgaccattggcaacactggagatggaagcgggtatggtaatttacctactgttttttttgttaatcagtctactaattggtgggttgatactggggctaatgtacatgtttgtgctggcatctcattgttttcttcttatcaggtcgcacggggttccaccatcctaatggggaatggtgttggcacggtagatctgaagtttacttcgggaaagatcgtgcagctgaagaacgtgcagcatgtcccttctatcgacaggaatcttgttagtggctcccgtctgactagagacggatttaagttggtttttgagtctaataaaatagtcgtgtctaaacatggatattttattggtaaaggttatgagtgcggagacctgttccgcttttccgtttctgatttctgcaataaatctgtgaaccatatttgtgctagtgtggatgatgaggctaatgtttgacactcacgtttatgtcatattaattttggcttgatgtcttggctttccagcatgtgtttaattcctaagttttccattgtcaaaggttctaagtgccatagttgtgtgcaatcgaagcaacctcgcaagcctcacaaggttgccgaggagataaacttggcaccagtagaactcctacattcagatctttgtgaaatgaatggggtgttgacgaagggtggaaaacgatatttcatgacattgattgatgatgctactagattttgctatgtgtacttgttgaaaatgaaagacgagactctagactattttaaaatttataaggcagaagttgaaaatcaacttgacagaaagataaaaaggcttaggtctaatcgtggtggagagtttttctcgaacgagtttgacttattttgtgaggaacatggcatcatacatgagaggacgcctccctattctcccgaatctaatgggattgttgaaaggaagaaccgcacactgactgacttggtgaatgccatgttagacaccgcgggactacctaaggcatggtggggggagggattgttgatctcgaatcatatgttaaacagagttcctaacagaaatagagaccaaacaccatatgagatatggattgggagaaaaccatcactttcttatttgcgcacatgggggtgtttggcgaaagtcaatgtaccaataacgaagaagcgcaaacttggacctaagactgtggactgtgtctttctgaaatatgctcatcacaacattgcctatagatttttaatagttaaatccgaggtacctgacatgcatgttggtacaattatggagtctcgtgatgctaccttctttgagagctttttcccaatgaaggatacacatagtggttcgagccaaccctctgaaataattcccagttcaatcacaccaccagaacaaattgaacatacacatgaacatgtctctgaggaggatgttagtgaagctcctcgaaggagtaagagacaaaggacggctaagtcctttggtgatgatttcactgtgtacctcgtggataacactcctaagtcaatttcagaagcatatgcatctcctgatgcagactactggaacgaggctgtccgtagtgaaacgggacttgggagattgaccacaattcgtgtgctactttccctagcagcctcatattgtcttcttgttcatcaaatggacgttaagacagcttttcttaatggagagctggatgaggagatctatatggatcaacctgatgggtttgtagttgaaggtcaagaaggcaaagtgtgcaaattgttgaagtctttgtatggtctgaaacaagctcctaagcaatggcatgagaaatttgacaaaccattgacatctacaggctttgcagtcaatgaggcagataaatgtgtgtactatcgccatggtgggggtgagggaattattctgtgcttgtatgttgacgacatacagatatttgggacaaatcttgaggtgataaatgaggttaaatcattcttgtctcaaaattttgatatgaaggatttgggagtagttgatcttatcttaaacattaagctaattagaggtgagaatgggattacactcttgcagtcccattatgtggagaagatcttgaatcgctttggctacattgatagtaagccttctccaacaccttatgatcctagcttgttgcttcgcaagaacaaaagaattgctaggaatcaactggaatactcccaaatcattggctcgctgatgtacctggctagtgcaactaggcctgatatctcctttgctgtgagcaagttgagccggtatcctgtggtactggagggatatagtgattctaactggatctttgatgtggatgagatcaaagccactagtggatatgtcttcacactgggtggtggtgctgtttcgtggaggtcttgcaaacagaccattttgacgaggtcaaccatgaaagcagagctgacggcactggatactgctactgctgaggcagaatggctgcgtgatctattaatggatctgcctattgttgaaaaaccagtgccggctatccttatgaactatgataatcaaacgggtttgcttgctgctctgtactgcgccgtcgctcgtagattactccatcccgcttgccggcgtgcaccggcgatcgggagagcaggtcttcagaacctctgccttcgacgtcctgcaccgggagaaggcggcagtaaggtttttgggaagcgcttcgcgcgactgctccctgttcgtccgcgacggctcgcctacctctccgctcgcgtgctgcgcgccttcgtcgacgcccacaaccacgatgctttgtattggtgggatgattggaagctccgcatccttgtccttggaagcaacacgatacagttgttcctctttatatatggaggtgtccgctggcatcgtatctcgctgtggttcaggctatgcatctggcttgcatacatcggcggtgactccctggcgatctacgcccttgccaccctcttcaaccgtcacaagcatgaggctcctgcagcgtcggagctggaggtgctgtgggcgcccatcctcctgattcacctctctggccaagatatgatagcctcctacagcatccaggacaactatctatgatggcgccaagtcgtcaccttgaagatccttctgaaagctgcggttcttctgttcattgttggcatcctcaagttttgtgccaagccctgggctctcaagagggccattataagaagcatagcaaggcaccctcctagtgtgccccgaaggaagaagctgattggatctggtggaggacagttggcagactactggaggtcatgcactactggctttatacctacagtcacaatgtttgtggtctctcgagaacttcgtgagcggccgcaacccaatgacgaaacggaagccgtcaaacaaggagaaagaaaggaaggtgggcaattccatgagaacttagaaaggtccaccgtaaaaactgccatcgaaccagtagtagaccaccaaaaaaaggaagaggaggaggaggaggaggaaaaagaagaagaagaagaagaagaagaagacctcatcaacctcaacgagtatgtggagagggctaaggagatcatgaatcgtcagggacaattgagtaaaccaactttgcgtcggctgcagtccgtgcttcagccagagttattcatggcagacgcctttgtcacctattccaaacgcctcaagatcctccaatttctgatggcaatcaacactaattacagttatagggtgattcgtgctgggctctttgatgtatatatccggctatataccagggtgagggtgaccattacgcccattgcctcttggctccggttgctttccattttactagcaacgaccgcagccggcctctacgcaagaagccacaaagacatgtacaacaaacatgatatcaccgtgacatacatcctcttcttcagtactgcgctgctggagctgatctcctccgtcaccctatgccgcttgttttttccgcttgcggtgtggccggctactgacaggaggaaccaaatggtggaccagcagagtgtgatctggtgcgctgcacggatgacgaagaagcccaactgtctcctctggctctccgcttgcatctattgcgatgcccttgtcaaccagcggtggtacatcaagcaaacaccttccatggatcggatatttgaggcagtgaagcatcatgtcattttctatggctggtccaagtacataaagagtgctgcaagctacaggaggttcaattgcatgaggggccagttggccttgaagaa

SEQ ID NO: 18143 - DNA, 954 bp, Oryza sativa
  Clone ID: PAT_MRT4530_2372C.1
atggcgggcgggcgaggagtggacaccgactggcggccggcggcggggatggctacaggcggcgggcgaggagccgcggccggaggcgggcgggcgcagagaccgaggccggcgggcgggccaggaggcgaggctggcggtgggctgagcaggctacgccgatcctccatcccgcgagctaagaagggtggcgccgccgtcgtctgtcaagctgtggtgactatggcgagcggcggcaactgcggcagggcgccaagcaaggctcttcccctctttctctctggcaccgtcgggagagcggaccccaggccggcggcgggcgttgcggaggcggtgatggcacgcggcgcggcccacgacggcgactacggcaagtggcctcccccctctctctgtctctccgtagcgccgtcgggagagcggaccccgaggccggcggtgggtgtggagggggcgttcagggcgtgcggcgtggcccatgatgaagctcacgtgaaggaatcgaccgcggccggcggcggaggtcctcccgcacctctctctcctcttcccctctctcggcgagcacggcaccccggcggtggccgaggacgacctcggctcggcggggaaggttgtctcgtcgtcgtcgtctgctgctgttgcccctacaagctcgcgccaccccctccctcgccgtcgctccccgtctctccctcccctcaccgccacccccactctaccgccgttgctgccttctctgcccgggccaccaccaccaccacactgcagccatccgcctcctgcaaaagctccatctcgcgcaactcacgcgtcgccgccacggatgcggtcgccgacaccgtgcttcgcgttcgccatcgccgctcgccctcccggcatgcccggccgtgccccctagctgatgagagagagaaaaaagagaggggtgagaaaaggaggcaagacgcttga

SEQ ID NO: 18144 - DNA, 2061 bp, Oryza sativa
  Clone ID: PAT_MRT4530_23730C.1
ctagaccgtctgtaaactacccctcatttggagcgtataagtcatactccttggtcttttagtaagcttcctagaagattcatccaaaatctccgtagactgcgaccaacagtcaagctcacaaaggtgagttctttcaagaatgctcttatgttcaatgatttgggaatattccaattgattcctagcaattctcttgttcttgcgaagcagcaagctaggatcataaagtgttggagaaggcttgctgtcaatgtagccaaagcgattcaagatcttctccacataatgggactgcaagagtgtaatcccattctcacccctacttttcctaatgtttagtataacatcagctactcccaacttcttcatatcgaaacttgccttcttgacgcgaattgtggtcaatctagcaataagtgagtaagtgtcaaagaaatcttcgccttctttctgagtatagcccttttcaacaagctgagccttgtacttttcaatagtaccgtcaggcgtaaacttcttcttgaacacccaattgcaccccataggtctacacccatagggtcgctctgttacctcccaagtcccgttagcgataatggaatccatttcactacggacaacctccttccagtagtctgcatcaggagatgcatatgcttctgaaattgactcagatttaactattaaaaatctataggcagtactgtgatgagcatatcccaggaagacactgtccacagtcttaggtctaagtttgcgcttcttcgttattggtacattgactttcgccaagcacccccgtgtgcacaagtaagaaagtgatggttttctcccaatccatatctcgtctggtgttttgttcttgtttctgttaggaactctgtttaacacatgattcgacgtcaacaatgcctccctccaccatgccttaagtagttccgcggtatgcaacatggcattcaccaagtcaatcagtgtgcggttcttcctttcggcaatcccattagactcgggaaaatagggatgcgtcctcttatgtatgatgccatgttcctcatagaataagtcaaactcgtttaagaacaactctccaccacgatcagacctaaatctttttatctctctgtcaagttgattttcaacttctgccttataaattttaaaatagtctagaccctcgtcatacccgcttccttttccagtgttaccaatggttacattagcaaacttggaagtctgccctacaggtgccttcatccccttgcgttgtggacacttcttggccagatgaagatcattgctaacatcagtagcaccgaatttggtattcagtgcatcccataactccttagcgtcggtcatatgcatatacacgtcgactagacgatcgccaagaacgttaagaatgcatcccacaaagagagtagtggcctcatcgaattctttctgctggtcagcagtaagaactcccatagttttgccagtactcagccagaagcatttcatagctatcagccacagagtgaccctgatctgccatctcttaaagtgcacaccggtgaatttatccggcttcagtgcatcggcaaaaccaatcatagtaaaaccacagtgcctataataaggtttttggattgttgaatttataagcacataatgatttaatttattccataaataaatcatgacattgaagatgtaaactagcatgaacgtatcattagatctcctccctctcgtctctctgttccgctcgaacctccctggctccacttctacacgcctctcatgtctaatagtcaaatctggcgagctcacaagataagggagcttgacggcagcaacgaaaccaacctctctgagacggctccaactgagaagaacttcaactcggaagaggaggtatgatgcaggatataaccaaaggaagctaggggttcttttgcataaagcaggcatttcaaagcagtagttgaaagcagtaaaacagccactcccgcttgtggtaagcacggtaagtctcccagggtttcccgtgaaccggtccttaactgccat

SEQ ID NO: 18145 - DNA, 2091 bp, Oryza sativa
  Clone ID: PAT_MRT4530_23731C.1
atggagtctcgtgatgctatcttctttgagagctttttcccaatgaaggatacacatagtagttctagtcaaccttctgaaataattcccagttcaatcacaccaccagaacaaactgaatatacacatgaacatgtcactgaggaggatgacagtgaagctcctcgaaggagtaaaagacaaaggacggttaagtcctttggtgatgatttcactgtgtacctcgtcgacgacactcctaagtcaatttcagaagcatatgcatctcctgatgctgactactggaaggaggctgtccgtagtgaaatggattccattatcgctaacggaacttgggaggtgacaagtgggtgtaaacctatggggtgcaagtgggtgttcaaaaagaagctgaggcctgacgcctcacatggtcttctcgttcatcaaatggacgttaagacagcttttcttaatggagagctggatgaggagatctatatggatcaacctgatgggtttgtagttgaaggtcaagaagataaggcttcgcagtcaatgaggcagataaatgtgtatactatcgccatggtgggggtgagggagttattctgtgattgtctccggaacctctgccttcgacgtcctgcaccgggagaaggcgacaataaggtttttgggaagcgcttagcgcgactgctccctgttcgtccgcgacggctcgtcttcctcttcgctcgcgtgttgcgcgccttcgtagacgcctgcaatcacgaaaagttcctgccgagtagccggtctttctaccacctcgaccacgtcaatgaagaatttatagtggggcgagctagatcaacgccaattagcctcctgcaggctctggcaacaattatcctcgccgtcgcagcagcagcagctgcagcatggctggctccgatcgccgggacgtcgtcgtcgacgtcgcgtgtggcggcggccaatggcacgtgccagtcaagggtggcaccgtttggctacgcgtgtgaagagcacacggtgacgacggaagatgggtacatcctaagcctgcagaggatcccgagcggccgcggcgagacggcagccggcggcggcggcggaggcaaggtgccggtgcttctgcagcacggactcatgatggatggggtgacttggcttatgaactcgcccaatgagtcgctaggatacattctagcggacaatgggtacgatgtctggattgccaatagccgtggcaccgtctatagccgccaccacacttcgctcgtctctagtgactcggcatactggaactggtcatgggacgagctgtccagcaaggacctatcagcagtagtgcagtacgtgtacagccaagccggccagcagaagatgcactacgtaggccactctttgggcacgttgatcgcgttggctgccctgagcgatcagcagcagcagatcgggatgctgcggtcggccggtctgctcagccccatcgccttcctcgacaagatgtcgtcgccgctggcgcgcgcggcggccgacgtcttcttggctgaggcactctactggctggggctcagtgagttcgatcctacaggagaatacgttcacagcttggtcactgacatttgcaagcaaccaggcatcgattgctacaatctgatgtcagcattcacaggtgacaactgctgcctcgacaactcctctgttcaggtcttccttgcccatgagcctcaagctacagccaccaagaacatgatccacctggctcagatgattagaggaggcacgatcgccaagtacgactacggcaatgccggcgacaacagggagcactacgggcaggcgacgccgccagcgtacgacgtgacggcgatcccgggcgacttccctctcttcctcagctacggcggcagggacagcctctccgacgtccaggacgtgagccgcctcctgcgggccctgggccagtcgcactcgcgcgacggcgacaagctcaccgtgcagtacctcgccgactacgcgcacgccgacttcgtcatggcccggaacgccggggagagggtgtatgcgcctctcatggccttcttcaagctccaggagaagtga

SEQ ID NO: 18146 - DNA, 2172 bp, Oryza sativa
  Clone ID: PAT_MRT4530_23732C.1
atgaaggagttcatcctagcacacaatgatgccatggagacaaacccagcagcagagagggacatcgcggtggcgaccgcgtcctcgcgctcgtgtggctctgctcccaacttccagcaggcgagtactggcaaacctgtgggagttcttactgctgaccagcagaaagcattcgatgaggccattactctctttatgggatgcattcttagcgttcttggcgatcgtctagtcgaggtgtatatgcatatgaccgacgctaaagagttatgggatgcactgaataccaaattcggtgctactgatgctagcaatgatctgatggttgacaaccgttctgtagttgagcaggctcatgaaatacataccatggctaaggaactcgaactcgttaagtgtgtcttacccgacaaatttgtggctgggtgcattattgagaaactatctccatcttggagaggtttcgacactgcactcaaacacaagagacaggaatactccgttgaagggttgatagcgtcttttgatgttgaggagaaagctcgggaaaaagattccacgtctaagggcgatggtgggcagtccagtgccaatggtccacaacgcaaggggataaaggcacctgtagggcagacttccaagtctgctaaagtgaccattggtaacactggagaaggaagcagaaataaggacaaaacaccgtacgagatatggattgggaggaaaccatcactttcttacttgcacatatgggggttcttggcgaaagtcaatgtaccaataatgaagaagcgcaaacttggacctaagactgtggactgtgtctttctgggatatgctcatcacagcgttgcctatagatttttaatagttaaatctgaggtgacagagcgaccctatgggtgcaaatctgtggggtgcaagtgggtgttgaagaagaagcttaggcctgacggtactattgaaaagtacaaggctcgacttgttgctaagggctatactcagaaagatggcaaagatttctttgacacttactcacctgttgctagattgacaacaattcgtatgctacttttcctagcagcctcacatggtcttctcgttcatcaaatggacgttaagacagcttttcttaatggagagctagatgaggagatctatattgatcaacctgatgggtttgtagttgaaggtcaagaaggcaaagtgtgcaaattgttgaagtctttgtatagtctgaaacaagctcctaagcaatggcatgagaaatttgatagaacattgacatctgcaggcttcacagtcaatgaggcagataaatgtgtatactatcgctatggtgggggtgagggagttattctgtgcttgtatgttgataacatactaatatttgggacaaacattgaggtgataaatgaggttaaatcatttttgtctcaaagtttcgatacgaaggatttggcagtagctgatattatcctaaacattaagctaattagaggggacaatgggattacactcttgcagtcccattatgtggagaagatcttaaatcgctttctctacattgatagcaagccttctccaacaccttatgatcctagcttgttgcttcgcaagaataagataattgctagaaatcaattggaatactcccaaatcattggctcgcttatgtacctggctagtgcaactaggcctgacatctcctttgctgtgagcaagttgagccagttttcctctaacccgggagatgatcactggcgtgcgcttgagcgagtgatgcgctatttgaaaggtactatggaattggggcttcactatactgggtatcctgcggtattggagggatatagtgattctaattggatctctgatgtggatgagatcaaagccactagtggatatgtcttcacactaggtggtggtgctgtttcacggaggtcttgcaaacagaccattttgacgaggtcaaccatggaagcagagctgacgatactggatacaactactattgaggcagaagggctgtgtgatctattgatggatctgcctgttgttgaaaaatcgatgccggctattcttatgaactgtgacaatcaaactgtaattgtcaaagtgaacagttttaaggataacatgaagtcgtctagacatgtgagaagacgataa

SEQ ID NO: 18147 - DNA, 3123 bp, Oryza sativa
  Clone ID: PAT_MRT4530_23733C.1
atggaggacaaccggagcaaggacacggcgaccaagtaccgcggcgtgaggaggcggccgtggggcaagttcgcggcggagatccgcgacccggagcgcggcggggcgcgcgtctggctcggcaccttcgacaccgccgaggaggcggcgcgtgcctacgaccgcgcggcctacgcccagcgcggcgccgccgccgtgctcaacttcccggccgccgccgccgccggcaggggtggaggagccggcggcgccgcttccgggtcgtcgtcgtcgtcgtccgcgcagcgcggcaggggcgacaagatcgagttcgagtacctcgacgacaaggtgctcgacgatctcctcgacgacgagaagtaccgtgcgagcgcgcagagagggacgagacgggaaggccggcggggctgccggcgctggggaggacaggagccccgtcctcgccggtggcggcgactgcctctccccgcgcggagccacggaccccgtgtcgactgccccttccgatgcctcaccaccggcctccgtttgggtctcctccgacctctccgcgccctcagcagcgtgtcccgctccagcacccgcaactgcgctcctcctcgttgcctcttgaaaccatggagactcaccgcccatcctatccgcttcgcctcctccgccacggtcgagctcccccgtttccatcccctctactccatcaccgccgcttctttctacgacgacggtggcttgaagacctcagaggcgaaggagatgcccctctacgttcttggcgatcgtctggtcgaggtgtatatgcacatgaccaacgctaaggagttgtgggatgcactgaatactaaattcggtgctactgatgctagcaatgatctgtacatcatggagcagtttcatgactacaggatggctgacaaccgttctgtagtcgaacaggctcatgagatacaaatcatggctaatgccaatgttgtgcacaaggcccagaacaagtgcaaggggaaatacaaagctcaacagaccaccaacttcaagaagcagaagaagaagaacaacaaacctaatcaggatgagaggacttgctttgtgtgtggccaacctggtcatctggctaggaagtgtccacagcgcaaggggatgaaagcaccagcagggcagacttctaagtctgctaatgtgaccattggcaatactggagatggaagcgggtatggtaatttacctactgttgcacggggttccaccgtcctaatgggaaatgggtcacatgcttctgctcatggtgttggcacggtagatctgaagtttacttcgggaaagatcgtgcagctgaagaacgtgcagcatgtcccttctatcgacaggaatcttgttagtggctcctgtctgactagagacggatttaagttggtttttgagtctaataaagtagtcgtgtctaaacatggatattttattggtaaaggttatggtgaagctcctcgaaggagtaagagacaaaggatggctaagtcctttggtgatgatttcattgtgtacctcgtggatgacactcctaagtcaatttcagaagcatatgcatctcctgatgcagactactggaagaaggctgtccgtagtgaaatggattccattatcactaacgggacttgggaggtgacagagcgaccctatgggtgtaaacctgtggggtgcaagtgggtgttcaagaagaagcttaggcctgacgcctcacatggtcttctcgttcatcaaatggacgttaagacagcttttcttaatggagagctggatgagaagatctatatggatcaacctgatgcgtttgtagttgaaggctttgcagtcaatgaggtagataaatgtgtgtattatcgctatggtgggggtgagggagttattccgtgcttgtatgttgatgacatactgatatttgggacaaatcttagggtgataaatgagaactttcttgaaagaactcacctctgtgagcttgattgttggtcgcagtctatgaagattttggactactccatcctgctcgctggcgtgcaccggcgatcgggagagcaggtctccggaacctctgccttcgacgtcttgcatcgggagaaggcggcaataatgtttttggaaagcgcttcacgtgactgctccctgttcatccgcgacggctcgtcttcctctcctttcgcgtgctgcgcgctttcgtcgacgcccgcaaccgcgagtagttcctgccgtgtaaccggtctttccgccacctcgcgtctcagcgcccgccgcccactcgcccgagccctcgactccacgccgccagccgccaactgtcgagacctcaactccgcgccgcttcgccggtgcccggcgccgtcccggctggccgcgcctgcggccagtgccgccaccaccgtcccctccccttcccgcgccgcgaggccgcaactccagcactccgcgtctccgcgccggcgccggcgctgccactgccgtccgcgccgtcccctcccctcctctgcgccagcgccgcgcgtcctctcctccggcctccccgccgtccgtgccgagttgccgacgtcgcgccgtgccaccgtcccctcccctcccttgcttagcccagataatgatattgtgtcgttatttcggaaacatgaagctaagaagattgcaacctcttctagctcttcgaatggcttcattggtgatgaagctcctgtacctgaagaagaaccaccacaagctccaacaattgatgatgaagctcctgtgcccgaagtcaatgcacctcattatcctatttatgatgttaatcgtcttgaaagtgatccaggcctaagacttccaatttcgagctatccggccaatgaccaagattctgttcggagagcatatattctcaagggcccttggcaaaagagcagcttgcgcgcgtgccaactagcaaccccccaagtcgccagcctccttgcctcctccctccccgccccacctccactcgccggcctctgccgattccacctccgccgtgcttccgctctcgctcgctggcctgccagcgcccgtgacagccgcatctgcggaacaaggggaaaaggggagaaggagaaggaggattggagcagatag

SEQ ID NO: 18148 - DNA, 522 bp, Oryza sativa
  Clone ID: PAT_MRT4530_23734C.1
cgccagatctgggctcgccgacgccgctggcagcctcctcccgccggcttcctcccgccgccggccgcctcctcccaccaccgaggctcgcctcctcccgccgccgccttcctctctcgtcacccacgccagccgccgagctcgtcgcctctctcgccggccgccacgctcgtcgcccgcgccggccgccgagctcgtcgcctctctcgccggccgccgcgctcgtcgcctctctcgccggccgccgagctcatctcccctctcgtcgcccacgccggccgccgagctcgtcgtccctcttgccggccaccgcgctcgtcgcctcgctcgcccaaatcagccggatccctctatccagcatgtggagggaatattcccctctgggctgccctatcccactctcgcccagcatccaaacaccctccaaaaagcggcggccatgtcttatccgggtatatcccaccaaccaaacacaccctaacttctttcagaccagaaactttaatcgctaaaatcaagcgg

SEQ ID NO: 18149 - DNA, 3925 bp, Oryza sativa
  Clone ID: PAT_MRT4530_23735C.1
atggctggttttgccgatgcactgaggccgaataaattcaccggtgtgcactttaagagatggcagatcagggtcactctgtggctgatggttatgaaatgcttctgggtgagtactggcaaacctgaaggaattcttactgctgatcaccagaagcaatttgaggaagccactactctctttgtgggatgcattcttagcgttcttggcgatcgtctggtcaaggtgtatatgcatatgaccgacgctaaggagttgtgggatgcactgaatactaaattcggtgctactgatgctagcaatgatctgtatatcatggagcagtttcatgactacaagatggctgacaaccgttctgtagtcgaacaggctcatgagatacaaaccatggctaaggaactcgaactccttaagtgtgtcttacccgacaaatttgtggccgggtgcattattgcgaaactacctccatcatggagaagtttcggtactgcactcaaacacaagagacaggaatactccgttgaggggttgatagcgtctcttgatgttgaggagaaagctcgggaaaaagacgccgcgtctaagggcgatggtgggcagtccagtgccaatgttgtgcacaaggtccagaacaagagcaaggggaaatacaaagctcaacagaccaccaacttcaagaagcagaagaagaacaacaacaatcctaaccaggatgagaggacttgctttgtgtgtgggcaacctggtcatctggctaggaagtgtccacaacgcaaggggatgaaggcacctgcagggcagacttctaagtctgctaatgtgaccattggcaacactggagatggaagcgggtatggtaatttacctactattttttcagttaatcagtctactaattggtgggttgatactggggccaatgtacatgtttgtgctgacatctcattgttttcttcttatcaggtcgcacggggttccaccgtcctaatggggaatggatcacatgcttctgttcatgtagttggcacggtagatctgaagtttacttcgggaaagatcgtgcagctgaagaacgtgcaacatgtcccttctatcgacaggaatcttgttagtggctcccgtctgactagagacggatttaagttagtttttgagtctaataaagtagtcgtgtctaaacatggatattttattggtaaaggttatgagtgcggaggcctgttccgcttttccctttctgatttctgcaataagtctgtgaactatatttgtgccagtgtggatgatgaggctaatgtttggcactcacgtttatgtcatattaattttggcttgatgtctcggctttccagcatgtgtttaattcctatgttttccattgtcaaaggttctaagtgccatagttgtgtgcaatcaaagcaatctctcaagcctcacaaggctgccgaggagagaaacttggcaccactagaactcctacattcagatctttgtgaaatgaatggggtgttgacgaagggtggaaaacgatattttatgacgttgattgatgatgctactagattttgctatgtgtacttgttgaaaacgaaagacgaggctctagactattttaaaatttataaggcagaagttgaaaatcaacttgacagaaaaataaaaaggcttaggtctgatcatggtggagagtttttctcgaacgagtttgacttattctgtgaggaacatggcatcatacatgagaggacgcctccctattctcccgagtctaatgggattgctgaaaggaagaaccgcacactgactgacttggtgaatgccatgttggacaccgcgggactacctaacgcatggtggggagaggcattgttgacctcgaatcatgtgttaaacagagttcctaacagaaataaggacaaaataccatatgagatatggattgggagaaaaccatcactttcttatttgcgcacatgggggtgcttggcgaaagtcaatgtaccaataacgaaaaagcgcaaacttggacctaagactgtggactgtgtctttctgggatatgatcatcacagcattgcctatagatttttaatagttaaatccgaggtacctgacatgcatgttggtacaattatggagtctcgtgatgctaccttctttgagagctttttcccaatgaaggatacacatagtggttcgagccaaccttctgaaataattcccagttcaatcacaccaccagaacaaactgaacatacacatgaacatgtctctgaggaggatgtcagtgaagctcctcgaagaagtaagagacaaatgacggctaagtcctttggtggtgatttcactgtgtacctcatggatgacactcctaagtcaatttcagaagcatatgcatctcctgatgcagactactggaaggaggctgtccgtagtgaaatggattccattatcgctaatgggacttgggaggtgacagagcgaccctatgggtgtaaacccctggggtgaaagtgggtgttcaagaagaagcttaggcctgagggtactattgaaaagtacaaggctcggcttgttgctaagggctatactcagaaagaaggcgaagatttctttgacacttactcacctgttgctcgattgatcatattttgtgtgctactttccctagcagcctcacatggtcttctcgttcatcaaatggacgttaagacagcttttcttaatggagagctggatgaggagatctatatggatcaacctgatgggtttgtagttgaaggtcaagaaggcaaagtgtgcaaattgttgaagtctttgtatggtctgaaacaagctcctaagcaatggcatgagaaatttgacaaaacattgacatctgccggctttgcagtcaatgaggcagataaatgtgtgtactatcgccatggtgggggtgagggagttattctgtgcttgtatgttgatgacatactgatatttgggacaaacccttgaggtgataaatgaggttaaatcattcttgtctcaaaattttgatatgaaggatttgggtgtagctgatgttatcttaaacattaagctaattagaggtgagaatgagattacactcttgcagtcccattatgtggagaagatcttgaatcgctttggctacagtgatagtaagccttctctaacaccttatgatcctagcttgttgcttcgcaagaacaaaagaattgctaggaatcaactggaatactcccaaatcattggctcgctgatgtacctggctagtgcaactaggtctgatatctcctttgctgtgagcaagttgagccggtttacctctaatccgggagatgatcactggcgtgcgcttgagcgagtaatgcgctatctgaaaggtaatatggaattggggcttcactatactgggtatcctgcggtactggagggttatagtgattctaactggatctctgatgtggatgagatcaaagccactagtggatatgtcttcatactgggtggtggtgctgtttcgtggaggtcttgcaaacagaccattttgacgaggtcaactatggaagcagaactgacggcactggatactgctactgttgaggcagaatggctgcgtgatctattaatggatctgcctattgttgaaaaaccgacatgtgaaaagacgattgaagtctgtcaggaaattgagaaactctggagttataacgttggattacatccaaacagctagaaacctggcagatcccttcacgaagggactatcacgaaatgtgatagataatgcatcgaaggagatgggtttgagacccatagcattcttgaaagaactcacctttgtaagcttgactgttggttgcagtctatggagattttgggtgaatcttctaggaagcttactaaagacctaggagta

SEQ ID NO: 18150 - DNA, 610 bp, Oryza sativa
  Clone ID: PAT_MRT4530_23736C.1
gccagcccatccgtggaggcgtggtggaggccgaaacggagcatcactgacccagcctcttcgcgtgctgcactgagcccataggtggcacgcttgcctcgacgccgctagcagcctcctcccgccggcttcctcccgccgccggccgcctcctcccaccaccgaggctcgcctcctcccgccgccgccttcctctctccgccgcccgccacactcgtcgcccgcgccagccgccaagctcgtcgcctctctcgccggccaccgcgctcgttgcccgcaccggccgccgagctcgtcgcctctctcggcggccgccgcgctcgtcgcctctctcgccggccgccgagctcatcgccccctctcgtcgcccacgccggccgccgagctcgtcgcccctctcgccggccaccgcgctcgtcgcctcgctcgcccaaatcaaccggatccctctatccagcatctggaggaaatattctcctctgggccgccctatcccactcccaaacaccctccaaaaagcggtggccatgtcctatccgggtatatcccaccaaccaaacacaccctaacttctttcagaccagaaactttaatcgctaaaatcaagcgg

SEQ ID NO: 18151 - DNA, 399 bp, Oryza sativa
  Clone ID: PAT_MRT4530_23737C.1
gaaggacggtgatttgagccaggagaactggtttggcaatgatcgcaaaaattagatgttgtgctgcaaactgcgatgcaatggtggctgatgggctggagaaacccctcaaggtgcaatgtgccccaaatgtgttgtgttgaaatgcaactggaccgggtgagcctgtggaacgccgcgctgcatgcatgcaatgctgagtgtgcaatgcctggtgatgatgaaactgctgatgatgcgatgatgctggtgaactgctgtggtggtgtgttgctgatggggaagtgagcgcgtactacagatgtgcccaccaatgaactgagttgttgtaatgatgttgtaaccttgtaataatgaattgccaattctccaaggaaatttattcaaaaaaaaaaaaaa

SEQ ID NO: 18152 - DNA, 1093 bp, Oryza sativa
  unsure (1)..(1093): unsure at all n locations
  Clone ID: PAT_MRT4530_23738C.1
gacgcgggggtggacgaggaggagcaggacgaggaggggatggagatggaggaggaggaggaggaggagcaggagcaggagcaggaggaagaggatgggcaaaatgagcagcaaccccaagaggcngggggaggagcaggatgagggggcagtggaggatgctgatatggatgatgccggagaggtgctcgtcggaggtgaagatgcccatggcaatggtgatgctcaagaaggtcaaggcgaaagcgaaggctttgatcctaatccagaggggagttgtcttgatgtaattgaagaaaggaaaaaagaattgagtgacaagctggatactttaaacaagaaaaagcatgctcgtggccggctcctgaagctgattttaaatgctgaagaagaaatcaggatgcgcaccatgcaggcctcattgcgcactactgtgcctcagccatcagaaaacgcagccgatggaagttctatttctaggctggtgcccagaatgaccgttgatgtcaattttagtgatgttgctggcgagtctgaggctggttccaaccagggcactcctggacgtcccttgcatcatgttcatagtatttctccttcaacagcctcttttgctaggtctcccgttcggttctctccaacacaattctggtcacactccaagaagtcaagcgactttctcgacagcaagtccgtcccgctttgcagctactggaaatcaaggacatcctattggccatccctcaatatcattgccaggaattaactttgtagcctcttcgccttcccccgctgcctccggcggttcttcctccgtggttcagggattgatcgcccacccaattcaacataacatccatgggctaatcaggactgtacatattctggaggacaactgccgttattaagtttttttttctctttgtttcttgagaaggggggggggggattaatgttattttgtgttattatgctgtattaagggaaacactaccgaaatattattccatgactcgtcccaaaattatccatatgtgtaaagtttatcatggctgtaagacgttttatggaccaaaaaaaaaaaaaaaaaaaa

SEQ ID NO: 18153 - DNA, 1440 bp, Oryza sativa
  Clone ID: PAT_MRT4530_23739C.1
atgtccaagactgagagcagaaagttgtccgatgactatgaagttgtggatgttcttggccggggcgggttctcaatagtaaggaggggagtgagcaagtctgaagagaagacccaggttgccatcaagactctgaggaggctcggcccggcgatggcgggtatgaagcaggggacaaagcccgtgcccggctccggcctgccgatgtggaaacaggtatcgatctccgacgcgctgctgacgaacgagatactcgtcatgaggaggatagtggagagcgttgcgccacatcctaatgtcatcaacctgcatgatgtgtatgaagatgtgcatggtgtgcacctcgtccttgagctgtgctcgggtggtgagctttttgatcggattgtggggcgtgaccggtactcggagttcgatgcggcctgcgtcattcgtcagattgctagcgggctggaggctcttcataaggcaagcattgtacacagggacctgaagccggagaattgtctgttctctgacaaagatgagaagtccacactgaagatcatggattttggtttgagttctgtcgaagatttcagtgacccaatcgtcgcgctgtttgggtcaatagattatgtttcaccggaggctctatccaggcaggaggtttcagctgctagtgatatgtggtctgttggggtaattctgtacattcttttatctggatgcccaccatttcatgctgcaaccaatcgagaaaagcagcaaaggatcctgcaacttctgaggcatccttgggtgattggagactgcgccaagcaagatctcatggatgcagaggtcgtctcaaaactgcaaaagttcaatgctagaaggaaattgcgggcagctgcgatagccagcgttttgagctgcaaagtggcattgaggactaaaaggctgagaaatcttttaggaacccatgaccttacctcagaggagctggataatctgcggcttcattttggacgaatatgtgcagatggagaaaacgccactctgtcagagtttgagcaggtgctgagagcaatgaaaatggactcactgattcccctagctccccgcgtattcgatctgttcgacaacaaccgtgatggaaccgtcgacatgagagagatcctgtgtgggttctccagcctcaggaactcacgaggcgatgatgctcttcgcttgtgcttccagatgtacgacgctgatcggtcaggctgcatcagcaaggaagagctggcatcaatgctccgagcgttgccggaggagtgcctgccaggcgacataacggagccggggaagctggacgaggtgttcgaccagatggacgccgacagcgacggcaaggtcaccttcgacgagttcaaggccgccatgaacaaggacagcgccctccaggacgtcctcctctcctccctccgcccacagtag

SEQ ID NO: 18154 - DNA, 2680 bp, Oryza sativa
  Clone ID: PAT_MRT4530_2373C.1
atggcgagtggcgacgacgagccgacgacttgtcaacgagtcaacggcgacctgcctccactggagtcaagctccgcctccgcctccgcctccgactccgggcagagcagagcagcagctgccgccgccgacgacgagagaagaggcggccagatggcgggcctgcggcggctgtggggggagtgggagatccgggtgcttctgctgagcagcctctcgctgcaggtcttcctcctcttcaccggcggcctccgcaagcgcaacgtcgccgcctggctccatttcatgctctggctcgcctacctcctcgccgactccatcgccatctacgccctcggcaacctctcccagaaccagaagctctgcagcaacggcccccacggcggcggcgacatgcacctcctcgtcttctgggcgcccttcctcatcctccacctcggcgggcaggacaccatcaccgcattcgccatcgaggacaacgagctctggctccgccacctcctcagcctcgtctcccagatcgccctcgccctctacgtctactggaagtcgcgcccctccgccgcgggcctcctcgtcccggccatcctcatgttcgtctccggcgtcgtcaagtacggcgagcggacatgggcgctcaagtcggcgagcatgagcagcctccggagctccatgctgacgcgccccgaccctggcccgaactacgccaagttcatggaggagtaccactccagcaaggaggccggcctgcacgccgagatcgtcatcgtcccggagcgcccccccgacgacaacatccatgtccaggaggagcacatggagtacggcgagctcgtcgtcaaggcgcaccggttcttccacaccttccgccgcctcttcgtcgacctcatccttagcttccaggaccgaaccgacagcctcgccttcttccgccgcctccagcgagatcaggcgtataaggtggtcgagatcgagctcctgctcatgtacgagtcgctccactccaaatcctccgtcatccatggcccgaccggccgctacctccgcatcttcaccctcgccgcgcccgtcctctccctcatcgtcttctccggcaccgacaaggctccctacaagccggttgacgtcaccgtctcctacgtgctcctcggcggcgccatcttcttggagatctacgccatcctcctcatggccatctcgccatggagcttcgccgacctgcggaagaaggacaagtgcctccccgtggcgagcggggtgttccgggcggtgagctacttcttgccggaggcgaggccgcggtggtcgaaccagatggcgcagtacaacctcatccactactgcctcaaggacaagccgacatggctcaccggagcgctcgagaagctcgagtgggactacaatgtccgcgtgaagacgatctgggacagtatctggtacacccaccacatcggcgtctccatggtgctcaagcagctcgtcttcaagcagctcaaggagaaggccaacagcacggcggacccgatgagctaccggcggttcggcgaccaccgcggccagtggttcctccaccggatggggtgctaccaggagctcggggccagcgtcgaggtggagttcgacgagagcatcatcctctggcacatcgccaccgacctctgcttctacgacgacgacgacgacgacggccgcgacgccggcgagaggaagctgaagcggtggtcatcttgctgcttctgctcctgctccgaccacgcccccacggcggacgacagccacctgaacgacgtgtcgcacctgccggcggcgagcagggagatctccaactacatgctgttcctgctggtgatgcggccgttcatgctgacggcgagcatcgggcagatccggttcggggacacgtgcgcggagaccaagaacttcttcctccggggggacgagctcggggcagcgaggaaggcggcggaggcgctgacgaaggtgaagacggagatcaacccgcgggaggtgaagggggaccggagcaagtcggtgctgttcgacgcgtgcaggctggcggagcagctgcggcggctggagcggcggaagcggtggcggctggtggccggcgtgtgggtggagatgctgtgctacgccgccggcaagtgcaggggcaacttccacgccaagcagctgagccagggcggcgagctgctcaccgtcgtgtggctgctcgtggcgcacttcggcatgggtgaccagtacagagtcgaggccggccacgcccgcgccaagctcatcatcgagaactagcctcctattgccgccggcacataacagctgagcatttcagaattcagatcagttcagactaagtttttaaaaaatctcttttgttactgaagttaaaaagctttaggttttgacttgactattgaagatttataactgtttaacactcttgcgcgagataaatccgcgtcaatatgtaaagatagctttcttagtgcctttcataatagtgatcaagctactttctgtaatacagttttcagtatgtgcaagcccctttctgtggtgcaatttcctctgttacaaaaaatacaaccccaccccagcacagtgcactcccaggatgcagatctgtgcagcgttacaaataaattctcttttgttcctcgtgccgaaaaaaaaaaaaaaa

SEQ ID NO: 18155 - DNA, 3305 bp, Oryza sativa
  Clone ID: PAT_MRT4530_23740C.1
agaaaaaacatcttggttgagaatggtattatagcgaagcccattttaataatggtatttgagcgaatcctatcttatgcgatagtagatatgtaattttctccatcgtgaccaccatcttcaccatctagctctaaagacgaacaaggaaaaaaaaacaaactcagaactagaccctgaactagaatttgaaaaataaacatgacgcgctccagaacctatggccgaaaacattcaggaaaacaaaagtttacagatttattatctatcactaaactgctaatagcgggatccgagaccaaaaaaaaaatgtagaagagcggtgggctcatttcagcactatgggagcagagagcgcatttaattttgtacagttttttttaaacgattttaacgctttctcatttgctgccctctcgcagttttatcacgagcttaaattttgtacacaattgtacatcatgcagggccatgtaaggaatgaatactttcagggttaaacttcttctctgggggaagaccggggattagaacatctactgcctatccaagaacatgtaatccgcagttgtggactggaacccattgtgagccgccgttgcatctgccatctccttgaggaaggagacgacctcctctgacgagttaagcaggtagcgggcgttggaccgcttccttccaacagcgcaggagaaataattctcgcccttgaggtcaaggaccgaggacccttcgcgccagtcatggtggctgtttggggtgccctggcttgatgaagatgatgacgatgacctctccggagcagcctgtgccttgggtgtccttgactgcgagtttctggaattgctcctgccgtttgatggtcgtccatttggcctcctgtcaagagataccgagccgctgctatctggttttacttttgattcagaagggtactcgggatcgaaaaagacatagatgtcctcatcctttcctaggaagtgcccaatgcatagaacataatcaattggagtaatcatgcttttgctatgaactatctctcctagaatacgatcaattgcagcaccctttgtaactccgacagaccgaacttcaactgatcggcttccttgaacaacatcgactgctgcatttgagattggacctgtccacaagtgctgcagcatatctcttgcttggagccgtccaaactcaacatcagcatacttgtaattccatacaaatgatgtctcacggtgttcaaaatgagaccttggggttctttctgtaaagtattcaaaaacattctttacactgtctacccaatccatgttcagatgctcaggcattgttgtcatccactctccattagttggacgtaaaaacatgccatgctctgctgctaaccacatattgaattctccgaaattttcatcaaggacgctcctgtcacttccactaagaacaataactgtagtatgctcatcctcacagagggctctcaaagggcccttcaactcaggttgcgctttgcgatcgatttcatttatttcgtcaccaaaccttctcccagattcttcaactggctcagttaatgctgaaacaaaagttaccattagcacttgttttttgtaattcataacatgttgaaaggctgcttgatttgggttttcactttgaacatatttcctggtctttacaaaattagcaccggctccaagtaactgacttgcccaagcaaactcactcaatatcaaaactcctttttttgatcctgggcatgcaacatattcatagcttacaagattcattccatctctcagcgatgttaccagggccacatcagtgactgcataaagggcacacaaggcatggaaatcaagagatcggtccagatgatgaataggaacagcagtcagtgttccaaatcggccatttatgcgcccaacaatttcatgcacctgacttgtaagcttttgatactcagggacatcagttcttgtcggcacagcaatttgaagtagaaccactttatcattccattcatggttttcttcgagaaacttttcaaaggccaaaatcttttgcggaattcctttgatcatgtcaagtcggtcaacaccaagcattacctttcgaccatcaaaacgttgtgttaattcagtgatgtgtctttttactgctggaagctccaatgctcgcttgaaacgttcagagtctatcccaataggaaacgcagcaactctggttagccttccttggtcttccacaccctcaggagtgccctccagtccaagtattcttgtacatgcgctcacaaaatgtcttgcataatcatatgtatgaaatccgactaaatcagcacagagcacggagcgaagcagctccgaccgggagggcagcgtccggtaaatctccgaagaagggaatggcgtgtgcaggaaccacccgaccttcatgttgatgtcatgatccttgaggcacttgggcaggaacatgaggtggtaatcatggcaccagatcacatccccttccttgtagtgctggtacacaacatcagcgaacatctggtttgctcgcttgtacgcgttgaactgtgactcgaaattcctcgtcgtcgccaaccgcgagaggcggaacaatcccaggtagtgaaacagaggccagagtatgttgttgcagtatccgttgtagtattggtgcacgatttcctcatccaggaacactggtatacatctcttctcggcgagcgctcgggtgagagctcgctggccgacctcgtcggggacgttgacgcccgcccatccgatccacttcgcgtccacgtccttgacgccgaggagggcgctgacgaggccgccggcgctgatctccagggaccactggtcctcgccgcggcgattggcggagacggggaggcggttggcgacgacgaggaggcgctgcttcatcccgcggaggccgaggcggcggaacccgctgcgcggcccggcgagcggcggccgcgccgcgtgccccgccgccgacgcgccgcccgcgtcgtccatgttggcgggcgaggcggcccccggcgagaacggcgaccgggccccgaagtccgcgacggaggtcgccgcggaggaaggctccgcggagtccgtgtccatggcgtccggggaaccggcccccaccgccgccgacgacgcgaaggggtggcggcggccgcactccccgcggagcatgcggtcgtccggggaggaggagtaggacgacgcggccccggcgccaccgccaccgccgccgcaggaggaggaggaggacgatgccgacggcgcgggggtcggcat

SEQ ID NO: 18156 - DNA, 195 bp, Oryza sativa
  Clone ID: PAT_MRT4530_23741C.1
atggagctggatgatatgggtggcgcctacgaaattcaagaggaagacgccgtggtggccttgccggcgacccgccttcaacagataataagctgcagttgttacctggggagggaggctgaagagcttgtgaaagctgttcttgctgacgggaaggcgaagagcagcagatatgtggtggggaggtgcaagtag

SEQ ID NO: 18157 - DNA, 165 bp, Oryza sativa
  Clone ID: PAT_MRT4530_23742C.1
atggttgctgcaggtccttgcatgcagaaggtctacgtgttgtccagatcccgtggatgcaaattaattgctaataacggccatggatcccagattgattcggtgctctggctgccacccaaaagaagcctcatcgtttaccaaataaataaattcagctacagt

SEQ ID NO: 18158 - DNA, 408 bp, Oryza sativa
  Clone ID: PAT_MRT4530_23743C.1
atgaagtcacttattggaacaaagtctatagtgcgaatagcatctgaactgagaaaccctgagactggtgcatggcctagtgctgttgatgtttggagagcaatctatatgaaggcaaatgggacatggtctattcccaatggagcagaaatactgaacaatcttgaggaagcagctgaaacacacaaggaaaggattgctgctgctccaatcccattggctgagcattttgctctggttcttggtagaaagccaaaccattcgcgtagtgttggcattggtgcagtcaaccaaggggctaaagaaaggtataggattcatgcacgagctgaggctgctgaccaacgtgctagtgatgcacaaaaccaagcagctgcattgctagaaaaagttgagagattgacatag

SEQ ID NO: 18159 - DNA, 327 bp, Oryza sativa
  Clone ID: PAT_MRT4530_23744C.1
atgcggcggtggctggaggtaggggatgagctgatccatgggccccacctaccaacgcgtgagggtgagcgctcgcgtgtgccgcacacagtgctcgggctcggctgggcgcgggaagaggagatggggcacgtgcgggagcaggccaagtggagggaaggagggaaagaatgggccaagaagggggaggcccggaaggagggaggggaaagaggtggctggcctagaccaggaggggtgaagagggtggaaaaggacaccttgggccagattcggcgcaagaggaagagaggattttcttttatttttcttgttataaaactctaa

SEQ ID NO: 18160 - DNA, 303 bp, Oryza sativa
  Clone ID: PAT_MRT4530_23745C.1
atgaagcagcgacgccgtggatcgatcgtcggcggcgagatagatgggtggaggcggcgctatagatgggcggccgacggcgtcctggaggaaaggagaggccgcaccatccagggatgtgcgccggcgccaaagcaagtgaagacaaggatgcggagcggaggggaagaggacgaagaagaagacggagaagagacgatgttaggtgtaggagcggaggggtaccacacgcgcagacgcgctattccgatcgtatcctttgtgaacggacggatggatggagttggtgcctcccagtactag

SEQ ID NO: 18161 - DNA, 257 bp, Oryza sativa
  Clone ID: PAT_MRT4530_23746C.1
ggccgcgggttttttttttttttttttggtttttttttttttttttttttttttttttttttttttttttacaacggcccaatggcaaacgcataaacctggaaaatttaaaaaaacccaaccaaaacggcagccgaaaatagacgaccaaaccccccaaaacactaaggacaagccctcgcccaaagaggggggagaatgcaacagcctcacctaatctaacacggaaacggcccaaacaaaggccccgcaaaaag

SEQ ID NO: 18162 - DNA, 553 bp, Oryza sativa
  Clone ID: PAT_MRT4530_23747C.1
gggtactgtgtgtgtgtgtgtcagagtgagagagagatagagagagagaggcagctgatcgccacagcgtgctcctcgccgcccgcctgccatggccgacccatacggcgacggcaagggcctcaagcagcagcagcgccagaagctcaagcccgcgctcgaggtggaggacttcatcaacctcctccacggctccgatcccgtccgagtcgagctcacccgcctcgagaacgagctccagtataaggagaaggagcttggggaggcgcaggctgagatcaaggctctgcggctgtccgagcgagcgcgcgagaaggccgtcgaggatcttacggaagaattgacaaaggtggatgggaagctgaagcttacagagtctctcctcgaaagcaagaaccttgaggcaaagaagataaacgatgaaaagaaagcagcacttgcagcccaatttgcagcagaggctacatttcgaagggttcatgcagcacaaaaggatgatgacatgccccctattgaggccattcttgcgccattggaagctgaactgaaacta

SEQ ID NO: 18163 - DNA, 580 bp, Oryza sativa
  Clone ID: PAT_MRT4530_23748C.1
ctaaagggaaaaagcttgcggccgctctgtcttatttttattctttttattatctttttgtttattgaaaacaatgtccaggaaactgctgtactgattttacacgccaaaaaatttgaggcacttatgcctttttcccactttaaaagggccgaatcccactgggaagattcatccaataccgtttccattcatggcatgtcttaaggccaagggccctgaccacaacctcaacctttatcgacacagcctgggacacaagatcaactcttggaattgttagccataacgtggacccacggttaattaagcctatgcgctcgcggtgtctcttgggagacctcggcttctgctgggcctactgccacaggtttgacatcaacatcagcttaaatttgtacttctcttccccctgatatacagagggggtggccattcaccatggcgcctttcactaaatggatattaactgtttctgatgacgctggacacagaccggtagatttgaatcagatactgtcgggcaattttctgactgaactgtctcggtgattctagtgaggcctttaaacaaacaaag

SEQ ID NO: 18164 - DNA, 2334 bp, Oryza sativa
  Clone ID: PAT_MRT4530_23749C.1
ggggggggacggaccggagcagcatctggaacggcgtcgacatccatggcgtcgtccagaatctcgccctcctcgacgtcttcggcggccggcggcctgtccgcgtcggcgagcggagactcgtcgtcgtcatccacgtcgcggcggcggcggtggtgcctgcggcgacgcttaggagaggcggcggggtcggacttcatcaacctcctccacggctccgatcccgtccgagtcgagctcacccgcctcgagaacgagctccaagataaggagaaggagcttggggaggcgcaggctgagatcaaggctctgcggctgtccgagcgagcgcgcgagaaggccgtcgaggatcttacggaagaattgacaaaggtggatgggaagctgaagcttacagagtctctcctcgaaagcaaggtaatggagcagccccacacgatgctgcagaaccttgaggcaaagaagataaacgatgaaaagaaagcagcacttgcagcccaatttgcagcagaggctacacttcgaagggttcatgcagcacagaaggatgatgacatgccccctattgaggccattcttgcgccattggaagctgaactgaaactagctcgtcatgagatcgcaaaactacaagatgacaacagggcattggaccgccttactaagtccaaggaagcagctctgctggaagcagaaaggacggttcagatagcattagcaaaagcttctttggttgatgatttgcaaaacaaaaaccaagaattgatgaaacagatcgagatctgtcaggaagagaacaaaatcttggatagaatgcaccgccaaaaagtagctgaggttgagaagctcactcagactgtcagagagctcgaagaagctgttcttgctggaggtgcagctgcaaatgctgtgagagactatcagcgcaaagtccaggagatgaatgaagaaaggaaaactcttgatcgtgaactagctcgtgcgaaggtttcggcaaatagagttgcagtagtggtggcaaatgaatggaaagatggcaatgataaagtaatgcctgttaaacaatggttagaagaacggaggattttacaaggagaaatgcagcaactccgggataaactggctatagcagaaagggccgcacgatcagaagctcaattgaaagataagttccagctacggcttaaagtacttgaggaaggtttgagaatgtcaacgactcgaaccaatgttagtgcagcacgccgccagtctattggtggtgctgatagtttatccaagaccaatgggttcctatcaaaacggccatcattccagatgagatcgtcagtatctaccaccacaactactctggtcaaccatgcaaaaggggcatcaaagtcttttgacggaggctgtagatcacttgaccgttacaagggacatgtaaacgggtctggtatgaatgtatctacggactccagtgaagataaggaatcaaacaactcagatgagaaggctaacgaatttacatcagttgagacagaggatacggtatcaggtttgctgtatgatacgctgcaaaaggaggtaattgctctaaggaaggcttgccatgaaaaggaccaaagcctgaaagacaaggacgatgcagttgagatgctagcaaagaaagtagacacattgacaaaggcaatggaatcagagggtaaaaaaaggaggatggaggtagctgccatggaaaaggagatggcggctttgcggttggagaaagagcaggataacaaagcaaaaagagggaggaggaaaagaaagaagagctagagaagaagttcattgcctcggagtggttcagcacgcaatatgtgatgcaagcgaggaacacggcggcaaccagccaacccttacgaagcattcaaataagaggagagcttaattgggtgcttcgacatcatatccttgtctagttgttgaatgttggattagtagtgatgacgagctgctgattgatgtctggagaagatggatcgatcggttacatttttacacgtcgagccgagaagacggagcgattagcctatatctcgtgggaatcgcgacgactactctgtctaattaacctggcaaattaagctagtcttatttttaacctttggtttcttgatgagatttggtggtgtgtttttttttggcaatcatccatcatcgttgcctggtgctgtataggtttggtgagcccatgcatgcatatttttagtctcaaatttgtttgtaatcttaatactaaagaggatcggatgattatatatatatatatatgctggccatatataaaaataaaaaaaaaagttgaaa

SEQ ID NO: 18165 - DNA, 368 bp, Oryza sativa
  Clone ID: PAT_MRT4530_2374C.1
accctccgcgaggtctgcgccggccgcgtcccggagcacgtcctccagagggctgaggaggttggctatgtcttccctaccgaggtgcaggagcaatccttgcctgtcctcttgtctggccaagactgcatcctccacgcacagacggcttctggaaagacacttgcctatctattgtcggtgttctcggccatagattttgggagatcctcggtgcaagcgctggttgaggacccaaccagggagctcggcatgcaggttaccaaagttgctcgaatacttgcagcaaaggcctgcaccgttatggctttgcttgatggtggaatgctaaggaggcaaaagagttgggtaaaggcagagcccccggc

SEQ ID NO: 18166 - DNA, 102 bp, Oryza sativa
  Clone ID: PAT_MRT4530_23750C.1
agctgtaacaggccagcacctaagcccctccattgcaccatggtgccagaaacatcgagctgttgatggccctacttccaagtctacaatgtgtgccacacg

SEQ ID NO: 18167 - DNA, 859 bp, Oryza sativa
  Clone ID: PAT_MRT4530_23751C.1
tgaggaggaggaggaggtgcccaaacgcagcggcggcgatctccccacaaatccagtcacccgcattgctccaaatccagcccggcgaccgcggcggagacggccactgcgacgccgctctcctcctccacttcctcgagactgaagaacaacatttctttacttggacagtgcttccttttgattatcactatttctcttgctcctaagttatggcaactatggttgaggggtgtgttggtccaagtgagcttcacttgaaaaaggaacttactgcactacgaaaggcacggttcttgcgtgatcctgaaacatgttcatcatggagatcgcctttgagttctaaatcatttatgacaacttcgtgtgttattaatcccaatgagattggcagtaatgtatcacaaaagcacattgagccagctgctgcacctccaaagggtgaaaagaaaaggaaaaaggtttatcttacaattggaggcatcattctaccaaatccagtgaaagggggataaaggtagatgatgatgaccggcaagcttcaacagactggaacttggaaaggccatgcctttctaatgggggggacctttagaaccaaaccagcctggaaggttctggcaacatattccggggtcaaggattccattcaagcacttctggtaccagaaccggtaaaaaggggaagaagaattcacttttcaagaaaggaaccatcaaaaattcaacaagttcccaggtggttaaacttcctggtaaccttggggaaccatctgaagacacctggttattattacctaaaaaatcattaattggttcaaaaggggggctacttttcttaatctacattaaccctttt

SEQ ID NO: 18168 - DNA, 649 bp, Oryza sativa
  Clone ID: PAT_MRT4530_23752C.1
atggcggactccggcagcgcgagcgagcggcgagaggaagggaagaagggaagggaggaggaggaagaagacgacgtcgtctgtctggacccgtcgttcttcgtcgaccgcaggtgtgcttcgctgctttgtcccgatttgttgctggggttcgtcgatctgggagggaagctacgagacgactacgttcaccttcggctcgcaagtgctccacctcctctgcctccgcgctgcttccagttagtacctcctgctcctactcgttctttcttgctaagtgtagagttagtatggccaggtgcagttctgatgaacacctacttgtctgaacatcctgagactgtgaaggatcattcaataattgagctaggatctggggttggcattactggcatattgtgcagccgtttttgcaaagaagttgtcttgactgatcacaatgatgaagttctagaggcaagcttcaaaccttacgaatatcttccagtgatgtcacttagtttgacaaaatacagaagatattgaatactgtagagaggcttcttcgtattcaggctagtaaatgtagattcatattggcttatgtatcacgagctaaagtcatggatgttctagtgctcaaggaagctgaaaaacatggaatgcatgt

SEQ ID NO: 18169 - DNA, 874 bp, Oryza sativa
  Clone ID: PAT_MRT4530_23753C.1
tttgtttctgaaacaaacatctttattattaatgaaaataaattactagctaatacatataataataccattccagtgaatttataaaagcctaataaatgaattaactgctaaaagaaattgattcgccgaacatggacaccatgcgttatcaagatgtacgtacgtactaaggcatgacttggaacaaattaaactgtgctaattaggctagaaagtatgagaaaagccttttgaacccccccttgataccgagacatggctgagactccatagctatatcagacgctgcctgcagcgacctcttgtggaggcgcttgcaggtgtcgtcatcgcaggggcaaaacacccctaggtcgttcaggccaatgcgatggatggccggtttgttcaccaccttgatgtcgcaacagaggatgatggagtcgtcatcctccccgacatacttgttctgcagcgtctccatctcgtccctgctgatgaaccagttgaacccgcacttgctgttgcggcgcgcgctcccgaacgtgtgcatgatctccggtttgctgtacgggagcgtaccgctgtccgcgccatgccgcggcagcaggctgaattggatctcggcatccacgcccttggacctgtcgatgagcttgaggtagaaggagaaggcgccatggtccatgctgtacttgccgttggggtagaagacaatgcgccaggtgtgaccggccgccttgaacttggccgactcgacgcgttcgccattatcgaccagccttgtctgcgagtagccgctgatcttgagaaggtggcaccccaccgtcgccgtcaggacgatggccgacacggtgggtgcagtcgccgtaacacctgcttcgatcgacat

SEQ ID NO: 18170 - DNA, 412 bp, Oryza sativa
  Clone ID: PAT_MRT4530_23754C.1
ttgggtttttaatttttttgggtttttttttttttttttttttttttttttttttttttggcaacagctagaggtgacaatcatcacttcatacggggggggttccatatacccatcacaagcaacaaaaatcgctcatagccaaaatgcaatcctggggctggagagagccccttgcccctcagggggaaaaaaaaaagggaatttggggggggtttggttttcctgccacacctttaaaggctccattttcaggctttttcgcttggaaaatttctcagcatttcaccagggacccaatttccaaagggtctaatggagcctaagattgttccatggaggacactggcaaatcactagcagcagcgtcaggcccccgggactccatcttcggggagatctcccccatgac

SEQ ID NO: 18171 - DNA, 467 bp, Oryza sativa
  unsure (1)..(467): unsure at all n locations
  Clone ID: PAT_MRT4530_23755C.1
gccgcagctttgcgttcgcactatttcaggagattaatgaagcataccaaggtgagcaatgaagttgtttaattgatctgatacgtgtatgtctatgttaacttgaatgtgaaaatagtatgtgccgtactgcagtttacctttgtttttttggtctcttgctaacataataagttgccagcagcaaatcaaaatagatattaatgttcggttgcatgcagatttatctgtattagtgaatntcataactattactcctgagatgcctagacatggaacaattgatgtcatctatgtgcaagagaccaagatgttattcttgaatctaaatacaaggaattgctaccacatgactaaaggatgtttggctgttctttcaaacttgttacgatgccatgatgcgggtgtttcctcatttacaatggattagtagttactaggaatctgggtgtgctaaataaaacaat

SEQ ID NO: 18172 - DNA, 1200 bp, Oryza sativa
  Clone ID: PAT_MRT4530_23756C.1
atgtcaagacgccatcgacattatccggatcctgaagttgaagaccattttgaggattcaacacaagatgaaccttcaaattctttggttacttcaacaaaagaaagtaagggtggtcgtggtccaaatgttttgatggcaccagttccagagaaagatagggcagtgataactccactcaataaagatgcttggattacgaatcctatgaagaagaatgtttcatctaccatcacatgtcttataaaagctcactaccctggcacatatagacctttggataaacatggcaaacaggtgcctgaggatgaagcagttgtcattgctcattatcacaacttttctgctcatacaaggataactattctgaaggaatttttgctgtgttttaagtttgctgatggtagagaagaggattgtgctagattattttatcgcaaagctgttgaacgttttagccaagctttgtcacatgagaaatctgaagcaaaacgttctttggagaagcatatcgaaaatatgcgtgcgactgagttacaacaggatggagatgccccttctcatgatgattttgatgttgatgaacctcaactttggaaggcattccctccttattggattgagcaaaagtggtgggatatgttgtgtgacttgtggtctgatgaaaatgtaaagaaggtgtcagctcaaaacagcaaaaatcggatggaaggaggtggtgttcatcatacttgtggttcacgaagtgttgctatgcataaacaagccatggtggtgtataatgatcgtgtcaaggaaggagaaaacaatcaagtcaacaaacaacatgtttgggtgcagctcactaaaggaattatagatagaaaccatgttggtaattcagcaagtgcaccatctggtagcatggagacacagccactatacacacagcagcaagtgcaagacattgttcagcaggcagtcactaatgctgtgaacaatgctcatcaagaactagcatcaaggatagaaaggctagagcagacagtggataaggataaggcagaaactcattcccatgatgcaaatggaccatcttcttctgttgtccctgagttccttcatgcacttctcatgaatgggatgaacactactgaagaagcgccacaagctggtcattgtggaagaacttgtgagaatgatgacctctggcgtttctag

SEQ ID NO: 18173 - DNA, 647 bp, Oryza sativa
  Clone ID: PAT_MRT4530_23757C.1
ggtccgcaaaattggatcctcaccattgcgcagatgcagcctccttttgcagttttgttttgctgctggaaaattcggatttgttttgttttggaaacattccgaaaaatccggtacgtgaaaacggtgtggagtccggataagttacgcgcgacttatccggttcggttacgcggagtggagatcgtgcgggcgccttgatcaagcgtcctatctctatataaaccgaggcgccgccttcacgcaaaacacacgaaatcaatctagggtttgcctcctcctctgtgctgcgctgtcgctcgtagactactccatcccgctcgccggcgtgcacctgcgatcgggagagcaggtctccggaacctctgccttcgacgtcctgcaccgggagaagacggcaataaggtttttgggaagcgctccacgcgactgctccctgttcgtccgcgacggctcgccttcctcttcgctcgcgtgctgcgcgccttcgtcgacgctcgcaaccgcgagtagttcctgccgagcaaacggtctttccaccacctcgccgcgtccctccgcagcgccaagggacacacaaacgccgctcacgtcgcggcgacaacgaggccagccgcgagatcgctcgctcgcgtgtgagcggcgca

SEQ ID NO: 18174 - DNA, 624 bp, Oryza sativa
  Clone ID: PAT_MRT4530_23758C.1
atggagacgagctcgcggagcagcagcgggtgccagtcggggtggactctctacctcgaccactccaatggcggccaccggcagtattacgcgcgcaagaatcacgagctcgacgacgacgacgacgacgacgacatggtctccgacgcctcctccggcccgccgccgcgcatgcgcgacgaggacgacgacgaggtgtggcatcagcatcggcatcagcagcaacgccggcaacggaatcacctcgtcggctgccacaccggccacgacgacgacgacgacggcgacgacgactccggtagcagcggcgtcggcggcggctacagcacttgtacggcccggtcgatgtcgtcgaagaggagggccatcgccggcgaacacagcgtcgtcgacgcggcggttgtagtcgtgctgcgccaccgcgagcacaactgcggcggcggcgacgacgatctcgacgacacggcgagctcgtcgtccgccgtgtcctccagcctgcagccaagctgtgctttctcggcgaggcacttgcagcaatggtcgtcgacggcggcggttcgaggcacgagcatatactgcaggccgccggcgccggctacgcaatgctacatcgcaactgactag

SEQ ID NO: 18175 - DNA, 454 bp, Oryza sativa
  Clone ID: PAT_MRT4530_23759C.1
tttttggaggatgataaaagtaagcggcaccatcgtggacggaagtctaaggcctcatcccaagtttcaggtgaaaatcacacagcattagctgctttgaaggatgccgcttcaactcaacaaaagagtgcaacgccaaggagtctagctcaagaagacaaatctccaaaggagaatggagatacccgtacaaatggtgttactgaatcaaaaactgaaaggaatgccgatattgctctaaccagcaatcgaagcaaatctaggagccagagcatgagtgctaaccactcaatgagcaagagtatgagtatcagtccaaggagaagcccagtcaaaaggtcagccatcagcccgaagatatcattgataagcaggagtcctgatgtccaaggccatggtagaagtcctgtccgtgctcctgaaagaagtgaaagcaggagcccacctcgagaga

SEQ ID NO: 18176 - DNA, 354 bp, Oryza sativa
  unsure (1)..(354): unsure at all n locations
  Clone ID: PAT_MRT4530_2375C.1
tgggtttttattattagggggggttcccttttctttcttttcaaanggacaccattcatatatccatgcaggcagcctgtttgggccctttnccaatatctttcatttataccaggggaagggacccaaaatagcccccacatgaacacacacaagtttcattattgatcgatctacacatggattacaccggtatgcacttacaaacaaaaaaactacttgaaaaaatacgggagggccagcacctaaaggaagaaataggcccaaaagacccccgaaatgccccccaaaaaaaaaccgccggtgaacttggcccaaccgtcgggggtctgcaacttgtcggccttctttttg

SEQ ID NO: 18177 - DNA, 584 bp, Oryza sativa
  Clone ID: PAT_MRT4530_23760C.1
ggtctgcaaaattggctcctcacccttgcgcagatgcagccttcttttgcagttttgttttgctgcgggaaattcggatttgttttgttttggaagcatttcgaaaaatcaggtgcgtgaaaatggcgtggagtacggataagttacgcgcgacttatccggttcggttacacggaatggaggtcgtgcgggcgccctaatcaagcgacctatctctatataaaccgagccgccgccttcacgcaacacacgcgaaatcaatctagggtttgcctcctactatgtgctgcgccgtcgctcgtagactactcaatcccgctcgccgacgtgcaccggcgatcaggagagcaggtctccggaacctctgccttcgacgtcctgcaccgggagaaggcgacaataaggtttttgggaagcgcttcgcgcgactgctccctgttcgtccgcgacggctcgccttactctccgctcgcgtgctgcgcgcctttgtcgacgcccgcaaccgcgagtagttcctgccgagcaaccggtctttccgccacctcggtacgtgttcgatatttaaaagaaaaaggcggaaccta

SEQ ID NO: 18178 - DNA, 1459 bp, Oryza sativa
  unsure (1)..(1459): unsure at all n locations
  Clone ID: PAT_MRT4530_23761C.1
cggagcacgtgcgcggcggcgccggcgatgaggtcgtcgacggcgccgcgagagagaaaacccaaacccctatgcgatggctgcattcgctgttggctatccaaaagcgcataggtctcaacggagtacccaataggcccgtgctctcgacacatagggacaacaaacccataaacgacccgatttgtgagcacgttgctgatgccgaaatgggccgcatcactagctctccagaagacccaactccgaagcagcacaagcccaagtagggctgcctcgctcccaccttcacccacgaggtctccgccgccgccgcggccgccgacgacgacgactacctccggcgaccgccggggcggccttagcgccgggtaccctgccgcctccgcgtagccgagccctatcgcgtacccgtccctctcgcgcctagtgcgccgggctggccggtggcggagtaccggaaatggctacaccactcatagcaggactcacggttgcagcggcggctcttgctggtagatatagtatccaagcttggaatgcttataaggcaaggcctgtagttcctaggatgcgcaaattctatgaaggtggctttcaacctacaatgactcgaagagaagctggtttaatcctaggtgtcagggaaaacgcccatcctgagaaggtaaaagaggcgcataagaaggtcatggttgctaaccatccagatgcaggcggtagccattaccttgcttcaaagatcaatgaggccaaagatattttgttagggaagacaaaaggaggggggtcagccttttgattattacaataataatgcaccatatgttctttcaatgaaatggtgaattttggtatctgtagtctgaggacttgaaaggtaggcttaaatcttgatgcgtgactagaaatttatggacagaaaatgttagcaggtctgtccactgtttgacatttcagtgcccggtcgtgttcgctcaactggttatcgaataactgatatacatggaaatggtaatacctgtacgatgtatcatatctctaaaacaccactcgagttctgcgagcccttttctcttcttgnnnnanannannnnnnnnnnnnnnnnnnnnnnnnnnnnnnnnnnnnnnnnnnnnnnnnnnnnnnnnnnnnnnnnnnnnnnnnnnnnnnnactttnggggggggccgggccccaattgcccttaaaggagagttaatacccccccctcactggcgcggttttaaaaacgggggggttgggaaaaaccttggcttacccaaattatattcgtttgtaaaaaaactccccttttcccattgggtaaaaaaaaaaaaagcccccacctatccctttccaaaaatttgcaaccttaatggaaatggaccccccttctacccgtatataaccccgggggttgggggttaccccacgggcccgtttatttccgacgccttacg

SEQ ID NO: 18179 - DNA, 5808 bp, Oryza sativa
  Clone ID: PAT_MRT4530_23762C.1
atgggcatgggaagtgaattgtacgtcgctacgggatggagggagcggagcgcgatgcaggccgttggacgcgagactcgatggtgccttcggttggctggagggagcggcgcaactcactactccatcccgctcgccggcgtgcaccagcgatcgggagagcaggtctccggaacctctgcctttgacgtcctgcaccgggagaaggcggcaataagattaaatcattatatgtctataatctcaacaatccaaaaaccttattataggcactgtgattttactatggctggttttgccgatgcactgaggccggataaattcaccggtgtgcattttaagagatggcagatcagggtcactctgtggctgacagctatgaaatgcttctgggtgagtactggcaaacctgaaggagttcttactgctgaacagcagaagcaattcgaggaagccactactctctttgtgggatgcattcttagtgttcttggcgatcgtctggtcgaggtgtatatgcatatgaccgacgctaaggagttgtgggatgcactgaatactaaattcggtgctactgatgctagcaatgatctgtatatcatggagcagtttcatgactacaaaatggctgacaaccgttctgtagtcgaacaggctcatgagatacaaaccatggctaaggaactcgaactccttaagtgtgtcttacctgacaaatttgtggccgggtgcattattgcaaaactacctccatcttggaggagtttcggtactgcactcaaacacaagagacaggaatactccgttgaggggttgattgcgtctcttgatgttgaggagaaagctcgggaaaaagatgccgcgtctaagggcgatggtgggcagtccagtgccaatgttgtgcacaaggcccagaacaagagcaaggggaaatacaaagctcagcagaccaccaacttcaagaagcagaagaagaacaacaacaatcctaatcaggatgagaggacttgctttgtgtgtggccaagttggtcatctggctaggaagtgtccacagcgcaaggggatgaaggcacctgcagggcagacttctaagtctgctaatgtgaccattggcaacactggagatggaagcgggtatggtaatttacctactgttttttcagttaatcaatctactaattggtgggttgatactggggccaatgtacatgtttgtgctgacatctcattgttttcttcttatcaggtcgcacggggttccaccgtcctaatggggaatgggtcacatgcttctgttcatggtgttggcacggtagatctgaagtttacttcgggaaagatcgtgcagctgaagaacgtgcagcatgtcccttctatcgacaggaatcttgttagtggctcccgtctgactagagacggatttaagttggtttttgagtctaataaagtagttgtgtctaaacatggatattttattggtaaaggttatgagtgcggaggcctgttccgcttttccctttctgatttctgcaataagtctgtgaaccatatttgtggcagtgtggatgatgaggctaatgtttggcattcacgtttatgtcatattaattttggcttgatgtctcggctttccagcatgtgtttaattcctaagttttccattgtcaaaggttctaagtgccatagttgtgtgcaatcgaagcaacctcgcaagcctcacaaggctgccgaggagagaaacttggcaccactagaactcctacattcagatctttgtgaaatgaatggggtgttgacgaagggtggaaaacgatatttcatgacattgattgatgatgctactagattttgctatgtgtacttgttgaaaacgaaagacgaggctctagactattttaaaatttataaggcagaagttgaaaatcaacttgacagaatgataaaaaggcttaggtctgatcgtggtggagagtttttctcgaacgagtttgacttattctgtgaggaacatggcatcatacatgagaggacgcctccctattctccaaagtctaatgggattgctgaaaggaagaaccgcacactgactgacttggtgaatgccatgttggacaccgcgggactgcctaaggcatggtggggggaggcattgttgacctcaaatcatgtgttaaacagagttcctaacagaaataaggacaaaacaccatatgagatatggattggtagaaaaccatcactttcttatttgcgcacatgggggtgcttggcgaaagtcaatgtaccaataacgaagaagcgcaaacttggacctaagactgtggactgtgtttttctgggatatgctcatcatagcattgcctatagatttttaatagttaaatccgaggtaccggacatgcatgttggtacaattatggagtctcgtgatgctaccttctttgagagctttttcccaatgaaggatacacatagtggttcgaaccaaccctctgaaataattcccagttcaatcacaccaccagaacaaactgaacatacacatgaacttgtctctgaggaggatgtcagtgaagctcctcgaaggagtaagagacaaaggacggctaagtcttttggtgatgatttcactgtgtacctcgtggatgacactcctaagtcaatttcagaagcatatgcatctcctgatgcagactactggaaggaggctgtccgtagtgaaatggattccattatcgctaacgggacttgggaggtgacagagcgaccctatgggtgtaaacctgtggggtgcaagtgggtgttcaagaagaagcttaggcctgacggtactattgaaaagtacaaggctcggcttgttgctaagggctatactcagaaagaaggcgaagatttctttgacacttactcatctgttgctagattgaccacaattcgtgtgctactttccctagcagcctcacatggtcttctcgttcatcaaatggacgttaagacagcttttcttaatggagagctggatgaggagatctatatggatcaacctgatgggtttgtagttgaaggtcaagaaggcaaagtgtgcaaattgttgaagtctttgtatggtctgaaacaagctcctaagcaatggcatgagaaatttgacaaaacattgacatctgcaggctttgcagtcaatgaggcagataaatgtgtgtactatcgccatggtgggggtgagggagttattttgtgcttgtatgttgacgacatactgatatttgggacaaaccttgaggtgataaatgaggttaaatcattcttgtctcaaaattttgatatgaaagatttgggagtagctgatgttatcttaaacattaagctaatagagaagatcttgaatcgctttggctacattgatagtaagccttctccaacaccttatgattctagcttgttgcttcgcaagaacaagagaattgctaggaatcaactggaatactcccaaatcattggctcgttgatgtacctggctagtgcaactaggcctgatatctcctttgctgtgagcaagttgagccgatttacctctaatccgggagatgatcactggcgtgcgcttgagcgagtaatgcgctatctgaaaggtactgtggaattggggcttcactatactgggtatcctgcggtactggagggttatagtgattctaactggatctctgatgtggatgagatcaaagccactagtggatatgttttcacactgggtggtggtgctgtttcatggaggtcttgcaaacagaccattttgacgaggtcaaccatggaagcagagctaacggcactggatactgctactgttgaggcagaatggctgcgtgatctattaatggatctgcctgttgttgaaaaaccggtgccggctatccttatgaactgtgacaatcaaacgacatgtgaaaagacgattgaagtctgtcaggaaattaagaaactccggagttataacgttggattacatccaaacagcgagaaacctggcagatcccttcacgaagggactatcacgaaatgtgataaacaatgcatcgaaggagatgggtttgagacccatattaaatcattatatgtctataatctcaacagggctgtgcatgccttcaagccgttcgacaagttagcgagacgagaaagccccagagtggaatcgatcatgtcaacgacgccaacggcagcatcgcgccggctcgtcctgatcctctgcaccctcgctatctcctgcagcagcggcatcgccggattcgccgccggcgatgacgacgcgttcatccgctgcctcgccgccgccgctgtcccgccacggctggtccacaccccgggctccgcgtcctacgccccgacgctcgtctcctccatccggaacctccgcttcgtcacgccggggacgccgaggccgctcgccatcgtcgcggccgccgaggcgggccacgcccaggccgcggtgcggtgcggccggcgccacggggtccgcgtccgcgcgcgcagcggcgggcacgactacgagggcctctcctacctctccctcgaccgccgcgagcggttcgcggtgctcgacctcgccgcgctccgcgacgtccgcgtggacgccgatcgcgccgaggcgtgggtcgggtcgggcgccacgctcggcgagctctactacgcggtgggcgccgcgagccgcactctcgcgttcccggccggtgtctgcccgaccgtcggcgtcgggggccacatcagcggcgggggattcggcacgctgatgcgcaggtacggcctcgccgcggacaacgtcctcgacgccgtcctcgtggacgccgacggccggctcctgaacaggaccaccatgggggagggcctcttctgggcaatcaggggcggcggcggcgagagcttcggcgtcgtgctgtcctggaagctgcggctggtccgcgtcccggagacggtcaccgtgttcaccatccgccgcccgagaaaccaatccgccaccgacctcatcaccaaatggcaagagatctccccctcactgccccgagacgtcatcctccgcgtcgtcgtgcagagccagcacgcgcagttcgagtccctgttcctcggccggtgccgccgcctcgcccgcctcatgcgagctcgcttcccggagctcgggatgacgcagtccgactgcgaggagatcacctggatccaatccaccgtctacttcgccttctactccagctccaagccactggagctcctcctggacaggggcaccgagccggacagatacttcaaggccaaatccgactacgtccaagaacccatcccacgccacgcctgggagagcacatggccatggctggaggagcacgacgccgggctgctcatcctcgacccctacggcggcgagatggcccgcgtctcgccggcggcgacgccgttcccgcaccggaagggcaacctgtacaacctccagtactactcgttctggttcgagcacggagcagagacattggagaggcatctgagctgggtcagggggctgtatggcgagatggagccgtacgtgtccaagaacccaagaactgggtatgtcaactacagggacatggatcttgggaggaatgagatcgaggggaatgtgacgagctacacgaagggtaaggtttggggggagaagtatttcaggggcaatttcgagaggttggcggcggtgaaggccatggttgatcctgatgatttcttcaggaatgagcagagtattcctcctcttcctgctgcaaaggggtggagctccatttaa

SEQ ID NO: 18180 - DNA, 2145 bp, Oryza sativa
  Clone ID: PAT_MRT4530_23763C.1
ctagaccgtctgtaaactacccctcatttggagcgtataagtcatactccttggtcttttagtaagcttcctagaagattcatccaaaatctccgtagactgcgaccaacagtcaagctcacaaaggtgagttctttcaagaatgctatgggtacgaaacaacaccaccacccagtgtgaagacctccacgaaacagcaccaaccttatgttcaatgatttgggaatattccaattgattcctagcaattctcttgttcttgcgaagcagcaagctaggatcataaagtgttggagaaggcttgctgtcaatgtagccaaagcgattcaagatcttctccacataatgggactgcaagagtgtaatcccattctcacccctacttttcctaatgtttagtataacatcagctactcccaacttcttcatatcgaaacttgccttcttgacgcgaattgtggtcaatctagcaataagtgagtaagtgtcaaagaaatcttcgccttctttctgagtatagcccttttcaacaagctgagccttgtacttttcaatagtaccgtcaggcgtaaacttcttcttgaacacccaattgcaccccataggtctacacccatagggtcgctctgttacctcccaagtcccgttagcgataatggaatccatttcactacggacaacctccttccagtagtctgcatcaggagatgcatatgcttctgaaattgactcagatttaactattaaaaatctataggcagtactgtgatgagcatatcccaggaagacactgtccacagtcttaggtctaagtttgcgcttcttcgttattggtacattgactttcgccaagcacccccgtgtgcacaagtaagaaagtgatggttttctcccaatccatatctcgtctggtgttttgttcttgtttctgttaggaactctgtttaacacatgattcgacgtcaacaatgcctccctccaccatgccttaagtagttccgcggtatgcaacatggcattcaccaagtcaatcagtgtgcggttcttcctttcggcaatcccattagactcgggaaaatagggatgcgtcctcttatgtatgatgccatgttcctcatagaataagtcaaactcgtttaagaacaactctccaccacgatcagacctaaatctttttatctctctgtcaagttgattttcaacttctgccttataaattttaaaatagtctagaccctcgtctttcattttcaacatatacacatagcaaaatccgcttccttttccagtgttaccaatggttacattagcaaacttggaagtctgccctacaggtgccttcatccccttgcgttgtggacacttcttggccagatgaagatcattgctaacatcagtagcaccgaatttggtattcagtgcatcccataactccttagcgtcggtcatatgcatatacacgtcgactagacgatcgccaagaacgttaagaatgcatcccacaaagagagtagtggcctcatcgaattctttctgctggtcagcagtaagaactcccatagttttgccagtactcagccagaagcatttcatagctatcagccacagagtgaccctgatctgccatctcttaaagtgcacaccggtgaatttatccggcttcagtgcatcggcaaaaccaatcatagtaaaaccacagtgcctataataaggtttttggattgttgaatttataagcacataatgatttaatttattccataaataaatcatgacattgaagatgtaaactagcatgaacgtatcattagatctcctccctctcgtctctctgttccgctcgaacctccctggctccacttctacacgcctctcatgtctaatagtcaaatctggcgagctcacaagataagggagcttgacggcagcaacgaaaccaacctctctgagacggctccaactgagaagaacttcaactcggaagaggaggtatgatgcaggatataaccaaaggaagctaggggttcttttgcataaagcaggcatttcaaagcagtagttgaaagcagtaaaacagccactcccgcttgtggtaagcacggtaagtctcccagggtttcccgtgaaccggtccttaactgccat

SEQ ID NO: 18181 - DNA, 865 bp, Oryza sativa
  unsure (1)..(865): unsure at all n locations
  Clone ID: PAT_MRT4530_23764C.1
ggccgccccttttttttttttttttttcctcctcacaattttttttattatttcaacttgatatatatgacagatatgataaagacatggattaggtagtgatgcaattcacgagaagttccagggcaatcgacatgtactgagtagcggtcgcgcagccagcaatcaccttcttccccacgggcgacgaggcggggcggccatggcttccttcctcgttaaaccagtccgtgcatgacacgccactatccatcgcggaggtaagccacacattcgctctcaacttatccgaggcacgctgctcctcgcttcctctgccggacacgaggaagtcgatcctagccaacgtctcgtcggcgaacatgtaagtcgcgtcgaagtcccgcacacagtcggacagcagcatcacaagcatgcggcgctcggcgcccacgtcgccggggccgggcttcaagccgcggagctcgtcgaggaggccccggtgtcgctcgatagcgatggccgcgctagctcgagcaacttttccttggctgccattgaaggagctggcgtacgggaggagaatgtcgaagcagagttccggtagttctgacttcgaagtgcaggtcgcacggaggaactcctttgccgcggcggaggaggccggcgatagagccggtgccgaagatggtggtaggttgttcgtagctaagacggtggttgttgtgaaagtggctaggacaaggaggacgaggaaggagagtgcaagcgatggtgatgatgccattgtgaatatggaagatactaccttggttgaaacgaattgtcctaggtccattgatcgatatgctcgtatatgcactactatattatataattncccggc

SEQ ID NO: 18182 - DNA, 567 bp, Oryza sativa
  Clone ID: PAT_MRT4530_23765C.1
aagagggggaacacgcgcgtgctcgcctcgcagggcagatgcagcctccttttgcagttttgttttgctgcaggaaaattcggatttgttttgttttggaaacattccgaaaaatccggtgcgtaaaaacggcgtggagtccggataagttacttgcgacttatccggttcggttacgcagagtggagatcgtgcgggcgccctgatcaagcgacctatctctatataaaccgtgccgctgccttctcgcaacacacacgaaatcaatctagggtttgcctcctcctctgtgctgcgccgtcgctcgtagactactccatcccgctcgccagcgtgcaccagcgatcgggagagcaggtctccggaacctctgccttcgacgtcctgcaccgggagaaggcggcaataaggtttttgggaagcgcttcgcgcgactgctccctgttcgtccgcgacggctcgccttcctctccactcgcatgctgcgcgccttcgtcgacgctcgcaaccacgagtagttcctgccgagcaaccggtctttccgccacctcggtacgtgttcgacat

SEQ ID NO: 18183 - DNA, 3645 bp, Oryza sativa
  Clone ID: PAT_MRT4530_23766C.1
atggctggttttgccgatgcactgaggacggataaattcaccgatgtgcacttcaagagatggcagatcagggtcactctgtggctgacagctatgaaatgcttctgggtgagtactggcaagcctatgggtgttcttaatgctgatcagcagaaagaattcgatgaggccactactctctttgtgggatgcattcttagcgtgcttggcgatcgtctggtcgaggtgtatatgcatatgaccgacgctaaggagttgtgggatgcactgaatactaaattcggtgctactgatgctagcaatgatctgtatatcatggagcaatttcatgactacaagatggctgacaaccgttctgtagtcaaacaggctcatgagatacaaaccatggctaaggaactcgaactccttaagtgtgtcttacccaacaaatttgtggtcgggtgcattattgcgaaactacctccatcttggagaggtttcggtactgcactcaaacacaagagacaggaatactccattgaggggttgatagcgtctcttgatgttgaggagaaagctcgggaaaaagatgccgcgtctaagggcgatggtggccagtccactgccaatgttgtgcacaaggcccagaacaagagcaaggggaaatacaaagctcagcagaccaccaacttcaagaagaagaagaacaacaacaatcctaatcaggatgagaggacttgctttgtgtgtagtcaacctggccatctagcgaggaagtgtccacaacgcaaggggatgaaggcacctgcagggcagacctctaagtctgctaatgtgaccattggcaacactggagatggaagcgggtatggtaatttacctactgttttttcagttaatcaatctactaattggtgggttgatactggggccaatgtacatgtttgtgctgacatctcattgttttcttcttatcaggtcgcacggggttacaccgtcctagtggggaatgggtcacatgcttctgttcatggtgttggcacggtagatctgaaatttacttcaggaaagatcgtgcagctgaagaacgtgcagcatgccccttccatcgacaggaatcttgttagtggctcccgtctgactagagacggatttaagttggtttttgagtctaataaagtagtcgtgtctaaacatggatattttattggtaaagattatgagtgcggaggcctgttccgcttttccctttctgatttctgcaataagtctgtgaaccatatttgtggcagtgtggatgatgaggctaatgtttggcactcacgtttatgttatattaattttggcttgatgtctcggctttccagcatgtgtttaattcctaagttttccattgtcaaaggttctaagtgccatagctgtgtgcaatcgaagcaacctcgcaagcctcacaaggctgccgaggagagaaacttggcaccactagaactcctacattcagatcattgtgaaatgaattgggtgttgacgaagggtggaaaacgatatttcatgacgttgattgatgatgctactagattttgctatatgtacctgttgaaaatgaaagacgaggctctagactattttaaaatatataaggcagaagttgaaaatcaacttgacagaaagataaaaaggcttaggtctgatcgtggtggagagtttttctcaaacgagtttgacttattctgtgaggaacatggcatcatacatgagaggacgcctccctattctcccgagtctaatgggattgctgaaaggaagaaccgcacactgactgacttggtgaatgccatgttggacaccgcgggactacctaaggcatgcattgcctatagatttttaatatttaaatctgaggtacctgacatgcatgttggtacaatcatggagtctcgtgatgctaccttctttgagagcttttttccaatgaaggatacacatagtagttctagccaaacctctgaaataattcctaattcaatcacaccaccagaacaaactgaacatacacatgaacatgtcactgaggaggatgacagtgaagctcctcgaaggagtaaaagacaaaggacggctaagtcttttggtgatgatttcactgtgtacctcgtggacgacactcctaagtcaatttcagaagcatatgcatctcctgatgtagactactggaaggaggctgagatgacagagcgaccctatgggtgtaaacctgtggggtgcaagtgggtgttcaaaaagaagctgaggcctgatggtaccattgaaaagtacaacgctcggcttgttgctaagggctatactcagaaagaaggcgaagatttctttgacacttactcacctgttgccagattgaccacaattcgtgtgttactttccctagcagcctcacatggtcttctcgttcatcaaatggacgttaagacagcttttcttaatggagagctggatgaggagatctatatggatcagcctgatgggtttgtagttgaaggtcaagaaggcaagatatgcaaattgttgaagtctttgtatggtctgaaacaagctcctaagcaatggcacgagaaatttgatagaacattgacatctgcaggcttcgcagtcaatgaagcagataaatgtgtatactatcgccatggtgggggtgagggagttattctgtgcttgtatgttgatgacatactgatatttgggacaaaccttgaggtgataaatgaggttaaatcattcttgtctcaaaaatttgatatgaaggatttgggagtagctgatgttatcctaaacattaagctaattagaggtgagaatgggattacactcttgcagtcccattatgtggagaagatcttgaatcgctttggctactttgatagtaagccttctccaacaccttatgatcctagcttgttgcttcgcaagaacaagagaattgctaggaatcaactggaatactccaaaatcattggctcgctgatgtacctggctagtgcaactaggcctgatatctcctttgctgtgagcaagttgagccggtttacctctaatccgggagatgatcactggcgtgcgcttgagcgagtaatgcactatctgaaaggtactatggaattggggcttcactattctgggtatcctgtggtactggaaggatatagtgattctaactggatctctgatgtggatgagatcaaagccactagtggatatatcttcacactaggtggtggtgctgtttcgtggaggtcttgcaaacagaccattttgacgaggtcaaccatgaaagcagagttgacggcactggatactgctactgttgaggcagaatggctgcgtgatctattaatggatctccctattgttgaaaaaccggtgccggctatctttatgaactatgacaatcaaacggtaattgtcaaagtgaatagttctaaggataatatgaaatcgtctagacatgtgaaaagacgattgaagtctattaggaaactgagaaactccggagttataacgttggattacatccaaacagctagaaacctggcagatcccttcacgaagggactatcacaaaatgtgatagacaatgcatcgaaggagatgggtttgagacctatgtga

SEQ ID NO: 18184 - DNA, 1019 bp, Oryza sativa
  unsure (1)..(1019): unsure at all n locations
  Clone ID: PAT_MRT4530_23767C.1
cggcgcatgcacgctgacttatttttggaccctcaatctgcgcccgccctttttttnatttgggtaggcaaacatgcggtattatattctcctccatcataacaatttacaacacaagtcgcagatacaacacgggttacaaatatgacacgctcctttattcattcatcattacgtgatggagtacaagtttataggtacggttacacacacaagtagtagtctctgcagtagaggtaatgaaaacacgtacatgcagcattcgaacaagtaaaaaaaaacagatgtgcatgtccgttttccagaatatatatgcaggattagttaagaacatatataggtagaaatatattttgcaccaattaattaagcagattaagatgggtacgtagtagacattagcaagcaagcaccaaacctgtagattagatagatagatagatagatatctggagcggtatcatcagctgatgatgatgtgtatagatgaagtattgagctgatgcaagaggaggccttggattcgatgggtgaggaaatgaagtagtaaaatgatcagcaggtagcttcgcacttggtcgagcagtcgaaggagcagccgccgccgccaccgccggcggcgtagccattgccggagcggctgaaggagacgaagcacttcttcgggcaggtcagcttcttgccgttgcatggccccttgtcggagcaaaccatcgacggcgcctccgccccaccattcccgaacccgccgacgtcgccggcggcggcgctgccgtacccagctgcccacgctgcaggatcgccgttgtacgggttgttggtgccggggacgaagaagcctgccgggatgccgaagtcgtaggccggcggggcctggccggccgggtcggcggtgaggtcgcgcgcggcggcggcggaggcgattatgccggcggtgaagaggacggagacgacgacgatgagcagccttggagccatggtggccattgttggtacgtggtaagagagcggacgcgtgg

SEQ ID NO: 18185 - DNA, 680 bp, Oryza sativa
  Clone ID: PAT_MRT4530_23768C.1
gctgcaggaaattcgggtttgtttcgttttggaaacattctgaaaaatccggtgcagttttgttttgctgcgggaaattagggtttgtttcgttttggaaacagtctaaaaaatccggtgcgtgaaaatggcatggagtccggataagttacgcacgacttatccagttcggttacgcggagtggagatcgtgcgggcaccctgatcaagcaacctatctctgtataaaccgagccatcgccttcatgcaacacacgcgaaatcaatctagggtttgcctcctactctgtgatgcgccgtcgctcgtagactacttcatcatgctcgccggcgtgcacctgcgatcgggagagcaggtctccggaacctctgccttcgacgtcctacaccgggagaaggcggcaataaggtttttgggaagcgcttcgcgcgactgctccctgttcgtccgcgacggctcaccttcctctccgctcgcgtgctgcgcacgttcgtcgacacccgcaaccgcgagtagttcctgccgagcaaccggtctttcggccaccagtccacgtgctgcgcctcgtcccggccgctcctctccttctccacacgccgccgccctcggcccacaccgtcgcgacctgaggccgcgccgcgccgtgttgccgccaaatcccctcgaggtcgccgacaaa

SEQ ID NO: 18186 - DNA, 267 bp, Oryza sativa
  Clone ID: PAT_MRT4530_23769C.1
cgtgcacagggtgctccacgagccgctcttccccatcgagtggacaccaccgccgtccacgacgtcgccatcggcacccgtctctgctacgcccgcctcaccgacgcttccgcctcttcgccatggccgctgtcgtgcgggtcgacctccctttccctatcccctccacctccccgctcgccgatcgctggaccgccatcctcgcacgctgctgcccacctttacctctgctgccggcgccgcctcgcctcctcctccgctctgtga

SEQ ID NO: 18187 - DNA, 462 bp, Oryza sativa
  Clone ID: PAT_MRT4530_2376C.1
tctcggcgggtacaccatctcttcattccgtattccttgtcgagatctagcaaccgttctcgagcgattgagaaggcgtagagtatggtctttcgtctctgaaggatccgacaaggccttattggctctgggcgttcccagccgaagttccctcaggttcctcggaggccttgtcaagacggcgtaaagggacagtaggataggtttcaacgctaggtgtcttttgtggtaagggatctctgggtaaaacacttggcaatcttgtgcacctgatatcaaactttgtgaagcaggggtaatgggagaatcgctacatcgcttgtcgaggaccaggcagtagtcgtaactcgaccacttaaagtggaagtagtgggagaaacgccacatcgctggtcgaggaccagacagtagtcgtgactcgaccacttaaaagtgaggcgagagagatcactacgttttact

SEQ ID NO: 18188 - DNA, 3615 bp, Oryza sativa
  Clone ID: PAT_MRT4530_23770C.1
atggcagatcaggggcactctgtgtctgacggctatgaaatgcttctggatgatctgtatatcatggagcagtttcatgactacaagatggctgacaaccgttttgtagtcgaacaggctcatgagatacaaaccatggttaaggaactcgaactccttaagtgtgtcttacccgacaaatttgtggccgggtgcattattgcgaaactacctccatcatggagaagttttggtactgcactcaaacacaagagacaagaatactccgttgaggggttgatagcgtctcttgatgttgaggagaaagctcgggaaaaagacgccgcatctaagggcgatggtgggcagtccagtgccaatgttgtgcacaaggcccagaacaagagcaaggggaaatacaaagctcaacagaccaccaacttcaagaagcagaagaagaacaacatcaatcctaaccaggatgagaggacttgctttgtgtgtaggcaacctggtcatctggctaggaagtgtccacaacgcaaggggatgaaggcacctgcagggcaaacttctaagtctgctaatgtgacaattggcaatactggagatggaagcaggtatggtaatttacctactgttttttcagttaatcagtctactaattggtgggttgatactggggccaatgtcgcacggggttccactgtcctaatggggactgggtcacatgcttctgttcatggtgttggcacagtagatctgaagtttacttcgggaaagatcgtgcagctgaagaacatgcagcatgtcccttctatcgacaggaatcttgttagtggctcccgtctgactagagacggatttaagttggtttttgtgtctaataaagtagtcgtgtctaaacatggatattttattggtaaaggttatgagtgcggaggcctattccgcttttccttttctgatttctgcaataagtctgtgaaccatatttgtggcagtgtggatgataagactaatgtttggcactcacgtttatgtcatattaattttggcttgatgtttcggctttccagcatgtgtttaattcctaagttttccattgtcaaaggttctaagtgccatagttgtgtgcaatcgaagcaacctcgcaagcctcacaaggctgccgaggagagaaacttggcacctctagaactcctacattcagatctttgtgaaataaatagggtgttgacgaagggtggaaaacgatatttcatgacgttgattgatgatgctactagattttgctatgtatacttgttaaaaacgaaagacgaggctctagactattttaaaatttataagacagaagttgaaaatcaacttgacagaaagataaaaaggcttaggtctgatcgtggtggagagtttttctcaaacgagtttaacttattctgtgaggaacatggcatcatacatgagaggacgcctccctattctctcgagtctaatgggattgctgaaaggaagaaccgcacactgactgacttggtgaatgccatattggacaccgcgggactacctaaggcatggtggggggaggcattgttgacctcgaatcatgtgttaaatagagttcctaacagaaataaggacaaaacaccatatgagatatggattgggagaaaatcatcactttcttatttgcgcacattggggtgcttggcgaaagtcaatgtaccaataacaaagaagcgcaaacttagacctaagactgtggactgtgtctttctgggatatgctcatcataggattgcctatagatttttaatagttaaatccgaggtacctgacatgcatgttggtacaattatggagtctcgtgatgctaccttctttgagagctttttcccaatgaaggatacacatagtagttcgagtcaaccctctgaagtaatttccagtttaatcacaccaccagaacaaactgaacatacacatgaacatgtcactgaggaggatgtcagtgaagctcctcgaaggagtaagagacaaaggacggctaagtcctttggtgatgatttcactgtgtacttcgtggatgacactcctaagtcaatttcagaagcatatgcatctcctgatgcagactactggaaggaggctgtccgtagtgaaatggattccattatcgctaacgggacttgggaggtgacagagcgaccctatgggtgtaaatctgcggggtgcaagtgtgtgttcaagaagaagcttaggtctgacggtactattgaaaagtacaaggctcggcttgttgctaagggctatattcagaaagaaggcgaagatttctttgacacttactcacctattgctagattgaccacaattcgtgtgctactttccttaccagcctcacatggtcttctcgttcatcaaatggacgttaagacaatttttcttaatggagagctggatgaggagatctatatggatcaacttgatgggtttgtagttgaaggtcaagaaggcaaagtgtgcaaattgttgaagtctttgtatggtctgaaacaagctcctaagcaatggcatgagaaatttgacaaaacattgacatctgcaggctttgcagtcaatgaggcagataaatgtgtgtactatcgccatggtgggggtgagggagttattctgtgcttgtatgttgacgacatactgatatttgggacaaaccttgaggtgataaatgaggttaaatcattcttgtctcaaaattttgatatgaaggatttgggagtagctgatgttatcttaaacattaagctaattagaggtgagaatgggattacactcttgcagtcccattatgtggagaagatcttgaatcgctttggctacattgatagtaagccttctccaacaccttatgatcctagcttgttgcttcgcaagaacaaaagaattgctaagaatcaactggaatactcccaaatcattggctcgctgatgtacctggctagtgcaataaggcctaatatctcctttgttgtgagcaagttgagccggtttacctctaatccgggagatgatcactggcgtgcacttgagcgagtaatgcgctatctgaaaggtactatggaattggggcttcactatactgggtatcctgcggtattggagggttatagtgattctaactggatctctgatgtggatgagatcaaagccactagtggatatgtcttgacattgggtggtggtgctgtttcgtggaggtcttgcaaacagaccattttgacgaggtcaaccatggaagcagaactgacggcactggatactgctactgttgaggcagaatggctgcgtgatctattaatggatctgcctattgttgaaaaaccgatgccggctatcctaatgaactgtgacaatcaaacggtaattgtcaaagtgaatagttctaaggataatatgaaatcatctagacatgtgaaaagacgattgaagtctgtcaggaaattgagaaactccggagttataacgttggattacatccaaacagctagaaacctggcagatcccttcacgaagggactatcacgaaatgtgatagataatgcatcgaaggagatgggtttgagacccatgtga

SEQ ID NO: 18189 - DNA, 564 bp, Oryza sativa
  Clone ID: PAT_MRT4530_23771C.1
atgaggccggataaattcacaggtgtgcactctaagagatggcagatcagggtcactatgtggctgacggctatgaaatgcttttgggtgagtactggcaaacctgaaggaattcttactgctgatcagcagaagcaattcgaggaagccactactctctttgtgggatgcattcttagcgttcttggcgatcgtctggtcgagtttcatgactacaagatggctgacaaccgttttgtagtcgaacaggctcatgagatacaaaccatggctaaggaactcgaactccttaagtgtgtcttacccgacaaatttgtggccgggtgcattattgcgaaactacctccatcatggagaagtttcggtattgcactcaaacacaagagacaggaatactccgttgaggggttgatagcgtctcttgatgttgaggagaaagctcgggaaaaagatgccgcgtctaaggacgatactgggcagtccagtgccaatgttgtgcacaaggcccagaacaagagcaaggggaaatgtaaagctcaacagaccaccaacttcaggaggtag

SEQ ID NO: 18190 - DNA, 376 bp, Oryza sativa
  unsure (1)..(376): unsure at all n locations
  Clone ID: PAT_MRT4530_23772C.1
gaggcanaaggtcgtcgccgccgncgccgccgccttcgccgccgtttggtctcgtcgccttccggaccacccgcactagcccttctccctnctngcgcgcgcacgcagnacggccgacgacgacgagcaggtttggagggccgacgccgacgcggcggctgcctttacgggtnccgtcgtctctgcggcggctgcgattataccatctcacgagcagagaggagtagggagcaggagcaggnnaggggangcgccgtcgtcgggctgagtccgaacttttagcacaagttgtacttagagaagatatacatctncttgtgcttgtactntgtttttgtattgaggaagattcttgtagatcaatatcaacaactng

SEQ ID NO: 18191 - DNA, 3708 bp, Oryza sativa
  Clone ID: PAT_MRT4530_23773C.1
atggctggttttgccgatgcactgaggccggataaattcaccggtgtgcattttaagagatggcagatcagggtcactctgtggctgacagctatgaaatgcttctgggtgagtactggcaaacctgaaggagttcttactgctgaacagcagaagcaattcgaggaagccactactctctttgtgggatgcattcttagcgttcttggcgatcgtctggtcgaggtgtatatgcatatgaccgacgctaaggagttatgggatgcactgaatactaaattcggtgctactgatgctagcaatgatctgtatatcatggagcagtttcatgactacaaaatggctgacaaccgttctgtagtcgaacaggctcatgagatacaaaccatggctaaggaactcgaactccttaagtgtgtcttacccgacaaatttgtggccgggtgcattattgcaaaactacctccatcttggaggagtttcggtactgcactcaaacacaagagacaggaatactccgttgaggggttgattgcgtctcttgatgttgaggagaaagctcgggaaaaagatgccgcgtctaagggcgatggtgggcagtccagtgccaatgttgtgcacaaggcccagaacaagagcaaggagaaatacaaagctcagcagaccaccaacttcaagaagcagaagaagaacaacaacaatcctaatcaggatgagaggacttgctttgtgtgtggccaagttggtcatctggctaggaagtgtccacaccgcaaggggatgaaggcacctgcagggcagacttctaagtctgctaatgtgaccattggcaacactggagatggaagcgggtatggtcgcacggggttccaccgtcctaatggggaatgggtcacatgcttctgttcatggtgttggcacggtagatctgaagtttacttcgggaaagatcgtgcagctgaagaacatgcagcatgtcccttctatcgacaggaatcttgttatgagtgcggaggcctgttccgcttttccctttctgatttctgcaataagtatgtgaaccatatttgtggcagtgtggatgatgaggctaatgtttggcattcacgtttatgtcatattaattttggcttgatgtctcggctttccagcatgtgtttaattcctaagtttttcattgtcaaaggttctaagtgccatagttgtgtgcaatcgaagcaacctcgcaagcctcacaaggctgccgaggagagaaacttggcaccactagaactcctacattcagatctttgtgaaatgaatggggtgttgacgaagggtggaaaacgatatttcatgacattgattgatgatgctactagattttgctatgtgtacttgttgaaaacgaaagacgaggctctagactattttaaaatttataaggcagaagttgaaaatcaacttgacagaaagataaaaaggcttaggtctgatcgtggtggagagtttttctcgaacgagtttgacttattctgtgaggaacatggcatcatacatgagaggacgcctccctattctcccgagtctaatgggattgctgaaaggaagaaccgcacactgactgacttggtgaatgccatgttggacaccgcgggactgcctaaggcatggtggggggaggcattgttgacctcaaatcatgtgttaaacagagttcctaacagaaataaggacaaaacaccatatgagatatggattggtagaaaaccatcactttcttatttgcgcacatgggggtgcttggcgaaagtcaatgtaccaataacgaagaagcgcaaacttggacctaagactgtggactgtgtttttctgggatatgctcatcatagcattgcctatagatttttaatagttaaatccgaggtaccggacatgcatgttggtacaattatggagtctcgtgatgctaccttccttgagagctttttcccaatgaaggatacacatagtggttcgaaccaaccctctgaaataattcccagttcaatcacaccaccagaacaaactgaacatacacatgaacttgtgtctgaggaggatgtcagtgaagctcctcgaaggagtaagagacaaaggacggctaagtcttttggtgatgacttcactgtgtacctcgtggatgacactcctaagtcaatttcaaaagcatatgcatctcctgatgcagactactggaaggaggctgtccgtagtgaaatggattccattatcgctaacgggacttgggaggtgacagagcgaccctatgggtgtaaacctgtggggtgcaagtgggtgttcaagaagaagcttaggcctgacggtactattgaaaagtacaaggctcggcttgttgctaagggctatactcagaaagaaggcgaagatttctttgacacttactcacctgttgctagattgaccacaattcgtgtgctactttccctagcagcctcacatggtcttctcgttcatcaaatggacgttaagacagcttttcttaatggagagctggatgaggagatctatatggatcaacctgatgggtttgtagttgaaggtcaagaaggcaaagtgtgcaaattgttgaagtctttgtatggtctgaaacaagctcctaagcaatggcatgagaaatttgacaaaacattgacatctgcaggctttgcagtcaatgaggcagataaatgtgtgtactatcgccatggtgggggtgaaggagttattttgtgcttgtatgttgacgacatactgatatttgggacaaaccttcaggtgataaatgaggttaaatcattcttgtctcaaaattttgatatgaaagatttgggagtagctgatgttatcttaaacattaagctaattagaggtgagaatgggattaatctcttgcagtcccattatgtggagaagatcttgaatcgctttggctacattgatagtaagccttctccaacaccttatgatcctagcttgttgcttcgcaagaacaagagaattgctaggaatcaactggaatactctcaaatcattggctcgttgatgtacctggctagtgcaactaggcctgatatctcctttgctgtgagcaagttgagccgatttacttctaatccgggagatgatcactggcgtgcgcttgagcgagtaatacgctatctgaaaggtactgtggaattggggcttcactatactgggtatcctgcggtactggagggtcatagtgattctaactggatctctgatgtggatgagatcaaagccactagtggatatgttttcacactgggtggtggtgctgtttcatggaggtcttgcaaacagacaattttgacgaggtcaaccatggaagcagagctaacggcactggatactgctactgttgaggcagaatggctgcgtgatctattaatggatcagcctgttgttgaaaaaccggtgccggctatccttatgaactgtgacaatcaaacggtaattgtcaaagtgaatagttctaaggataatatgaaatcgtctagacatgtgaaaagacgattgaagtctgtcaggaaattaagaaactccggagttataacgttggattacatccaaacagcgagaaacctggcagatcccttcacgaagggactatcacgaaatgtgatagacaatgcatcgaaggagatgggtttgagacccatgtga

SEQ ID NO: 18192 - DNA, 235 bp, Oryza sativa
  unsure (1)..(235): unsure at all n locations
  Clone ID: PAT_MRT4530_23774C.1
aggaaggataacgggcagctgnccgaaggtggaaggaaagacaacggcgcatgcgtgcgcnggaaggtcaacacaagagcgctcaaaggtagnaacgagctntaaggcagccacgagagagaacgaggtgcgcggggtctgcggcggcggaaaacggcggcggtgcacgaggaccggcaggagggagcggcgcgcgcactactacaaaagtgatttatcttacgagaccccatga

SEQ ID NO: 18193 - DNA, 597 bp, Oryza sativa
  Clone ID: PAT_MRT4530_23775C.1
atggccggcaaagcggcgaaggcgacggcgactaatgctaacaacaacggcggcggcggatacataaggacggtgacgctgcgcggcttcgacggcatccgcgtccgcgtctcggcggcgacgatggcggcggcgtcggcgacggcgagggccaggctcgacgaggcgatccggcggacgccccgccacgccgccgtccccgacgacgtcctcatcaacgtccccggcgtcgcccgccccgtgctcgcccgcgtcgccgactactgcgaccgccactacggcggcggcggcggcggcgagggcggcgagttcgcggcgccggaggggtacgggttcgacgacccgctggcgcggttcgacgacgagctgatggacggcgccgacgtgggcacggtggtggacctcctccgcgccgccgcgttcctgcgggtggagcggctggccgacctggcgagccgcgaggtggcggcgtgcatgcgcggccggacggtggaggggatccgccaggtgttcggcatcgccaacgactacaccgacgaggaagaacaggacgtccgcaaggagaattcttgggccttcgacgcctacaacgattga

SEQ ID NO: 18194 - DNA, 312 bp, Oryza sativa
  Clone ID: PAT_MRT4530_23776C.1
tcctcctctctccagatccacatcctctcctggtcccattctgatcggtggcgcggtcgcgacgaagggaggcggacgtcggggggcgcgacgatggcgactgcgacgggatggcgacgggggccgcggcgaagggaggcggtcgtcgtggggcgcgacgatggcgactgcgacggggggcgccgacgcctagtcccagcttctctccctctctctctctctctctctctctatgtatctctctctctctccattcggccggcgtcacagggcggcgggggagggggtggtcttgctttaatcacttttttt

SEQ ID NO: 18195 - DNA, 1688 bp, Oryza sativa
  Clone ID: PAT_MRT4530_23777C.1
cgggctgcaggtcatatccaaatctcccgcgaatccctccaaaaccccaccatacattgcacgcgctcgcgccacgcgagagcccagaggtttgcgtctttgcggcgcgcgcgtgcgtgcgagaagccgagaggtttgcgcccttgcagttgcggggtgggaggggagaatggcgccgccgctgctgccggcggctgaggaagacggtggttgcgtggcgaggtggatgcggagggatgtgctgctggggctggcgctggggcagttcgtgtcgctgctcatcacctccaccggcttctcctcctccgagctcgcccgccgaggtatcaatgcaccgacatctcagtctctgttgaactacatccttctctcccttatctatggaggtatactcatctaccggagacagcccctcacgataaaatggtactactatttgatccttgggattattgacgtggaagcgaattatatagttgtgaagtcttatcagtacacatctttgacaagcgtgatgctcttggattgctggtcaattccttgtgtgattattcttacatggatatttttgaagaccaagtatgggctcaggaagttcatcggtgttggagtttgcgtggctggacttatattagtagtattttcagatgtccatgcctctgatcgagctaaaggacccaaccctttgaagggagatttgctcgtaatctttggttccatgctttatgcttgcagcaatgttacagaggagtacctggtcaagaaaagcaacagaattgagttgatggcaatgttgggactttttggagctattatcagtggaatacaaataagtatacttgagcgaaaagaacttcattcaatcaaatggaatgctggcgcagtgcttccttttcttggattcgcattagcgatgttcctgttctactcaactgtacctacagtactgaagatatgtggggcaacgatgctgaacctctcactgctgacttcagatatgtgggctgttctgatccgcatctttgcttaccatgagaaggttgactggatctacttcgttgccttcgccggcacagcggctggcctcctcatctactcatacaagagctccaaggaggcagaggagacggcgcaggtcgccggagctagtgacaagcagggcaaagcgggcgatgaagaggccggaatgcagaactcctcgtgaattgaagctccggtgcctgcatctgcatcggcatcggcacgatctctctctaacaagggatcatcgttaactgcgtgcgagtacacgtacttacagggaaatatgttagttgttgatgaattaacatcaggtttagtgcgggtggagtgagggaggacaggcagtaattgattgagcagatgggtagaagagatcaaacgatggactgaaggagccgaactgaggaccagaaaaactgggcaggaagctttcctcaccttttattattttataaaatatatacatcaataattttccaataaatagatgtgccaatttcttttgtttttgtctttgcaactggcagtgaaatggcaatggtattacaaagtttcacgaggaaactaaaacttatacacttaaagcgagtggtacatgaggagacaaaagggagtaaaacttaatgctgaaattttcagaattatagataaaaaaaaaaaaaaaa

SEQ ID NO: 18196 - DNA, 1805 bp, Oryza sativa
  Clone ID: PAT_MRT4530_23778C.1
ccacccccttttattattgccgaaatcttgtttcgacaccatgagaagcgcatcagagcatgcacactttcgatcgacgattacgtcctccgatgggttcaaagccaagcagggcgcaacaagctctcacccaaatgggaaggaccatacacgatcacacaagtcttgcggccaagtgcattcaagattgcagatggtgatggatgcgagttagcaaattccttctctgcaagcggtgccatcgattgcgcgagaccgtcgatctccgcgggagtcctccgagaatgcgagaactgttcgtggaggaactcgaggtgtagctgcgggtggtgatctcggatgcaggccagcacatgtcctccggcgtaccggcttgatcgacgacactcctgcttcagggcctcgtcgagacgtttgccgatcccttcgagctgtgcacaagccccattcagccacgagatatatccggccgccgactcctcgggatctccacggggaactcgaagctccttgtagactcccgtcattgccgtgcagcagctcttaaggtatgagttgaaccacacctcgcgacctcgaagagcttccacggcccggtccttcttcacttccaccatggtcctctcgagttcagccacctcgagcttcgtattccaatattggattcgacgatctcggtcagccaacgcatcctcctcccgcgacacgaatggctcgagcgcaagcgccgaaatgatcaccggcatgccaggctgcccgcgctgctggacactctcgatatcaacatctttgcgtgtgtcatcagcggccccctgatccaaaaccttcttaaggtccaggtcagggtgcgccagcctcacgcacgcgaggacgtggcacgccccgttgaagaccccgttggacgtctcctcaccaagcctggctgcgtgcttggaggggatctcctccatcgccgtggccaactccacgagcgaggacgtcagtgagaactcatcagggttcgccgggatggtagtcgtgacaccacactccccagcgagctggtgtaggccggtgtacgatattcgcagtgagcctcggatttctgacagattgttctcgagctccgatatccgatgctcgagcccttgccgctgcctctcgttgccggccaccagcaccctcatcttcaggaggtcctcgcgggcctctgctaggtcacgtgccagctggtcggcacgctggtttgctgacgacgttgccgccttggtcccaccttgcgccgccttcgcccgcgccgccctacgaagagtttcctctctttcataaagttctcgctgatcatcaccagcctttgccttcgctgaggtgggggagacgcgtccgattcctaagtaagatacgacggtgtgaggaccagtcattctgagacgggtcccgagtacggacgagaatttcctccccttcttcaaaacattgctgccacttgtggtagcagcagcagcggcaacgtcggacgcttctttggtgacgccctccttcaatgacgccgccacctggtggtccgcgagtggttcgatgacgtctgtcagagggagagcattaattgcggcggcacgttcggccggacccttctcgcaaagggggatcgggatgtcgcccgccactgagggggcgctgatcatcacctggctgacgcggtgtcccacggtgtcactttccagacctcctgtctccctctgcatggtcccgcgaccagggagggcgccgtcgtcatacaatttcttcaaagacgcggtggttgaggtggacttgtcaagatccat

SEQ ID NO: 18197 - DNA, 501 bp, Oryza sativa
  Clone ID: PAT_MRT4530_23779C.1
atggaggagttccacaaggagatccgacggtgccgacgagctgctggagttgttcctcagggcgggcactgggtctcaccggagtcgaggtggaagaagatgacggcgacgatgcactggtacccgaggtgcccggacctgcggcgagcgctgggactcagtgcacacagcgactccggcttctgctctagagcatcgtgccagggctgcagctgttccggcggggaccagaccgcgtctaccaccgcgccgttgtcaaccgcaaccgcgataggatatcgctcggatacttcctcggcctaccagccgaacgtcaaggttgccggaggccgtgtgccgcccggctggagcgccgcctaccgcgccgtcacgtggccggagtacaaggccgtccgcaagaaggccttcaccacaggcggctccaccctcgagatggtctccacccccaccgccactgacgaacacaacgacgtaaccgacgtcgtccgggatgtcatataa

SEQ ID NO: 18198 - DNA, 661 bp, Oryza sativa
  Clone ID: PAT_MRT4530_2377C.1
ttgttaacttctccggacgtcagctctttcagtggccataggtcagcaaccgcagaagaattgatgtctacagacacaagggagcaagaaattacatggctggcaaggtcttgtagtagcagtggaagtgatcctaacaagaaaaaatcagaggtaagagggggaggcaaagcgtctgttcaagtcagagacttcacatggcacatcatctcccaagttttagtaactaacaatatggcagaatagtggattgactttgcaaactgaggagtcagcatttgaaaaacttgtttcgaaaccacacgcagcatcaatcgcccaaagtgaacctgggggagaagatcatggctttgcagcagattatgtcacctttcgggaagacagatacagcgtctgtcctggtggaaaccataacctacatcaaatttcttcatggtacagatgccttcaatgtttttatctggatagatgctggtgctgagtgcactgctttacttgatggaggatcaattgaggaagcctcctgcatttctgcaagactgactacttgagagcggtcaggtatctgatgagctttatcatattctacaaaggttgagtacagggaaatgaacgaggaatggatacatactcaagaaaggaggagttcgaacaagagagc

SEQ ID NO: 18199 - DNA, 138 bp, Oryza sativa
  Clone ID: PAT_MRT4530_23780C.1
atggcgtgctttttgctggtctggacgaaagaacactcaaggttgaagcactttaatttcacgccaccatcgttctgcatatatagtatatcccatgcatcaattacaccagtaagaggagtagaggactcctactga

SEQ ID NO: 18200 - DNA, 462 bp, Oryza sativa
  Clone ID: PAT_MRT4530_23781C.1
atggggaagaccacagcttcggcggtggctggggaagacatcggctccgacggtggcagcggtggaggctttcaacaatggggccaatactggcgatatgctgatgatgatgaagtggcaaatggggaagagggccaacctcggtgccggccatcggtggagtgcacgccggtgtcggtggcggcggaaggggctgaggtcggctccggcgaggatgcggcgaagtggcggcagcggggaggagctccggcgaggacgcggggaggaggaggagcgagcgaggagaagaagcgcggtcttcgcggccgcgggtggaggaggaacgatgtcttcgcgcgtggaatcctcggcggtgaaatcgtgcggtggagaaaacttgcgcgcggatggacggttcagatcaatttggatgatttgacctgtagcattggaggaggacaacttctttttatattagtatag

SEQ ID NO: 18201 - DNA, 456 bp, Oryza sativa
  Clone ID: PAT_MRT4530_23782C.1
atgatgacggtggtgccggaggaggaggccgtcgacagcgatgatggaggcaacgtggccagcgccgaagagggatccgaccccttcttccctattgccgtcgccaacgcaccctccctcacttctttatcgtcatcgtggagcaccctcgccgacggggaaatcagatggcgacgatggtgcagccgcaacgctcgtcatatgatgatgagatgcaaaggaatggatggagacgaaggcctccgctggagtgcccatgtggtggccgaggcagccgagaagagccgcctccgccgcttgccacccctagccgcctctaccgctcgagctcctccacttgccgctgtcgtgctcttcatgcgccagtggaggccgaggagaagccacccgaccaacaaggagacgcgtgctggcggaggccaaggaggagccacctcagaagctaaatgcccctaa

SEQ ID NO: 18202 - DNA, 381 bp, Oryza sativa
  Clone ID: PAT_MRT4530_23783C.1
atggcctggcttcttgggtccctcgtctccaattgcaacagcaactgcccggggaataagtcaactttaattccctcgaacatgtgcgatttgtatcaatctaggggtgaaaaatatacggaaatttccgagatatctagttatcgtttccggtctactatttcgattccgttttcgagaaaaaaatatgcaaatgaaaatggtagagggtcggagttggcggcgacaaaggtcgacgtcgacgagaacacatcaagaccgacccttccaaagtggaagctcatcaggagcggcattgacaacctcccagctcccccgatgtcaagctgcatcgacaaggaagactcgacgacgtcggtgaagaaccgatgcaagcgatag

SEQ ID NO: 18203 - DNA, 336 bp, Oryza sativa
  Clone ID: PAT_MRT4530_23784C.1
gtggtcccggagctcgtccgcccgtcgccgtcgtcctcccgtcgctcgtcgtcgccgttcgccgtcgctcctcccccgcgccggccgagcccctcgtcaccgccgatgtccgtgccgcgccgctgcacgccatgcccgggccggcttgagccacccgtgcactgcccagccgcgagccgctgcagccgtccgatctatcgctcagtagatcggggccgttcgcctgccgcccgcgtggccgtccacgtggccgccacgtcggcgccacatgtgcgccacgtggtgctcctctccgcggtcccgtggactcagtccacagtaaaccggtgcctttga

SEQ ID NO: 18204 - DNA, 641 bp, Oryza sativa
  Clone ID: PAT_MRT4530_23785C.1
atggcccagtccgagccgccttcctcccctctcaaggtcaccgacaggtggggcccacctgtcagccccttcttccacccccagccgcccacgcggccgcgccaagcaggcaaccgccgaccacgccgtggccttcccgcctctccgtgccccactccgcccgtggtcccggagctcgtccgcccgtcgccatcgttctcccgtcgctcgtcgtcgccgttcaccgtcgctcctcccccgcgccggccgagcccctcggtgaggatcggtctccctcccttcctctccctctctctctctttgtcgcgccgccgcgtcgccgcataccgccactcctcgccgctcaccgtcttgcgccgccgcgagccgccggtgtccgtgccgtgccgccgcacgccatgcccgggccggcttgagccacccgtgcactgcccagccgcgagccgctgcagccgtctgatctcccgctcggtagatcggggccgttcggctgccgcccgcgtggccgtccacgtggccgccacgtcggcgccacgtgtgcgccacgtggtgctcctctccgcggtcccgtggactcggtccacaatttcggccatttcgtcgacccgcggtccctcgaagacgttgctatggtctcatca

SEQ ID NO: 18205 - DNA, 869 bp, Oryza sativa
  unsure (1)..(869): unsure at all n locations
  Clone ID: PAT_MRT4530_23786C.1
gtgtggcctcctcctccgttccgtttcgcagtcgtcgtcgtcgtctccgatgatgataagctgcgactgcgagatggtggtggaagagcactgggaatcaacctaaccagcagcagcagcagccacagcagtgagcttcttccaggccacagaaagagagagagagaggggaccaactgaaaagagagagaagctagaaggagaggagtccaaacttccaagacacccactactgctgctactgtgttcgtgttcctctcttggcctctctcttggttcgtgttccttccttctttctttgcgagaaagaaagatgggattctgggagcgctaggttttcctgctcatctgattcttggttctacatccagttcttgggtgtgtttttcttttcctttttctccatgcgcttcttgtgtttgagaagtggtcggtaatctcgagggaagtacggagccacgcggttccaaaatctcccgtcttggcctggttcctgttgacgcggcagatgattttcacggagaaatttgagagcttcccgtagtttgatgttccaagcagccaaacctaaggagctccagtggtgaggagaggggggcaagatcaaatctcggtgcatatttctgcaatccgaagactgtgatattttgcaacaaccagagctgaatttgccaaagtggaggcagtattgggttcttagacttctcagggacaagatcttgcattggacttgaaattcacaacaccatcgaactgaaagaacagtagtttgttggatttgggggatggagaggcaatccancagccggctcggcgctctggagaagctgaagagcttccgggggatagagaagcagagaagcttcaag

SEQ ID NO: 18206 - DNA, 280 bp, Oryza sativa
  Clone ID: PAT_MRT4530_23787C.1
aaacagggctaaaagcccaaacccccgggggtttatttaatcatcaatggaaatttttttacatatgccccccgtaattttgggaagaacgccttaccaaataaatccctggggagttttaaacttcaacaaaggggacccccttaaaggggaaaagggataaacatgaccttgtattgccgggctggccgttgggggagaccccttaataatggcggcgcttgggcttgatgaaggacccggtggggggggcccccaaaaaataaacacgcttgtttcg

SEQ ID NO: 18207 - DNA, 159 bp, Oryza sativa
  Clone ID: PAT_MRT4530_23788C.1
atggcttcgtcggaatctgtccccgccgcctcggaaaccagcgccgacaccaccgcctactcgatcgccaagcccaagcccaccttctaccggcggccgcacaccaatgggctagaacgacatcccgacccgcatgacgcccccgaacggcagttttga

SEQ ID NO: 18208 - DNA, 1159 bp, Oryza sativa
  Clone ID: PAT_MRT4530_23789C.1
tctagtagtgtaagtagtagtcttgctttctcgtttggtcaggtcatcgtgttagttcgagttcttctcgttatcatccatcttttactgctcaaggtgtccgtcggcttcgacgctcctcgtcttggtggtgtggtgagcatcaccgccaccatcgccaccgccaccaccaccgccaccgccaccccctcactgattcttcggttaggaataacccatgtgctaatttccagcctcctagtgatgcagctgctttatctatttattgcgttgattccaatggatgctgcaacttcagctgtgtgcaatcagccgtcgatgcgattcccgaaaatagattgacaagaagtgtcgtttgaatcaactccggcacatacattgaaaaggtgacagtgaacttttcaaagcctaatgtaacattccaaggacaaggttttgagtcgacgatcatcgtttggaacaatagcgcaaaaaatacaggcacattttacagcgccaccgttgatgtttttgctacaggatttgtaacgaacaacatcagttttaagaatgcatccccagctccaaagccgggtgatcgtgacggacaggctgtagcaattagagtttcaggtgatcaagcagcgttttgggttgcggcatgtatagctaccaagatacattatttgatgatttaggccgtcattactttagtgattgttttattgaaggttcgattgattttatctttggcaacggcagatcattttatgagaagtgtattttgaactcggtagctacaagcgatgggatcaacggtgcaatatgtgcacaaggccgtgaatacgcggccgatgacacgggctttgcctttgtcaattgtcgcatcaccggcagtgggctgattttattgggccgtgcatggaggccctactcccgcgtggtcttcgcgcacacggacatgcccggtatcattgtgccgagggttggagcgactgggacgacccgcaacgagatgcgtaccacgatgttctacggtgaatacatgtgtacgggtgtgggcgccaacatgaccggtagagtaccatatgccaaaccgctgacggagcagcaggcgcagatatacctggacgcttcctacgtggacgcggatggctggttaaaaccgttcaacgattct

SEQ ID NO: 18209 - DNA, 461 bp, Oryza sativa
  Clone ID: PAT_MRT4530_2378C.1
atgtctctcgatcatttgaagtcgtggtacgaggaccgctgcgttattgctgtagtcgtacctcgaccatctaaggttgcagtgcgagagagtgctacgtactggttcgaggaccagcgaacgtgtagaattatctctcgaacaccaatggaggttgcggtgcgagagagtgctacgtactggttcgaggaccagcgaacgtgtagaattatctctcgaacaccaatggaggttgcggtgcgagagattgctacgtacttttctcgagtagtagtccagccatggccggtgctatgagataggtcgtcggccttcgttggtaggttgggcgcgacgactctacatttgtcgagaccgttctcgataatgcggtgtacttgaccacaacctactcgagtgctcaattgttcctttgtagatacatgccggatgtatcttattgcgtactcgtttgacgtcat

SEQ ID NO: 18210 - DNA, 873 bp, Oryza sativa
  Clone ID: PAT_MRT4530_23790C.1
atgggctgtgtatcatcaaagcagttcaaaagagctgcacaacatgaggatcctgctattctggccaaagagactacattttcagtgagtgaagtggaggccctctttgagctgttcaagaagataagccattccatattcagagatggtctcattcacaaggaggagttccagctagctctcttcaggaacagcaacaagaagaaccttttcgccaatcggaacctgttcttatgtgaaaatgctgacagtgtttcaccacaagtgcagatatttgatctctttgatctgaagcgcaacggtgttatcgatttcggggagttcgttcgatccctcagcatttttcacccggaaacgcctttgggagacaagattgccttattcttttttgtagttgcatttaggttgtatgacctgagaggaactggatgcattgaacgtgaagagttgcacgaaatggtgcttgctcttctgaatgaatcagatctattcctatctgaagaagctgtagaacaaatcgtggatcagacgttcaagcaagcagacttaaacgatgacgggaagatcgaccccgatgaatggaaaacgtttgcgagtaaaaacccggctttgctgaagaacatgactcttccatacctaaaggacataaccatggggcatgactacatggggaaacccatgggaacagagctagatgaatcacaatcatcagacatgggcacacagtatgcagcaatagtgaagacctcagcactgaagaacagtcacgatgatatctctgatggatcgcagaagttgagatgcattgtgtttgggagagtttctggcagggcttgtttggcacagctccagctccagctccacccctcctag

SEQ ID NO: 18211 - DNA, 1666 bp, Oryza sativa
  Clone ID: PAT_MRT4530_23791C.1
tatgatggctgataaatgaaaagcaattcgaggaagctcctcgaaggagtaagagacaaaggacggctaagtcctttggcgatgatttcgctgtgtacctcgtggatgacactccttagtcaatttcagaagcatatgcatctcctaatacagactactggaaggaggctgtccgtagtgaaatggattccattatcactaacgggacttgggaggtgacagagctaccctatgggtgtaaacctgtggggtgcaagtgggtgttcaagaagaagcttaggcctgacggtactattgaaaagtacaaggttcggcttgttgctaagggctatactcagaaagaagtgaaaatttctttgacacttactcaccagttgctagattgaccacaattcatgtgctactttccctagcagcctcacatggtcttctcgttcatcaaatggacgttaagacagcttttcttaatagagagctggatgaggagatatatatggatcaacctgatgggtttgtagttgaaggtcaagaaggcaaagtgtgcaaattgttgaagtctttgtatggtttgaaacaagctcctaagcaatggcatgagaaatttgacaaaacgttgacatctacaggctttgcagtcaatgaggtagataaatgtgtgtactatcgtcatggtgggggtgagggagttattctgtgcttgtatgttgatgacatactgatatttggaacaaaccttgaggtgataaatgaggtcaaatcattcttgtctcaaaattttgatatgaaggatttgggagtagctgatgttatcttaaacattaagctaattagatttgagaatgagattacactcttgcagtcccattatatggagaagatcttgaatcgctttggctacattgatagtaagccttctccaacaccttatgatcctagcttgttgcttcgcaagaacaagagaattgctaggaatgcaccggaatactcccaaatcattggctcgctgatgtacctggctagtgcaactaggcctgatatctcctttgctgtgagcaagttgagccggtttacctctaatccgggagatgatcattggcgtgcgcttgagcgagtaatgcgctatctgaaaggtactatggaattggggcttcactattctgggtatcatgcggtactggagggatatagtgattctaactggatctctgatgtggatgagatcaaagccactagttgatatgttttcacactaggtggtggtgctgtttcgtggagatcttgcaaacagaccattttgacgaggtcaaccatggaagcagagttgacggcactgaatactgctactgttgaggcagaatggctgcgtgatctattaatggatgtgcctattgttgaaaaaccaacatgtgaaaagactattgaagtctgtcaggaaattgagaaactccggagttataacattggattacatccaaatagctagaaacctggcagatcccttcacgaagggcctatcacgaaatgtgatagacaatgcatcgaaggatatgggtttgagacccatagcattcttgaaagaacccacctttgtgagcttgactgttggtcgcagtctatggagattttgggtgaatcttctaggaagcttactaaagacctaggagta

SEQ ID NO: 18212 - DNA, 351 bp, Oryza sativa
  Clone ID: PAT_MRT4530_23792C.1
atgggccaacaacaaggtattcaaggtatgggcgaggttgccaggattgcaactgtgggggtagattcccttatctcagctttgcaagaaatagcatgtgccatccatcccacaacaagtgtaatgcaccagcccgtacaccctacaggttgggtatgggtggcaccaggaatgtgcactcttggtttggctggcatatggcatagagtttcatcactagttagtgctagctgttgtagggctctcgttgcttcggaggaatgccacaatctttcatacgactggctcgtgaaccatgctggtcatggagtcaagtgcatccctctcgtcttagagacacacacaggatag

SEQ ID NO: 18213 - DNA, 371 bp, Oryza sativa
  Clone ID: PAT_MRT4530_23793C.1
gtaccctctgtgctccatttatatttctcacaaaggggcatgactacatggggaaaccatgggaacagagctagatgaatcacaatcatcagacatgggcacacagtatgcagcaatagtgaagacctcagcactgaagaacagtatgcaggctaaggataaaatggttcacctgtacatgactgatcttcaggtcacgatgatatctctgatggatcgcagaagttgagatgcattgtgtttgggagagtttctggcagggcttgtttggcacagctccagctccagctccacccctcctagagctcagccaaacagtttcagctccaccaaaactgggagtggagctgggtggaactctctcacaaaat

SEQ ID NO: 18214 - DNA, 3273 bp, Oryza sativa
  Clone ID: PAT_MRT4530_23794C.1
atgcatcggcgatcggatgagcaggtctccagaacctctgccttcgatatcctgcaccgagagaaggcgacaataaggcgctgtgattttactatggttggttttgccgatgcactgaggccagataaattcaccggtgtgcacttcaagagatggcagatcagggtcattctgtggctaacagctatgaaatacttctggaaagaattcgatgagaccactactctctttgtgggatgcattcttagcgtgcttggcgatcgtctggtcgaggtgtatatgcatatgaccgacgctaaggagttgtgggatacactgaatactaaatttgctgctactgatgctagcaatgatctgtatatcatggagcagtttcataactacaagatggctgacaaccgttctgtagtcgaacaggctcatgagatacaaaccatggctaagaaactcgaactccttaagtgtgtcttacccgacaaatttgtggccgggtgcattattgcgaaactacctccatcttggagaggtttcggtactgcactcaaacacaagagacaggaatactccgttgaggggttgatagcgtctcttgatgttgaggagaaagctcgggaaaaagatgtcgcgtctaagggtgatgttaatcagtctactaattggtgggttgatactggggccaatgtcgcacggggttccaccgtcctaatggggaatgggtcacatgcttctgttcatagtgttggcacggtagatttgaagtttacttcgggaaagatcgtgcagctgaagaacgtgcagcatgtcccttctatcgacaagaatcttgttagtggctcccgtctgactagagacggatttaagttggtttttgagtctaataaagtagtcgtgtctaaacatgaatattttattggtaaaggttatgagtgcggaggcctgttccgcttttctctttctgatttccgcaataagtctatgaaccatatttgtggcagtgtggatgatgaggctaatgtatggcactcacgtttatgtcatattaattttggcttgatgtctcggctttccagcatgtgtttaattcctaagttttccattgtcaaaggttctaagtgccatagttgtgtacaatcaaagcaacctcgcaagcctcacaaggctgctgaggagagaaacttggcacctctagaactcctacactcagatctctgtgaaatgaatggggtgttgacgaagggtggaaaacgatatttcatgacgttgattgatgatgctactagattttgctatgtgtacttgttgaaaacgaaagacaaggctctagactattttaaaatttgtaaggcagaagttgaaaatcaacttgacagaaagataaaaagacttaggtctgatcgtggtggagagtttttttcaaacgtgtttgacttattctgtgaggaacatggcattatacatgagaggacgcctccctattctcccgagtctaatgggattgctgaaaggaagaaccgcacactgaccgacttggtgaatgccatgttggacaccgcgggactacctaaggcatggtggggggaggcattgttgacctcgaatcatgtgttaaacagagttcctaacagaaataatgacaaaacaccatatgagatatggattgggagaaaaacatcactttcttacttgcgcacatgggggtgcttggcgaaagtcaatgtaccaataacgaagaagcgcaaacttggacctaagactgtggactgtgtctttctgggatatgctcaccacaacattgcctatagatttttaatagttaaatctgaggtacctaacatgcatgttggtacaattatagagtctcgtgatgctaccttctttgagagctttttcccaatgaaggatacacatagtagttctagccaatcctctgaaataattcccagttcaatcacaccatcagaacaaactgaacatacacttgaacatgtcactgaggaggatgacagtgaagctcctcgaaggagcaaaagacaaaggacggctaagtcttttggtgatgatttcactgtgtacctcgtggatgacactcctaagtcaatttcagaagcatacgcatctcctgatgcagactactggaaggaggctgtccatagtgaaatggattccattatcgctaacgggacttgggaggtgacagagcgaccctatgggtgtaaacctgtggggtgtaagtggctgttcaagaagaagctcaggcctgacggtactattgaaaagtacaaggctcggcttgttgctaagggctatactcagaaagaaggcgaagatttctttgacacttactcacctattgctagattgaccacaattcgtgtgctactttccctagcagcctcacatggtcttctcgttcatcaaatggacgttaagacaacttttcttaatgaagagctggatgaggagatctatatggatcaacctgatgggtttgtagttgaaggtcaagaaggcaaagtgtgcaaattgttgaagtctttgtatggtctgaaacaagctcctaagcaatggcatgagaaatttgacaaaacattgacatctgcaggctttgcagtcaatgaggcagataaatgtgtgtactatcgccatggtgggggtgagggcgttattctgtgcttgtatgttgatgacatactgatatttgggacaaaccttgaggtgataaatgaggttaaatcatttttgtctcaaaattttgatatgaaggatttgggagtagctgacgttatcttaaacattaagctaattagaggtgagaataggattacactcttacagtcccattatgtggagaagatcttgaatcgctttggctacattgatagtaagccttctccaacaccttatgatcctagcttgttgcttcgcaagaaaaagagaattgctaggaatcaactggaatactcccaaatcattggctcgctgatgtacctggctagtgcaactaggcctgatatctcctttgctgtgagcaagttgagccggtttacctctaatccgggagatgatcactggcgtgcgcttgagcgagtaatgcgctatctgaaaggtactatggaattggggcttcactattctgggtatcctgcggtactggagggatatagtgatctaactggatctctgatgtggatgagatcaaagccactagaggatatgtcttcacactgggtggtggtgctgtttcgtggaggtcttgcaaacagaccattttga

SEQ ID NO: 18215 - DNA, 240 bp, Oryza sativa
  Clone ID: PAT_MRT4530_23795C.1
ggggtgttaaacaatttaggggaaaaaaaaacaaaaaagggcaacagaaaccacacaaaaggaaaaaaaagcttaacaggcaaaaacgggcaggtggaaaaacatgaaacgggacataaaaacaccaaaagaccaggtaaaaggtgaaaacgaaccctcgttggggaaaaaacgagccagaatgggggggaaacaccaatgaacaaacctttccaaaaacagggccagtcccaaaaggac

SEQ ID NO: 18216 - DNA, 3956 bp, Oryza sativa
  Clone ID: PAT_MRT4530_23796C.1
atggctggttttgccgatgcactgaggccagataaattctccggtgtgcactttaagagatggcaaatcagggtcactctgtggctgacagctatgaaatgcttctgggtgagtactggcaaacctgaaggaattcttattgctgatcagcagaagcaattcgaggaagccactactctctttgtgggatgcattcttagcgttcttggcgatcgtctggtcgaggtgtatatgcatatgaccgacgctaaggagttgtgggatgcactgaatactaaattcggtgctactgatgctagcaatgatctgtatatcatggagcagtttcatgactacaagatgactgacaaccgttctatagtcgaacaggctcatgagatacaaaccatggctaaggaactcgaactccttaagtgtgtcttacccgataaatttgtggctgggtgcattattgcgaaactacctccatcttggagaagtttcggtactgcactcaaacacaagagataggaatactccgttgaggggttgatagcgtctcttaatgttgaggggaaagctcgggaaaaagatgctgcgtctaagggtgatagtgggcagtccagtgccaatgttgtgcataaggctcagaacaagagcaaggggaaatacaaagctcaacagaccaccaactttaagaagaagaagaagaacaacaacaatcctaatcaggatgagaggacttgctttatgtgtggccaacctggtcatctggctaggaagtgtccacaacgcaaggggatgaaggcacctgcagggcagacttctaagtctgctaatgtgaccattggcaacactggagatggaggcgggtatagtaatttacctactgtttttttagttaatcagtctactaattggtgggttgatactagggccaatgtacatgtttgtgctgacatcttattgttttcttcttatcaggtcgcacggggttccatcgtcctaatggggaatgggtcacatgcttcttttcatggtgttggcacggtagatctgaagtttacttcgggaaagatcgtgcagctgaagaacgtgcagcatgtcccttctatcgataggaatcttgttagtggctcccgtcagactagagacgaatttaagttggtttttgagtgtaataaagtagtcgtgtctaaacatggatattttattggtaaaggttatgagtgcggaggactgttccgcttttccctttctgatttctgcaataagtctgtgaaccatatttgtggcagtgtggatgatgaggctaatgtttggcactcatgtttatgtcatattaattttgacttgatgtctcggctttccagcatgtgtttaattcctaagttcttcactgtcaaaggttctaagtgccatagttgtgtgcaatcgaagcaacctcgcaagcctcacaaggctgtcgaggagagaaacttggcaccactagaactcctacattcagatctttgtgaaatgaatggggtgttgacgaagtgtggaaaatgatatttcatgacgttgattgatgatgctactatattttgctatgtgtacttgttgaaaacgaaagacgaggctctagactatttgaaaatttataaggcagaagttgaaaatcaacttgacaaaaagataaaaaggcttaggtttgatcgtggtggagagtttttctcaaacgagtttgacttattctgtgaggaacatgacatcatacataagaggacgcctccctattctcccgagtctaatgggattgctgaaaggaataaccgcacactgactgacttggtgaatgacatgttggacaccacgggactacctaaggcatggtgggggaggcattgttgacctcgaatcatttgttaaatagagttcctaacagaaataaggacaaaacaccatatgagatatggattgggagaaaaccatcactttcaccaagcacatgagggtgcttggcgaaagtcaatataccaataacgaagaagcgcaaattgggacctaagactgtggactgtgtctttctgggatatgctcattacagcattacctatagatttttaatagttaaatctgaggtacctgacatgcatgttggtacaattatggagtctcgtgatgctaccttctttgagagctttttcccaatgaaggatacacatagtagttcgagccaaccctctgaagtaattccccgttcaatcacacaaccagaacaaactgaacatacacataaacatgtcattgaggaggatgtcagtgaagctcctcgaaggagtaagagacaaaggacggctaagtcctttggtgatgatttcactgtgtacctcgtggatgacactcctaagtcaatttcagaagcatatgcatctcctgatgcagactactggaaggagactgtccgtagtgaaatggattccattatcgctaacgggacttgggaggtgacaaatcgaccctatgggtgtaaacctgtggggtgcaagtgggtgttcaagaagaagcttaggcctgacggtactattgaaaagtacaaggctcggcttgttgctaagggctataatcagaaagaaggcgaagatttcattgacacttactcacctgttgctagattgaccacagttcatgtgctactttccctagcagccacacatggtcttctcgttcatcaaatggacgttaagacagcttttcttaatggagagctagatgaggagatctatatggatcaacctgatgggtttgtagttgaaggtcaagaaggcaaagtgtgcaaattgttgaagtctttgtatggtctgaaacaagctcctaagcaatggcatgagaaatttgacaaaacattgacatcttcaggctttgcagtcaatgaggcagataaatgtgtgtactatcgctatggtgggggtgagggagttattctgtgcttgtatgttgatgacatactgatatttgggacaaaccttgaggtgataaatgaggttaaatcattattgtctcaaaattttgatatgaaggatttgggagtagctgatgttatcttaaacattaagctaattagaggtgagaatgtgattacattcttgcagtcccattatgtggagaagatcttgaatcgctttggctacattgatagtaagccttctccaacaccttatgatcctactccctcccttcgcaagaacaagagaattgctaggaatcaactggaatactcccaaatcattggctcgctgatgtacctagctagtgcaactaggcctgatatctcctttgttgtgagcaagttgagccggtttacctctaatccaggagatgattactggcgtgcgcttgagcgagtaatgcgctatctgaaagatactatggaattggggcttcactattctaggtatcctgcggtactggagggatatagtgattctaagtggatctctgatgtggatgagataaaagccactagtggatatgtcttcacactgggtggtggtgctgtttcgtggaggtcttgcaaacagaccattttgacgaggtcaaccatggaagcagagctgacggtactggatactgctactgttgaggcagaatgactgcgtgatctattaatggatcttcctattgttgaaaaaccggtgccggctgtccttatgaactatgacaatcaaacgacatgtgaaaagacgattgaagtctgtcaggaaattgagaaactccggagttataacgttggattacatccaaacagctagaaacctggcagatcccttcacgaagggactatcacgaaatgtgatagacaatgcatcgtaggagataggtttgagacccatagcattcttgaaagaactcacctttgtaagcttgactgttggtcgcagtctatagagattttgggtgaatcttctaggaatcttactaaagatctaggagta

SEQ ID NO: 18217 - DNA, 726 bp, Oryza sativa
  Clone ID: PAT_MRT4530_23797C.1
atgcttgaaaacagagctttgctcaaaagtggagagaactggaagtttcaggttgctatatgcgactttttggaagctgaaattcggatttgttttgttttggaaacatttcgaaaaatccggtgcgtgaaaacggcgtggagtccgaataagttacgcgcgacttatccggttcggtgtggagtccgaataagttacgcgcgacttatccggttcggttacgcggagtggagatcatgcgggcgccctgatcaagcgacctatctctatataaaccgagtcgccaccttcacgcaacagacacgaaatcaatctagagtttgcctcctactctgtactgcgccgtcgctcgtagactactccatcccgctcgccggcgtgaaccggcaatcgggagagcaggtctccggaacctctgccttcgacgtcctgcaccgggagaaggcggcaataatatttttcggaagcgcttcgcgtgactgctccctgttcgtccacgacggctcgccttcctctccgctcgcgtgccgtgcgccttcgtcgacgcccgcaaccacgagtagttcctgccgagaaactggtctttccgccacctcgccaaaacctagatccaacgaaggcgagggtggttcggccgaaccatcaggtttggccgaacctggggctggcccaatccagcccaatttcggctggcggcctcctctgctgcttcacttcgtagacttg

SEQ ID NO: 18218 - DNA, 3180 bp, Oryza sativa
  Clone ID: PAT_MRT4530_23798C.1
atgaagccggagaacgcgttcgtgacggtgcaggaggggacgctgtgcttggcgatcgtggtgacgacgaagcagcagccggtgcccatcctcgggaacctcgcgcagcagaacatccacgtcggctcgccgccgccgactgcgcagggagcggctggccagcggagcatacgagcggcgggcaggcgcgctgcgggagaggaagatggcgccgacggggagcgggacgaggagagcgaggatgccgccgccgtcatcgtccatttgcacagatctcgcgcccgcgccgtcagcggcgtcgccggcgggagtgtgagcgcgggggcagcggcgggtggagcgggcggggacagcttgttcccgcgtcggcgccgtcggccacctctccggctctcccttctcaagcgtcccaaccgccgccgcctcccttctcccgtgtcgtcgtcatcgccgccggcttccgggcctctccgacggtccaaccccgaggtcgcacgcgccaccgcagccaccaccggccgccggacctcctccccacccgccagctgccctgctggctgctgtagagagaagagaactgcgggcgcggccagcggctccgcgcagccagcggcatgtgacgaggaacggcaggctcgcagcggcgtgcgcgcggcggcggacgaccaccccccacccggatccggtagaggcagcagacgatcgccccccgctcggatctggcggcggtggccgtcccccacctggatccggcggtggtggcggcgtgcgggcgggctcggacggtggggagttagcggatccggctaccgcgacggcgacagcaactacggagaccacgacgacgacgacaatgacgaccgcgaggagggcagcgacaatagctttaggatcaaggtcactctgtggctgacagctatgaaatgcttctgggtgagtactggcaaaccagaaggagttcttactgctgaacagctgaagcaattcgaggaagccactactctctttgtaggatgcattcttagcgttcttggcgatcgtctggtcgaggtgtatatgcatatgaccgacgctaaggagttgtgggatgcactaaatactaaattcggtgctactgatgctagcaatgatctgtatatcatggagcagtttcatgactacaagatggctgacaaccgttctgttgtcgaacaggctcatgagatacaaaccatggctaaggaactcgaactccttaagtgtgtcttacccgacaaatttgtggccgggtgcattattgcgaaactacctccatcttggagaagtttcggtactgcactcaaacataagagacaggaatactccgttaaggggttgatagcgtctcttgatgttgaggagaaagctcgggaaaaagatgccgcgtctaaaggcgatggtgcgcagtccagtgccaatgttgtgcacaaggcccagagcaagagcaaagggaaatacaaagctcagcagaccaccaacttcaagaagcagaagaagaacaacaacaatcctaatcaggatgagaagacttgctttgtgtgtggccaacttggtcatctggctaggaagtgtccacagcgcaaggggatgaaggcacctgtagggcagacttctaagtctgctaagtctgctaatgtgactattggcaacactggagatggaagcgggtatggtaatttacctactgacgcacggggttccaccgtcctaatggggaatgggtcacatgcttctgttcatggtgttggcacggtatatctgaagtttacttcgggaaagattgtgcagctgaagaacatgcagcatgtcccttctatcgacaggaatcttgttagtggctcccgtctaactagagacggatttaagttggtttttgagtctaataaagtagtcatttctaaacatagatattttattggtaaaggttatgagtacggaggcctgttccgcttttccctttctgatttcggcaataattctgtgaaccatattagtggcagtgtggatgatgagcctaatgtttggcactcaccctcacatggtcttctcgtttatcaaatggacgttaagacaacttttcttaatggagagctggatgaggagatctatatggatcagcctgattggtttgtagttgaaggtcaagaaggcaaggtgtgcaaattgttgaagtctttgtatggtctgaaacaagctcctaagcaatggcatgagaaatttgacaagacattgacatctgcaggcttcgcagtcaatgaggcaggtaaatgtgtgtactatagccatggtgggggtgagggagttattttatgccagtatgtcgatgacatactgatatttgggacaaaccttgaggtgataaatgagtcccattatgtggagaagatcttgaattgctttgactacattgatagtaagccttctccaacaccttatgatcctagcttgttgcttcgcaagaacaagagaatagctaggaatcaactggaatactcccaaatcattggctcattgatgtacctggctagtgcaactaggcctgatatctcctttgctgtgagcaagttgagccgatttacctctaatccgggagatgatcactggcgtgcgcttgagcgagtaatgcgctatctgaaaggtactgtggaattggggcttcactatactgggtatcctgcggtactggagggttatagtgattctaactggatctctgatgtggatgagatcaaagccactagtggatatatcttcacactgggtggtggtgctgtttcatggaggtcttgcaaacagaccattttgatgaggtcaaccatggaagcagagctgacggcactggatactgctactgttgaggcaaaatggctgcgtgatctattaatggatctgcctattgttgaaaaaccgagcattcttgaaagaactcatctttgtgagcttgactgttggtcgcagtctatggagatttttgattactccatcccgctcaccagcgtgcacctgcgatcgggagagcaggtctccggaacttctaccttcgacgttctgcaccggaagaaggcgacaataaggtttttggaaagcgctttgcgcgactgctccctgttcatccgcgacggctcgtcttcctctttgctcgcgtgctgcgtgccttcgtag

SEQ ID NO: 18219 - DNA, 406 bp, Oryza sativa
  Clone ID: PAT_MRT4530_23799C.1
ctcgactttctcggccgccacatgcacactccagtggaggctgttgtctccatccttttcgtcgcatctcgtcgtcgcatgatgagcgttgtggctgccggaggcaagcacctgcgctggtcttctatggctaggtttggctacgccccccccatcgagaactccccaacaaataaggccgcaactctatctagctaccatagcatgtcgtcgcatcacggttcttaatcgatccccacctagaggcatgcctctctcccgacgagacagcgaggtggatcaatcaagtgatcaagagcaggggaatagacaaagatgaaggagaagagcggcgaagcgacagtgcgcctgcccggcttgtccctgtagcagggggagggagaagagagtggctggggaatgggat

SEQ ID NO: 18220 - DNA, 1261 bp, Oryza sativa
  unsure (1)..(1261): unsure at all n locations
  Clone ID: PAT_MRT4530_2379C.1
tgtatggcctgtaattccaaacttttaattgcaagactagatcgcaaaaaaaaaaaggaaaaaaaaaagaggagaaaaaaacaaaaacagactcctcgccgccgcctcttcctctctctctcccctctcgatctcgtcttctctctctcgcaggactcgatcgcgatggcggcggaggtggcgaaggcggcggtggtgccggagtcggtgctgaagaagcggaagcgggaggagcagtgggcggcggacaggaaggagaaggcgctcgccgagaagaagaaggccgtcgagagccgcaagctcatcttcgcccgcgccaagcagtacgcccaggagtacgacgcgcaggagaaggagcttgtgcagctcaagcgtgaggctcggatgaagggtgggttctacgtcagccctgaggccaaacttctgtttgtggtccgcatccgtggtatcaatgccatgcaccccaagaccaggaagatcttgcagcttctgcggttgaggcagatcttcaatggtgtcttcctcaaggttaacaaggcaaccattaacatgctgcgcagggttgagccatatgttgcatatgggtacccaaacctgaagagtgtcagggaattgatctacaagaggggttacggaaagctcaacaagcagaggattcctcttcagaacaacaaagtcattgaggagggcttggggaagcatgacatcatctgcattgaggatcttgtccacgagatcatgactgtcggtccacacttcaaggaggccaacaacttcctgtggcccttcaagttgaaggcaccactcggtggcctcaagaagaagaggaaccactatgtcgagggtggtgatgccggcaaccgtgaggactacatcaacgagctcatccggaggatgaactaggcttttcttctgttactggggagaatgtctccttatctatgtatgcaacatggttatttttatctttaggctgtcttgagctggatactggatatgcaattttggcgttccaacaggaggtagacttggcctgtgtttacagtgagacttccggtgggaaatctgtacccgttggccctggggtttgttcctgtctggatgcttttgtttcttgatatgttcgctagttgtgcttgctttaaaaaaaaaaaaaaaaaaaaaaaaaaaaaaaaaaaaaattaaccggtggtttgatgttantcctaaanttgaagtgcttttaatcaaaaaaaaaaaaaaaaaaaaaaaaaaaaaaaaa

SEQ ID NO: 18221 - DNA, 429 bp, Oryza sativa
  Clone ID: PAT_MRT4530_237C.1
atgacgacggcgatgacggcgggcggtttggagcggcgcgacgacatgggcgacaggcgtgggctggcgcggcagagggtgacggcggcggcgaccaggcggcgcggcagggcagcgggaccgggcgacgcggacggcgcagacgacgcggctcgggcggggaaccacgagggcgcgcgcacgcgaacacggcgcgcgggagccgtcttcgcgagcggggagctcgccagggatggggagaaggagagcgaggggagggggggcgctcggcgcggcggctcacgcgcacgcgcgcgcggcgcgcgggcggggcagagcggagcggaggggagcggagggggagcgcgtcggggaggggagagggccgggagagaggagaagatgggccgagagaaattcggcccatcgaccccgggggaggcaaaataa

SEQ ID NO: 18222 - DNA, 3958 bp, Oryza sativa
  Clone ID: PAT_MRT4530_23800C.1
atggctgattttgccgatgcactgaggccggataaattcaccggtgtgcactttaagagatggcagatcatggtcactttgtggctgacagctatgaaatgcttctgggtgagtattggcaaacctgaaggagttcttactgctgaacagcaaaagcaattcgaggaagccactactctctttgtgggatgcattcttagcgttcttggcgatcgtctggtcgaggtgtatatgcatatgaccgacgctaagaagttgtgggatgcactgaatactaaattcggtgctactgatgctagcaatgatctgtatatcatggagcaattcatgactacaagatggctgacaaccgttctatagtcgaaaaggctcatgagatacaaacaatggctaaggaactcgaactccttaagtgtgtcttacccgacaaatttgtggccgggtgcattattgcgaaacttcctccatcttggagaagttttggtactgcactcaaacacaagagacaggaatactctgttgaggggttgatagcatctcttgatgttgaggagaaagctcaggaaaaagatgctgcgtataagggcgatggtgggcagtccaatgccaatgttgtgcacaaggcccagcacaagagcaaggggaaatacaaagctcagcagaccaccaacttcaagaagcagaagaagaacaacaacaatcctaatcaggatgagaggatttgatttgtgtgtggccaacctggtcatctagctaggaagtgtccacagcgcaaggggatgaaggcacctgcagggcaaacttctaagtctgctaatgtgaccattggcaacactggagatggaagggggtatggtaatttatctactgttttttcagttaatcagtctactaattggtgggttgatactggggccaatgtacatgtttgtgctgacatctcattgttttcttcttatcaggtcgcacggggttccaccgtcctaatggggaatgggtcacatgcttctgttcatggtgttggcacggtagatctaaagtttacttcgggaaagatcgtgcaactgaagaacgtgcagcatgtcccttctatcgacaggaatcttgttagtggctcccgtctgactagagacggatttaagttggtttttgagtctaataaagtagccgtgtctaaacatggatattttattggtaaaggttatgagtgcggaggcctgttccgttttttcctttctgatttctgcaataagtctgtgacccatatttgtggtagtgtggatgatgaggctaatgtctggcactcacgtttatgtcatattaattttggcttgatgtctcggctttccagcatgtgtttaattcctaagttttccattgtcaaaggttatacgcgccatagttgtgtgcaatcaaagcaacctcgcaagcctcacaaggctgctgaggagagaaacttggcacctctagaactcctacattcagatatttgtgaaatgaatggggtgttgacgaagggtggaaaacgatatttcatgacgttgattgatgatgctactagattttgctatgtgtacttgttgaaaacgaaagacgaggctgtagactattttaaaatttataaggcagaagttgaaaatcaacttgacagaaagataaaaagacttaggtctgatcgtggtggagagtttttctcaaacgagtttgacttattctgtgaggaatatgggattatacatgagaggacgcctccctattctcccgagtctaatgggattgccgaaaggaagaaccgcacactgactgacttggtgaatgccatgttggacaccgcgggactacctaaggcatggtggggggaggcattgttgacctcgaatcatgtgttaaacagagttctaacagaaataaggacaaaacaccatatgagatatggattgggagaaaaccatcactttcttacttgtgcacatgggggtgcttggcgaaagtcaatgtaccaataacgaagaaacacaaacttggacctaagactgtggactatatctttctgggatatgctcaccacagcattgcctatagatttttaatagttaaatccgaggtacctgacatgcatgttggtacaattatggagtctcgtgatgctaccttctttgagagctttttcccaatgaaggatacacatagtagttctagtcaaccttctgaaataattcccagttcaatcacaccaccagaacaaactgaatatacacatgaacatgtcactgaggaggatgacagtgaagctcctcgaaggagtaaaagacaaaggacggctaagttctttggtgatgatttcactgtgtacctcgcggacgacactcctaagtcaatttcagaagcatatgcatctcctgatgcagactactagaaggaggctgtccgtagtgaaatggattccattatcactaacggaacttgggaggtgacagagcgcccctatgggtgtaaacctgtggggtgcaagtgggtgttcaaaaagaagctgaggcctgacggtaccattgaaaagtacaaggcttggcttgttgctaagggctatactcagaaagaaggcgaagatttctttgacacttactcacctgttgccagattgaccacaattcgtgtgctactttccctagcagcctcacatggtcttctcgttcatcaaatgaacgttaagacagcttttcttaatggagagctggatgaggagatctatatggatcaacctgatgggtttgtagttgaaggtcaagaagacaaggtgtgcaaattgttgaagtctttgtatggtctgaaacaagctcctaagcaatggcatgagaaatttgatagaacattgacatctgcaggcttcgcagtcaatgaggcagataaatgtgtatactatcgccatggtggaggtgagggagttattctgtgcttatatgttgatgacatactgatatttaggacaaatcttgaggtgataaatgaggttaaatcattcttgtctcaaaaatttgataggaaggatttgggagtagctgatgttatcctaaacatcaagctaattagaggtgagaataagattacactcttgcagtcccattatgtggagaagatcttgaatcgctttggctacattgatagtaagccttctccaacgtcttatgatcctagcttgttgcttcgcaagaacaagagaattgctaggaatcaactggaatactcccaaatcattggctcgctgatgtacctggctagtgcaactaggcctgatatctcctttgctgtgagcaagttgagccggtttacctctaatccaggagatgatcactggcatgcgcttgagcgagtaatgcgctatctgaaaggtactatggaattggggcttcactattttgggtaccctgcggtactggaaggatatagtgattctaactggatctctgatgtggatgatatcaaagccactagtggatatgtcttcacactaggtggtggtgttgtttcgtggaggtcttgcaaacagaccattttgatgaggtcaaccatggaagcagagttgacggcactggatactgctactgttgaggcagaatggctgcgtgatctattaatggatctacctattgttgaaaaaccggtgccggctatctttatgaactgtgacaatcaaacgacatgtgaaaagacgattgaagtctgtcaagaagttgagaaactccggagttataacgttggattacatccaaacaactagaaacctggcagatcccttcacgaagggactatcacgaaatgtgatagacaatgcatcgaaggagatgggtttgagacccatagcattcttgaaagaactcacctttgtgagcttgactgttggtcgcagtctatgaagattttgagtgaatcttctaggaagcttactaaagacctaggagta

SEQ ID NO: 18223 - DNA, 201 bp, Oryza sativa
  Clone ID: PAT_MRT4530_23801C.1
tgtgtttggtgcaatgaatgtgtggtgtgtctgcagcgatgcaaatggctttggaaagaagtgatggctgcactgaccggaggtgataacaccttggatggcttgcaatggtaacctgctgttgcagaggactgtaatgattgatggtgcaataaacaccagggagtggtgccctggtgtggggaactccaaataactcgg

SEQ ID NO: 18224 - DNA, 2967 bp, Oryza sativa
  Clone ID: PAT_MRT4530_23802C.1
atgaaatgcttctgggtgagtactggcaagcctatgggcattcttaatgctgatcagcagaaaaaattcgatgaggccactactctctttgtgggatgcattcttagcgtgcttgacgatcgtctggtcgaggtgtatatgcatatgaccaacgctaaggagttgtgggatgcactgaatactaaattcggtgctattgatgctagcaatgatctctatatcatggagcagtttcatgactacaagatggctgacaactgttctatagtcgaacaggctcatgagatacaaaccatggctaaggaactcgaactccttaagtgtgtcttacccgacaaatttgtggccgggtgcattatcgcgaaacaacctccatcttggagaggtttcagtactgcactcaaatacaagagacaggaatactccgttgaggggttgatagcgtctcttgatgttgaggagaaagctcgggaaaaagatgtcgcgtctaagggcgatggtggccagtccactgccaatgttgtgcacaaggcccagaacaagagcaaggggaaatacaaagctcagcagaccaccaactttaagaagaagaacaacaacaatcctaatcaggatgagaggacttgctttgtgtgtggtcaacctggccatctggccaggaagtgtccacaacgcaaggggatgaaggcacctgtagggcagacctctaagtttgctaatgtgaccattggcaacactggagatggaagcagtcgcacgggttccaccgtcctaatggggaatgggtcacatgcttctgttcatggttatgagtgcggaggcctgttccgcttttccctttctgatttctacaataagtctgtgaaccatatttgtggtagtgtggatgataaggcttatgtttggcactcacgtttatgtcatattaattttggcttgatgtctcggctttccagcatgtgtttaattcctaagttatccattgtcaaaggttctaagtgctatagttgtgtgcaatcgaagcaacctcgcaagcctcacaaggttgccgaggagagaaacttggcaccactagaactcctacattctgatctttgtgaaatgaatggggtgttgacgaagggtggaaaacgatatttcgtgatgttgattgatgatgctactagattttgctatgtgtacttgttgaaaacgaaagacgaggctctagactattttaaaatttataaggcagaagttgaaaatcaacttgacaggaagataaaaaggcttaggtctgatcgtggtggagagtttttctcaaacgagtttgacttattctgtgaggaacatggcatcatacatgagaggacgcctccctattctcccgagtctaatgggattgctgaaaggaagaatcgcacactgactgacttggtgaatgccatgttggacaccgcgggactacctaaggcttgcattgcctatagatttttaatagttaaatctgaggtacctgacatgcatgttggtacaatcatggagtctcgtgatgctaacttctttgagatcagctttttcccaatgaaggatacacatagtagttctagccaaacctctgaaataattcccaactcaatcacaccaccagaacaaactaaacatacgcatgaacatgtcactgaggaggatgacagtgaagctcctcgaaggagtaaaagacaaaggacggctaagtcttttggtgatgatttcactgtgtacctcatggacgacactcctaagtcaatttcagaagcatatgcatctcctgatgcagactactggaaggaggctgtccgtagtgaaatggattccattatcgctaacggaacttgggaggtgacagagcgaccctatgggtgtaaacctgtggggtgcaagtgggtgttcaaaaagaagctgaggcctgatggtaccattgaaaagtacaaggctcggcttgttgctaagggctatactcagaaagaaggcgaagatttctttgacacttactcacctgttgctagattgaccacaattcgtgtgctactttccctagcagcctcacatggtcttctcgtccatcaaatggatgttaagacaacttttcttaatggagagctggatgaggtgatctatatagatcagcctgatgggtttgtagttgaaggtcaagaagacaaggcgtgcaaattgttgaagtctttgtatggtctgaaacaagctcctaagcaatggcacgagaaacttgatagaacattgacatctgtaagctttgcagtcaatgaggcagttaaatgtgtatactatcgccatggtgggggtgagggagttattctgtgcttttatgttgatgacatactgatatttgggacaaaccttgaggtgataaatgaggatttgggagtagctgatgttatcctaaacattaagctaattagaggtgagaatgggattacactcttgcagtcccattatgtggagaagatcttgaatcactttggctacattgatagtaagccttctccaacaccttatgatcctagcttgttgcttcgcaagaacaagagaattgctaggaatcaactggaatactcccaaatcattggctcgctgatatacttggctagtgcaactaggcctgatatctcctttgctgtgagcaagttgagccggtttacctctaatccggaagatgatcactggcgtgcgcttgagcgagtaatgcgctatccgaaaggtactatggaatttgggcttcactattctgggtatcctgcggtactggaaggatataatgattctaactggatctctgatgtggatgagatcaaagccactagtggatatgtcttcacactacgtggtggtgctgtttcgtcgaggtcttgcaaacagaccattttgacgaggtcaaccatggaagcagagttgacagcactggatactgctactgttgaggcataa

SEQ ID NO: 18225 - DNA, 874 bp, Oryza sativa
  Clone ID: PAT_MRT4530_23803C.1
gcgtgtgtacatcgaatggtccgcaaaattggctcctcaaccttgtgtagatgtagcctccttttgcagttttgttttgctgcaggaaattcggatttgttttgttttggaaacattctgaaaaatccggtgcgtgaaaacggcgtggggtccagataagttacgcgcgacttgtccggttcggttacgcggagtggagatcgtgcgggcgccctgatcaagcgacctatctctatataagccgagccgccgcattcacgcaacacacgcaaaatcaatctaggtttgcctcctactctgtgctgcgccgtcgctcgtagactactccatcctccggcgtgcaccggcgatcgggggagcaggtctcctgaacctctgccttcgacgtcctgcaccgggagaaggcggcaataaggtttttgcgaagcgcttcgcgtgactgcacccctgttcgtccgcgacggctcgccttcctctcctctcgcgtgctgcgtgccttcatcgacgcccgcaaccgcgagtagttcctgccgagtaaccggtctttccgccacctcggtacgtccttccgctggaccacgccacggcgcagaggctcgcgccggcggactctacagtccttccgctggccccgcacagctccgccggccacgcctgccttaaagccaagctccaccagccacgcgtggcttcgcgcggcacccccggcactcgccttcgcgcactccatttctcgcgggctctggacggtggtacctccgtcgagcaccgcggctttcaccgcatctgaaccaatctctgtctctctcagctggtaagtacgattatatcttccagggattcctgagaactggttcttaattgccatgggcat

SEQ ID NO: 18226 - DNA, 3836 bp, Oryza sativa
  Clone ID: PAT_MRT4530_23804C.1
atggctggttttaccgatgcactgaggctggataaatttaccggtgtgcactttaagagatggcagatcagggtcactctgtggctaacagctatgaaatgcttctgggtgagtactggcaagcctataggcgttcttaatgctgatcagcagaaagaaatcgatgaggccactactctctttgtgggatgcattcttagtgtgcttagcgatcgtctggtcgaggtgtatatgcatatgaccgacgctaaggagttgtgggatgcactgaatactaaattcggtgctactgatgctagcaatgatctgtatatcatggagcagtttcatgactacaagatggctgacaaccgttctgtagtcgaataggctcatgagatacaaaccatggctaaggaactcgaactccttaagtgtgtcttatctaacaaatttgtggccgggtgcattatcgcgatactacctccatcttggagaggtttcggtactgcactcaaacacaagagacaggaatactccgttgaggggttgatagcgtctcttgatgttgaggagaaagctcgggaaaaagataccgcgtctaagggcgatggtgggcagtctactaccaatgttgtgcacaaggcccagaacaaaagcaagggaaaacacaaaactcagcagaccaccaacttcaagaagaagaagaacaacaacaatcctaatcaggatgagaagacttgctttgtgtgtggtcaacctagccatctagccaggaagtgtccacaacgcaaggggatgaaggcacctgcagggcagacctctaagtctgctaatgtgaccattggcaacactagagatggaagcgggtagtaatttacctactgttttttcagttaatcagtctactaattggtgggttgatacaggggccaatgtacatgtttgtgctgacatctcattgttttcttcttatcaggccgcacggggttccaccgtcctaatggggaatgggtcacatgcttctgttcatggtgttggcacggtagatctgaagtttactttgggaaagatcgtgcagctgaagaacgtgcagcatgtcccttctatcgataggaatctcgttagtggctcccgtctgactagagacggatttaagttggtcttttgagtctaataaagtagttgtgtctaaacatggatattttattggtaaaggttatgagtgcggaggcctgttccgcttttccctttctgatttctgcaataagtctgtgaactatatttgtggcagtgtggatgatgaggctaatgtttggcactcacgtttatgtcatattaattttggtttgatgtctcggctttccagcatgtgtttaattcctaagttttccattgtcaaaggttctaaatgccatagttgtatgcaaacgaagcaatctcgcaagcctcacaaggctgccgaggagagaaacttggcaccactagaacttctacattcagatctttgtgaaatgaatggggtgttgacgaagggtggaaaacgatatttcatgacgttgattgatgatgctactagattttgctatgtgtacttgttgaaaacgaaagacgaggctctagactattttaaaatttataaggcagaagttgaaaatcaacttgacagaaagataaaaaggcttaggtctgatcgtggtggagagtttttctcaaacgagtttgacttattttgtgaggaacatggcatcatacatgagaggatgcctccttattctcctgagtctaatgggattgctgaaaggaagaaccgcactctgactgacttggtgaacgcattgttgaactcgaatcatgtgttaaacagagttcctaacagaaataaggacaaaacaccatatgagatatggattgggagaaaaccatcactttcttatttgcgcacatgggggtgtttggcgaaagtcaatgtaccaataacgaaaaagcgcaaacttggacctaagactgtggactgtatctttctgggatatgctcatcacagcattgcctatagatttttaatatttaaatctgaggtacctgacatgcatgttggtacaattatggagtctcgtgatgctaccttctttgagagctttttcccaatgaaggatacacatagtagttcgagccaaccctctgaaataattcccagttcaatcacaccaccagaacaaactgaacatacacatgaacatgtcattgaggaggatgtcagtgaagctcctcgaaggagtaagagacaaaggacggctaagtcctttggtgatgatttcactgtgtacctcgtggatgacactcttaagtcaatttcagaagcatatgcatctcctgatgcagactactggaaggaggctttccgtagtgaaatggattctattatcgctaacgggacttgggaggtgatagagtgaccctatgggtgtaaacctgtggggtgcaagtgggtgttcaagaagaagcttaggcctgacggtactattgaaaagtacaaggcttggcttgttgctaagggctacactcagaaagaaggcgaatatttctttgacacttactcacctgttgctagactgaccacaatttgtgtgctactttccctagcagcctcacatggtcttttcgttcaccaaatgaacgttaagacagcttttcttaatggagagctggatgaggagatctatatggatcagcctgataggtttgtagttgaaggtcaagaaggcaaagtgtgcaaattgttaaagtctttgtatggcctgaaacaagctcctaagcaatggcatgagaaatttgacaaaacattgacatctccaggctttgctgtcaatgaggcagataaatgtgtgtattatcgccatggtgggggtgagggagttattctgtgcttgtttgttgatgacatactgatatttgggacaaaccttgaggtgataaatgaggttaaatcattcttgtctcaaaattttgatataaaggatttgggagtagctgatgttatcttaaacattaagctaattagaggtgagaatgggattacactcttgcagtcccattatgtggagaagatcttgaatcgctctggctacattgatagtaagccttctccaacacctggctagaacaagagaattgctaggaatcaactggaatactccgaaatcattggctcactgatgtacctggctagtgcaactaggcctgatatctcctttgctgtgagcaagttgagccgatttacctctaatccaggagatgatcactggcgtgtacttgagcgagtaatgcgctatctgaaaggtactatggaattggggcttcactattctgggtatcctgcggtactggagggatatagtgattataactggatctctgatgtggatgagatcaaagccactagtggatatgttttcacactaggtggtggtgctgtttcgtggagatcttgcaaacagaccattttgatgaggtcaaccatggaagcagagttgacggcactggatactgctactgttgaggcagaatggctgcgtgatctattaatggatctgcctattgttgaaaaaccggtgccggctatccttatgaactgtgacaatcaaacggtaatcgtcaaagtgaatagttctaagaataatatgaaatcatctagacatgtgaaaagacgattgaagtctgtcaggaaattgagaaactccggagttataacgttggattacatccaaacagctagaaacctagcagatcccttcacgaagggactatcacgaaatgtgatagacaatgcatcgaaggagatgggcttgagacccatg

SEQ ID NO: 18227 - DNA, 282 bp, Oryza sativa
  Clone ID: PAT_MRT4530_23805C.1
atgcggcaagcctctcccgtcccctcacggcgacaactggctggctggggtgggggcaccagcggagaccgaggcggctgggaggaggagtcgaggagatgcgaggagaggcagctgggagtgggaggagggagagaaaccctaaagattttagatggtgatttttatactaagttgactgagggcccacattgcaaatgcttcgccggtaacccaaagaatggagtcgctgataccatcttcttcttcttcctcatcatccagattaagagttggcggtga

SEQ ID NO: 18228 - DNA, 240 bp, Oryza sativa
  Clone ID: PAT_MRT4530_23806C.1
atgggtggaggtggaattgagacggcaacgggcggagacggagcaaagacggcaaggggcagaggcggtgcagggacggcggcggcgtggcaacgaatggaggcggcgacaggcagtggcatggcgatgagcgaagtcagaggcggcgcgggtgcgcggcgactagcggatgcggaggcgatgcggtggtggctgtggaggatgggtgaggggagtgggagtaagggatgtggggattga

SEQ ID NO: 18229 - DNA, 3123 bp, Oryza sativa
  Clone ID: PAT_MRT4530_23807C.1
atggctgacaaccgttctgtagtcgaacaggctcatgagatacaaaccatggctaaggaactcgaactccttaagtgtgtcttacccgacaaatttctggccgggtgcattattgcgaaactacctccatcttggagaggtttcggtactgcactcaaacacaagagacaggaatactccgttgaggggtggatagcgtctcttgatattgaggagaaagctcaggaaaaagatgccgcgtctaagggcgatggtgggcagtccacagccaatgttgtgcacaaggcccaaaacaagagcaaggggaaatacaaagctcagcagaccaccaacttcaagaagaagaacaacaacaacaattctaatcaggatgagaggacttgctttgtgtgtgatcaacctgaccatctggccaggaagtgtccacaacgcaagaggatgaaggcacttgcagggcagacctctaagtctgctaatgtgaccattggcaacactggagatggaagcgggtatggtcacacggggttccaccgtcctaatggggaatgggtcacatgcttctgttcatggtgttggcacggtagatctaaagtttacttgggaaagatcgtgcagctgaagaacgtgcagcatgtcccttctatcgacaggaatcttgttagtggctcccgtctgactagagacggatttaagttggttttcgagtctaataaagtagtcatgtctaaacatggatattttattggtaaaggttatgagtgcggaggcctgttccgcttttccctttctgatttctgcaataagtctgtgaaccatatttgtggcagtgtggatgatgaggctaatgtatggcactcacgtttatgtcatattaattttggcttgatgtctcggctttccagcatgtatttaattcctaggttttccattgtcaaaggttctaagtgccatagttgtgtgcaatcaaagcaacctcgcaagcctcacaaggctgctgaggagagaaacttggcacctctagaattcctacactcagatctctgtgaaatgattggggtgttgacgaagggtggaaaacgatatttcatgacgttgattgatgatgctactagattttgctatgtgtacttgttgaaaatgaaagacgaggctctagactattttaaaatttataaggcagaagttgaaaatcaacttgatagaaagataaaaagacttaggtctgatcgtggtggagagtttttctcaaacgagtttgacttattctgtgaggaacatggcattatacatgagagtgcgcctccctattcgcccgagtctaatgggattgctgaaaggaagaaccgcacactgaccaacttggtgaatgccatgttggacaccgcgggattacctaaggcatggtggggggaggcattgttgacctcgaatcatgtgttaaacagagttcctaacagaaataaggacaaaacaccatatgagatatggatagggagaaaatcatcactttcttacttgcgcacatgggggtgcttggcgaaagtcaatgtaccaataacgaagaagcgcaaacttagaccaaagactatggactatgtctttctgggatatgctcaccacagcattgccgatagatttttaatagttaaatctgaggtacctgacatgcatgttggtacaattatggagtctcgtgatcctaccttctttgagagctttttcccaatgaatgatacacatagtagttctagccaaccctctgaaataattcccagttcaatcacaccaccagaacaaactgaatatacacatgaacatgttactgaggaggatgacagtgaagctcctcaaaggagcaaaagacaaaggacgactaagtcttttggtgatgatttcactgtgtacctcgtggatgaaactcctaagtcaatttcagaagcatacgcatctcctgatgcagactactggaaggaggctgtccgtagtgaaatgaattccattatcgctaacgggacttgggaggtgacagagcgaccctatgggtgtaagcctgtggggtgcaagtgggtgttcaagaagaagctcaggcctgacggtactattgaaaagtacaaggctcggcttgtcgctaagggctatactcagaaagaaggcgaagatttctttgacacttactcacctgttgctagattgaccataattcgtgtgctactttccctagcagcctcacatggtcttctcgttcatcaaatggacgttaagacagcttttcttaatggagagctggatgaggagatctatatggatcaacctgatgggtttgtagttgaaggtcaagaaggcaaagtgtgcaaattgttgaagtctttgtatggtctgaaacaagttcctaagcaaaggcatgagaaatttgacaaaacattgacatctgcaggctttacagtcaatgaggcagataaatgtgtgtactatcgccatggtggggatttgggagtagctgatgttatcttaaacattaagctaattagaggtgagaatgtgattacactcttgcagtcccattatgtggagaagatcttgaatcgctttggctacattgatagtactatggaattggggcttcactattctgggtattctgcggtactggagggatatagtgattttaactggatctctgatgtggatgagatcaaagccactagtggatatgtcttcacactaggtggtgctgctgtttcgtggaggtcttgcaaacagactattttgacgaggtcaaccatggaagcagaactgatggcactagatactgctactgttgaggcagaatggctgcgtgatctattaatggatctgcctattgttgaaaaaccggtgccggctatccttatgaactgtgacaatcaaacggtaattgtcaaagtgaatagttctaaggataatatgaaatcgtctagacatgtgaaaagacgattgaagtctgtcaggaaattgagaaactccggagttataacattggattacatccaaacagctagaaacctggcagatcctttcacgaagggactatcacgaaatgtgatagataatgcatcgaaggagatgggtttgagacctatgtga

SEQ ID NO: 18230 - DNA, 340 bp, Oryza sativa
  unsure (1)..(340): unsure at all n locations
  Clone ID: PAT_MRT4530_23808C.1
tagaagagagcaaaaatgttttagggaagcacaatgtggttatataatattataggtgaagcctaccattttgtgcgttttcccatgaattggtttgcctgctgatgaataccttcgagaggttatcatcaatctgatttgagtgtattaaagatgaacatacagcggctgcgtaatttacttcgntatgnaatctattgtgtttttggncggtttgaacccacanttaccttcttgctgtnaatgctgcatcattaagcaagnctgcaaatttgacgntcgagttcaaaaaaaaaaaaaanannaaaaaaaaaaaaagggcggnccccaccccggtggg

SEQ ID NO: 18231 - DNA, 138 bp, Oryza sativa
  Clone ID: PAT_MRT4530_23809C.1
gttttcagtttttatggcccgcactcgtcagggagccttttatgcgctcctgggccatcagattgagctatgctgaaccttgcaatgacaactggcataattgaggattccaaagcagccgtggagtattattaccaa

SEQ ID NO: 18232 - DNA, 1572 bp, Oryza sativa
  Clone ID: PAT_MRT4530_2380C.1
atggccgaacgggcagtggcgcacaaccttctctccgagcgctagcggtgacgacagggagcagaacccgcgccgtcgagctcgtactccaccgtccccctctcgccgaagtcttgggcgggaggaggcgctcgagggggtcgaaagatccgcgacttcgccacccacgggtaatggagaaggacggcgagatggggagcgtcgcctcctcgtctacggcgatggcagcacgccccagggcgcgctccgggctgcgggcgcgctcctgcgtcacccgcccgtcgtccccgatccagagactccagctcgacgttggctggatgatgtggccgacttggtcatgacggcgcagcagcgcctagtcgccggcgggcggtcctccgcccccaaggcctctggcgttgctaccaccggctccgtgtcgtcgaggcggagggcgcggcgagcggcggccgttacccgccgttcgtccgctattccctcgtcaacgcctccgacccaagaagatgtgcgtggggggccggatgcccgcctcaatattgagcgccggcgcaatggtcgtcgtgctgccacgcaacggagggcgcttcctcgtccggagcgccacttcggtccgggcacgggggccagcctcccatgtccccggttggcggtgccggctgtcgagcctttgtggcgagccttcggaacgtccgttggcccccaaggttccggcccaccatcactgaaaaatacgacggaagcgtcaaccccgccgagtttctccagatctatacgaccgggattgaggccgccgggggtgacgacagggtcatggcgaatttcttccccatggccctgaaaggtcaggcgcggggttggctgatgaacttgccacccgcgtcggtacactcttgggaggatttgtgccagcagttcaccatgaacttccagggcacatatccgcgcccaggtgaagaagcggacttgcacgcggtacagcgaggggacgatgagtctcttcgctcgtacattcagcggttctgtcaagtccgcaacaccataccgtgcatccccgcacacgcggtgatctacgcgttcagggggggcgtgcggcacaatcgcatgctcgaaaagatcgcctccaaggatgtcacgactcggcgccacctccatcggcttcgccgagtggttgccgactccgtccgccgctccgcttcgcccgccgactgccggagcaccgtcgccctcggcatcccgaaccgcgccgccgccttcttccgcttcggccgccgttcccgtcgtcgccgtcgaccggggtgagccgaagaccgtccccctcgcttcccccttccctcctctctctcgggtgccgctccgccgcgccggtggtcgccggcggtgaccatcggggcgcgggcgcgtccccctcccttcggccgcgccggcgaggccgccctcgggcgcgccctcgcggctgccaagtgggcccggccgttagccgcccgcgcccgcgggtgcggctgacgcgcgggacccacggcgccgaccgacgccagccgcgtgcacccggtccaccgtggaccgtggggc

SEQ ID NO: 18233 - DNA, 330 bp, Oryza sativa
  Clone ID: PAT_MRT4530_23810C.1
ggagcttaaaacatcacttgttttcgatgctgatgtggatcgatcgacttgactggctacaatccaaacgtgctgtttaaattatgaacgctcctaaaccatataacctgacatgcagacaccaacttcacaggcagtaaaccagctattcaatgttgaactgaccgccttcagcaaagccggccctggagaatactccttcaccatggaatccaccatcggaatggaatgtggattgctgcccaccttggccaaaaggaaagaaaccatacagctactactcctaccatattcatttcaatacgatcctgtcctagggctgattttaca

SEQ ID NO: 18234 - DNA, 418 bp, Oryza sativa
  Clone ID: PAT_MRT4530_23811C.1
atggtgaacatttattatatttattaattaaacatgtcaaacataacgttcttctcaactagattcattttcattcattgaaccgagtgcaaaacttcaggcagctccgaaaagaacgtcgaaaataaactagtcgcttgttcaattgaactagtgtctgcaaattcgcggattgagtgcatcgccaactgagggcacccgacatcgattgtttgtagccctaattttgccgataaaattgggccgacggtggagccacatggtgaatcgttgcggaccacaactttttgaagaggaactttggctttttttgcaatctttttcaaaattagcatgagtggtcgatgtggtagcatagccgcttgttgacattttacctttcacctaccacacctttgtggaaagctggacggcgttt

SEQ ID NO: 18235 - DNA, 1821 bp, Oryza sativa
  unsure (1)..(1821): unsure at all n locations
  Clone ID: PAT_MRT4530_23812C.1
cccacgcgtccgcttctccacgcacccacccctcgagagggaagaaggaacccggaaagggaggaaagcatggccggagcagcagccgcctccgccgccgccgccgccgtggcgtccgggatctcggcccggccggtggccccgaggccctctccctcgcgcgcgcgcgccccacggtccgtcgtgcgggcggccatctccgtcgagaagggggagaaggcgtacacggtggagaagtccgaggagatcttcaacgccgccaaggagttgatgcctgggggtgttaattcaccagttcgtgccttcaaatcagttggtgggcagcccattgtgtttgattctgtgaagggttctcgtatgtgggatgtggatggaaatgaatatatcgattatgttggttcctggggtcctgcgatcatcggtcatgcagatgatacggtgaatgcagcattgattgaaactctaaagaaaggaactagctttggcgctccatgtgtgttggagaatgtgttggctgagatggtcatctctgctgtaccaagtatcgaaatggtccgttttgtcaattcagggacagaagcctgcatgggagcgctgcgccttgtgcgtgcattcactgggagagagaagattctcaagtttgaaggttgttaccatggccatgcagattccttccttgttaaagctggcagtggtgttgccacccttggcctcccagactcccctggagtccccaagggagccacatctgagactctaacggcaccatacaatgatgtcgaggcagtgaaaaaactgtttgaggagaacaaagggcagattgctgctgtcttccttgagcccgttgttggcaatgctggcttcattcctccacagcccggttttctgaatgctctccgtgacttgacgaaacaagacggtgcacttttggtctttgatgaagtgatgacgggtttccgtttagcttatggtggggctcaagaatacttcgggatcacccctgatgtgtcaacattggggaaaatcatcggtggcggtcttccagttggcgcttatggtggacgtaaggacatcatggagatggttgctccagcagggccaatgtaccaggcaggaaccctcagtggaaaccctctagctatgactgctggaatccacacactcaagcgtctgatggagcctggaacctacgattacttggacaagatcactggtgatcttgttcgcggggtattggacgcgggtgcgaaaactggacatgagatgtgtggaggacacatcagggggatgttcgggttcttcttcaccgctggcccagttcacaactttggtgacgcgaagaagagtgacaccgccaagtttgggaggttctaccggggcatgcttgaagaaggtgtgtacctagctccatcccagtttgaggcaggtttcaccagcttggcacacacctcccaggacatcgaaaaaaccgtggaggcagctgcgaaagttcttcgccggatatagagtcttcgacagttgagcttagctacggcttgtgaatcacttgctatttttcatttgtgttgtacactgttagttctacatcactcaaaatctgtattgtgcagcagcggtacatttcctctagcccccatatcattgtgagttagtagcatccatggtgtttttgcagtgccaataaagttatttttgatatctcgatgaattcaactgacagttcccaaatattgagccattcaaccatactcaaaaaaaaaaagataaaactcgtctttatgcacatgtacctcgntcttttctaattaagatacatatttt

SEQ ID NO: 18236 - DNA, 1912 bp, Oryza sativa
  Clone ID: PAT_MRT4530_23813C.1
tggttctcatcgtcctaccttcacacagctgaaaaaattccctcatatacaagataaaggtaggaggagggccgggagctcgacggatttcgatcaattgtggtttttttttttgtggtaaccgtataagagaggagattttgtttaacgtagctagatcatatctgagttgagttttagcaatggaggtgctgatccggtggagcaagctgccggcggccggctccttggtgctgtacgccgtcttcttagctgtcggcggcggccacatcggaggccaacatcggggagtacgatgagtactggcagaagcgcaagctcatggctgatgccgccgccgaggctacctacaagcgtgaccccttcgaggtcaccaacagcttcaaccgcgccgtccacagatcggaggaggagagcgggaggagggagctggcgatgacgaagaggaaagagcgggctccgtcgtgacgaggagcccactgtgctccatcctcttctacgtcctcgccacggccgccgcggcgacggcgacggcgacgcttgtgggcaacatcaccgccgacgaggagtactgggccaagcgctccgaggtggcgcgctcgttcaaccgcgccgcctacgtcagcgaccccgtcgccaccctgaaccgcttcaacgccgacgtgctccgcgccaccacgcgccgctcgctggccaggtacaccggcccgtgcatggcgaccaaccccatcgaccgctgctggcgctgccgcgacgactgggccaccgaccggaagcggctggcgcggtgcgtccgtgggttcggccacaggaccgtcggcggcgccgctggcaagatctacgtggtgaccgacgccagcgacgacgagatggtcatcccgaggaaagggacgctccggtacggcgtgatccaggaccggccgatgtggatcgtgttcgcgcgcgacatgatcatccagctccggcaggagctgatcgtgaaccacaacaagaccatcgacggccgtggcgcgcaggtgcacatcaccggcgcccagatcacgctccagggcgtccagcatgtgatcatccacaacgtccacatccaccactcggtgccgcacggcggcggcatgatccgcgactccaagcgccactacggcctccgcacgcgcagcgacggcgacggcatctccatcatgtcctcctccaacatctggatcgaccacgtctccatgtccaactgctccgacggcctcatcgacgccgtcagcggctccaccgccatcaccatctccaacggccacttcaccaagcacgaccacgtcatgctcttcggcgccagcaacagcgacgcccaggacgaggtgatgcagatcaccgtggcgttcaaccacttcggcaagggccttgtgccgcgctgcaggttcggattcttccacgtcgtcaacaacgactacacgcactggctcatgtacgccatcggtggcaacatgaacccgacgatcatcagccaggggaacaggttcatcgcgcccgacgacttgaacgccaaggaggtgaccaagagggagtacacgccgtacgacgagtacaaggagtgggtgtggaagtcgcagggcgacgtgatgatgaacggcgccttctttaacgagtccggcggccagaacgagcgcagctacgaccagctcgacttcatccctgccaagcacggcaagtacgtcggccagctcaccaagttcgccggcacgctcaactgccacgtcggcatgccatgctaattaactagacatatcagcaacgatatggaagaggacgagagaaagctaattaaccatgccttaatttgtatatatatgaaaatctgacaaatttgtacatgtgtaaaactttataattctcaaaagagaaaaaaaaacgtacattatatacg

SEQ ID NO: 18237 - DNA, 3318 bp, Oryza sativa
  Clone ID: PAT_MRT4530_23814C.1
ggtccggattcccgggtcgacccacgcgtccggcaatggagctcatcgtcctaccttcatacagctgaaaaaattccctcatatacaagataaaggtaggaggagggccgggagctcgacggatttcgatcaattgtggtttttttttttgtggtaaccgtataagagaggagattttgtttaacgtagctagatcatatctgagttgagttttagcaatggaggtgctgatccggtggagcaagctgccggcggccggctccttggtgctgtacgccgtcttcttattgctgtcggcggcagccacatcggaggccaacatcggggagtacgatgagtactggcagaagcgcaagctcatggctgatgccgccgccgaggctacctacaagcgtgaccccttcgaggtcaccaacagcttcaaccgcgccgtccacagatcggaggaggagagcgggaggagggagctggcgatgaccaaaaggaagaacggcccgggtcgacccacgcgtccgatcgtcgtacggcgtccgtcacccggctgggaggtctcacgaaattacgcacttccctgagaccttccccgcggtgacgcgtgcgtcgtcagccggcgagccggaccaccacaaataaaggcatacattgatacatatggatatatatacgacatcacatcacagcacaataatggcagcctcctccgtcacggggagccgccgcctctgcattctcttctacctcctcactgtcgtcgccaccgtggtcaccgcggcgtcggcgcacacggcgcacaacgccaccgccgacgaggagtactgggagaagcgcgccgaggaggcccgctcgttcaaccgcgccgcctacgtgagcgaccccgtcgccaccctgaaccgcttcaacgccgacgtgctccgcgccaccacgcgccgctcgctggccaggtacaccggcccgtgcatggcgaccaaccccatcgaccgctgctggcgctgccgcgacgactgggccaccgaccggaagcggctggcgcggtgcgtccgtgggttcggccacaggaccgtcggcggcgccgctggcaagatctacgtggtgaccgacgccagcgacgacgagatggtcatcccgaggaaagggacgctccggtacggcgtgatccaggaccggccgatgtggatcgtgttcgcgcgcgacatgatcatccagctccggcaggagctgatcgtgaaccacaacaagaccatcgacggccgtggcgcgcaggtgcacatcaccggcgcccagatcacgctccagggcgtccagcatgtgatcatccacaacgtccacatccaccactcggtgccgcacggcggcggcatgatccgcgactccaagcgccactacggcctccgcacgcgcagcgacggcgacggcatctccatcatgtcctcctccaacatctggatcgaccacgtctccatgtccaactgctccgacggcctcatcgacgccgtcagcggctccaccgccatcaccatctccaacggccacttcaccaagcacgaccacgtcatgctcttcggcgccagcaacagcgacgcccaggacgaggtgatgcagatcaccgtggcgttcaaccacttcggcaagggccttgtgccgcgctgcaggttcggattcttccacgtcgtcaacaacgactacacgcactggctcatgtacgccatcggtggcaacatgaacccgacgatcatcagccaggggaacaggttcatcgcgcccgacgacttgaacgccaaggaggtgaccaagagggagtacacgccgtacgacgagtacaaggagtgggtgtggaagtcgcagggcgacgtgatgatgaacggcgccttctttaacgagtccggcggccagaacgagcgcagctacgaccagctcgacttcatccctgccaagcacggcaagtacgtcggccagctcaccaagttcgccggcacgctcaactgccacgtcggcatgccatgctaattgggccgatgtgaagaggaggcatgggcgatggcaactgccgatatgttggacgccgacggcagcggcgaggggagacctcccaatcagtgcgagttgtcaacgtaactcacgtcctccccggcggcgcatcagcggcagcgccaccgcacgccggcggcggcgacgtcgacgtcatcgagctctccttcctcgacaccatgttcttcgccctcacgccgctcaaacgcctcttcttctacgaggcagcagagccgtcgttcccggccatggtcagctccctccagtcctccctcgccgccaccctcgccgtcttcgcgcccctcgccggcaagctcgcctaccgcccctcccacgacgacgtcgtcatcgactgctccgtcgccgccgtctcccccggcgtcgtgttcatcgaggccgagtaccacgacgacgacgacgccgtcgtcgacatgcgccgcctcgccggcgacgaggagcaccacacggaggccttcaagcggctcgtgccggagatggacgtggggcggcttccccggatgctcgccaagacgaaggagcagctaatgttaatggcggcgccaaccacccacgttgctgtcctgtctctctactggacgtcgctcgttcgcgccaagttcacgagcaccggcgggggcggcgccggcgacggtgacgtctacttcatgattcccggcgacttgcgccgccgcctgaggccgccggtcggcgacggctacttcggcaactgcgtgaaaccatgctacgcgagcgccgccgtcggggacctccgcggcggcaacggcctggtgcacgccgccgccgcgttccagagcgcgatccgcgggagcctggagtgcgacgacccgctcgccgacgacgtcgagcggtggagcgagctcgagaggaaggtgcccaaggagaggatcgcgcaggccagcgcgtcgcaccggttcatggcgtacgagacggacttcgggtggggcgcgccgcgccgcgtcgagctcgtgtccgtgtaccgcatggacgtggtagcgctcgtggcggcgccgccggccgccggcggcggtgtgcaggtctccgtcgcgctcgaccgtgcccacatggaggcgttcgacagctacttcctgcagaattcggacaccaaatccgactcgccatcaatctagacatatcagccacgatatggaaaaggacgagagaaagcttattaaccatgccttaatttgtatatatatgaaaatctgacaaatttgtacatgtgtaaaactttataattttcaaaaaagaaaaaaaaacgtcccttttattcgt

SEQ ID NO: 18238 - DNA, 453 bp, Oryza sativa
  Clone ID: PAT_MRT4530_23815C.1
atggcgagaactcttcctctctcgataatcatggaagctgcagccaagacggcgtccaagaaggaaggaagtgggcgacgagcagatccaagcagcgtggtggtccttccatactcccgcctcccgcgccacgccctcggcgagatagagaaactgctggggaaactgaagcctgctcgagtggatcctggtgacctccagaccttcctcggatcctctgcagcgacggaggagacaatggagttgcgcatgcgagcttcctcctctgccattggtgccagttcatcaaggacgcacgccgcaggcatgaaacattcgatagttgccgccaccgacagccgtatggtagacatcaacgagctcgacgagtgggcagctggcggcggctcaaccacttcggcacttgtgcccatcatccccaccgtgaagaggttgttctcgacggctcgctga

SEQ ID NO: 18239 - DNA, 134 bp, Oryza sativa
  Clone ID: PAT_MRT4530_23816C.1
attaaactgtatgtttctaaactataccagagtggcaactgtattaactcccatttagagatactctgagggtctttccgcgccgagtggagatcagcttcctaacacatgggtgctagactcacttagagagc

SEQ ID NO: 18240 - DNA, 612 bp, Oryza sativa
  Clone ID: PAT_MRT4530_23817C.1
atggcagaggaggaagctcgcatgcgcaactccattgtctcctccgtcgctgcagaggatccgaggaaggtctggaggtcaccaggatccactcgagcaggcttcagtttccccagcagtttctctatctcgcctgcttcggccagcagatctagcacaaacacgagtcctagcgttgggacttataagaaggtgagacggaggcggcagcgccagcatcggctccgttggttgcgtcagcagtggcgacgcgtcctcaagggagcacgcccacaacgaccgagggcgtggcgcgggaggcgggagtatggaaggaccaccacgctgcttggatctgctcgtcgcccacttccttccttcttggacgccgtcttggctgcagcttccatgattatcgagagaggaagagttctcgccatcaccgagggagatgcatggagcatagagaaaaggttgagagagaaagtggagggaggagagaaaaaggaacgagagaaggaaacatatgtgacactgacatgtgggccttacatgatgactcagcagcacggcgccggggaggcgaagctattgacctcgtcctcccgtcgtccacacatacgcattgcgtaa

SEQ ID NO: 18241 - DNA, 143 bp, Oryza sativa
  Clone ID: PAT_MRT4530_23818C.1
acgtgggtaacacgcacgctgccacgctactaccctactacgcttggactgacgttggcactttacaccttaacttatccttgggtgtgactcacactaccaccacggctactcctaccacggacaccacacgactcccctct

SEQ ID NO: 18242 - DNA, 1357 bp, Oryza sativa
  Clone ID: PAT_MRT4530_23819C.1
atgtcgtcttcctccaatagcgactccggcaagaagggcggcaaccctctggaagccatgggcgccttcttctcgtcgcaggtgaaccgccggaagctggtcaccagcgagaagcaggcgctggccacgcggctgtccgccggcggcgaggcgttccccggcagcgagcaccggccggccgaccggaagacgtggatggcggagctcgggccggagcggctgcgcgtgcaccagctggtgtggccggggacgcacgactcggcgacgaacaagatcggcatcccgttcgtgacgcgccccttcgcgcagtgccagtcgctgtcggtgtacgagcagctcgccgcgggcgcccgcgtcatcgacgtgcgcgtccaggaggagcggcgcgtctgccacggcgtgctcgcaacctactccgtcgacgtcgtgctcgacgacgtgaggaggttcctcggcgagacggcgtcggaggtggtgatcctcgaggtgcgcaccgagttcggccacgacgacccgccggagttcggcaggtacctggtggagcagctcggcgagcacctgatcccgcaggacgaggcggtgttccacaagaccatcgccgagctcctcccgcggcggctcatctgcgtgtggaagccgcgcaagtcgccggcgcccaagcccggcgagccgctgtggagcgccggctacctcagggacaactggatcgacaccgacctgccggagaccaagttcgagagcaacgtcaagttcctcggcgagcagccgccggtggccgaccggaggttcttctaccgggtggagaacacggtgacgccgcaggccgacaacccggtgctctgcgtccggccggtcacgcggcggatccacggctacgcccgcctcttcatcgccgaggtcttcgccaagggcctcggcgacaagctgcaggtgttctccaccgacttcatcgacggcgacttcgtcgacgcctgcgccggcgtcaccaaggcccgcgtcgacggcgccgcgtgagattgcatggtcgggccctgtagtaattagaggggtcgccgcgtttagaggatttgcttcgtttcgccggtgtcgcagcgtacgtacagattagtttgtgttgttcgtgttagacacgtgatttatgaatgatttattatcatgcatgtgttgggcgttcgtgtgtgatttaattgttgaaatgtatatagtggtgaaattgctcgtgtacaaaggaataatcgccaagtgctcgttttgttgtgatcgttcgtaacgagggtaatggagaggatcaaattggtatttgattgtgttccctccaaaaaaaaaaaaaaaaaaaaaaaaaaacctgcagcccggg

SEQ ID NO: 18243 - DNA, 1225 bp, Oryza sativa
  Clone ID: PAT_MRT4530_2381C.1
tctcggcgagtacaccatctcttcattccgtattccttgttgagatccaccaactgttctcgagtgatcgagaaggcgcagagtatggtcgtttgtctctacatgatccgacaaggccttatccgctctgggcatccccagccaaagttcccttaggttcctcagaggccttgtcaggacggcgtaaagagacatgaggataggtttcaaatctaggtgtcgtcgtggtaagggatctctgggtaaaacacttggcgatattgtgtacctgatatcaattttgctggagtagaggtaatgggaggatcgctacactgctgatcgaaaatcagttgtagccccaacttgaccacactggtcgaggaccatgtagtagtcataactcaaccactggaagtggatgtagtgggaagaattgctacaccactggtggagaaccaggtgtagccttaactcgaccacgagaagtaaagctagcaggagtgtcgctacaccgctggtcgaaaaccaggtgtagctttaactcaaccacgagaagtaaagctagtgggagtatcgctacaccgctggtcgaaaaccaggtgtaaccttaactcaaccatggttcgagaaccagcgagtagaattatccctcgaacaccaatggaagttgcggtgcgagagattgctacgatttactggttcgagaaccagcgagtagaattatctctcgaacaccaatggaagttgcggtgcgagagattgctacgtactggttcgagaaccagcgagcgagtagaatcatctctcgaacaccaatggaagttgcagtgcgagagattgctacatactggtttgagaaccagcgagcgagtagaatcatctctcgaacactaatggaagtgctagagttggtttattacatgtgcatctcatgtggccagcatgactcacacacccaacttgtagcatatctggatgtctattcgcaatcatgccgggtgatcaagccgacaacgttcacgaggaattatccgttaacaaccttttctcaaatagtccagccacggccggtgcaatgagatatgtcgtcggtcttcgttggtaggttgggcgcgacgactctgcatttgtcgagatcgttctcgataatacggtgtacttgaccacaacctttgtagatatatgccggatatatctgtgtccgaatagacacatgtaggtacagtgctgtatttgtggccat

SEQ ID NO: 18244 - DNA, 437 bp, Oryza sativa
  Clone ID: PAT_MRT4530_23820C.1
agggggggggggttttttttttttttttttttttttttttttttttttttttgggggggggtgttttttcttttggtttacttcccacctgggggggtttttgagagtttttttggcctgggcctgcgcttgggggtggccctttttttccgcctcaaattttttttggggggtgatacactgcaccatgggggaaatagcctggcaatttttttgggggggcgtcaacctcgtggggtgacccccttggtggggggttaactgggagcccctcgggtggggcctgttttttgggttccaaaaaaaaaccaccggaatacactgtttttttaagaaataattgccccggttgatgaaaaggtgcgtaaattttttttggtggcattccccctttgtgggagcatcaatttgtgccaagccctggtcgttttttgggt

SEQ ID NO: 18245 - DNA, 318 bp, Oryza sativa
  Clone ID: PAT_MRT4530_23821C.1
atgcgttgtggaggtcgtggcctcgccggttcgtggctccacgcgagtgttcccctccccatcccccgagccggcgatggaggaagaggaagagatggcggtgaaggaggaataggaggcggcaaatctggtgcctaccttgatgacatccctcgagtcatgttgtcgcccatcgtcgtgcctcgcttcaagccgccggacccgtcgtcgtcctccgatttgcgccaccgctcgtcgtcatcacctgctccaagccacagtagcctcctcgacccctctgtagcctcgacggcggcctccatgacctgtccggtttga

SEQ ID NO: 18246 - DNA, 646 bp, Oryza sativa
  Clone ID: PAT_MRT4530_23822C.1
atggaggacttgcaaagttgcaagtactaccaatcaagtagcataccaaatctgaagaaggccatgtggcaatctgaagaagatatcatggatagtgaccgggagagctataggttggtccaacctggaacacaccagttctgggagaggatggaggtattcatccacgaggactacgtgaacaagcgcaacgaggtgaggagggagcagaggaggaagcagctgcagatggagcaggcgctcgccggcgtgtctccgccggcgccggagccccgggagagcccgagagtgccggcgcagtgcctgacactgaccggcgggccgtcgaccacagtcgggtcaccgacggcgagcgcgacggcggcggaagctgccgagacggtgggtcaccgtctctttgactgcctcaagccgtactagcctatgtctatgtttacatgtgcaacaagtgcaagtgaataaagatggattttatggtgaaaattcagtggatctacttacgcagccttgactgctgcacaggacaaattccaacggtttacattttaggaccaaattgatctatcacatgaacatgtaacattggtgtatcattgaaatgaccaaaaaaaatcaacagcatttgttaaaaaaaaaaaaaaaaaaa

SEQ ID NO: 18247 - DNA, 500 bp, Oryza sativa
  Clone ID: PAT_MRT4530_23823C.1
accttccccccccccccccccccccccttcatccatggaaacatgctgattacaaaagacccggaacttggatattaaagagggcactaagaaggttcaaatacacaccccatgacatagttttaatgtttataaggaaaccctggataaacataaaagcatttggtttttaataccggacccacaaattagattgattactagcccacacaggacagattttaagttttacagacttgtctaacgttggcaaggaaccaggcaagaaccctgaccctttctagaactatttacccttattacaccttgcgaccatcgtcttaacatatgagccaacctcttggaattatttttccatcggggagagagtcctcatgggccagggagaacttcccctagtgcatgtcaatttctactgacaaatggaacaagagagcctttgggatacatgaggtctaacttgatggcattgcggaataacaccttgattacgctggggg

SEQ ID NO: 18248 - DNA, 985 bp, Oryza sativa
  Clone ID: PAT_MRT4530_23824C.1
aaagtaagaccgggctctggcgtttgcgttacaacagttgctaattttcacagctaattttgtttctgatagttcctttagtagatcaattgtctgaatgttgcaatgttgacattcaagacataagttatcttgagcatcacatcaaaacaattagacaggtacatagctagagttcattacaaggttagcagcctacaatgatcattacatcagagcctacaacgatcattacatcagacagcacctgttctctactccttgctattccagagcctgtatgtcagaaactacagccctacatcagaggacgacctaggtcacctatccataattacaacacatgtaaatacagatagatacaggagatacatagattagaacggccgttaatctatgtaaagtctcctcaaaacagacacccaaggctcaatcagagtcactgtcatgctcaaggaaacgatactcccttgggccaccaagccttagtactatggtcccggcattttcctcatgccactcaacgccttccttctccacaagctcggcaaccgcgcgctttatttttcccttccctgtgccttctacaccacaaccagtaattactctaagaaaggtggttggcatgcacacacaaatcatcatgtgaaccttgagaagcctcatggcttgtttaacatgttgcccatgcaggtcaatagtcactgtattcgttatatgcttatttctggcttcaaatgtttccctgctagatgtgacataaaagtaatagctgggaaagttatgcaaattacctggcttcaaatatttccctgctagctctctcatcttccatgcgagctaattcacggtaatgcttcccctcctctgcgagataggaggcataagatttttctcctttggaatatgccatggcagctttctgataatatgttttcattgtatcataatgccttccagcgacagtacgaaattcttgataccc

SEQ ID NO: 18249 - DNA, 522 bp, Oryza sativa
  unsure (1)..(522): unsure at all n locations
  Clone ID: PAT_MRT4530_23825C.1
gattttacttcttagaatctatatgcaatgtacttagatgactttnggagtgtaaaatgctagaagatttaccatccaggctaatatggtaatttaatttttatgcaactcttagacaagagcaatatattttttccagtctcttttttttttgagaatttgtttgtactgaactgtaaaatgaaaatcatgtcccttgtaatcttctcccccttcgactttgaggaacaacaagtcggagcttgccaactattggctccaagaacagtgttggccatgcaactgatttctaatcagttttgaacatgatgaatctaccgcaatgatcgatttggcaaagatagcctccaggaacaacaagtcggagcttgccaactattggctccaagaacagtgttggccatgcaactgatttctaatcagttttgaacatgatgaatctaccgcaatgatcgatttggcaaagatagcctccagtagcctagtgccatgcactgtgaggtccccagtgtgaaatgtagc

SEQ ID NO: 18250 - DNA, 302 bp, Oryza sativa
  Clone ID: PAT_MRT4530_23826C.1
atggccgacgctagacgactacgagcacatgaggtgatgacgggatcaactcctcgccggcctccctcaccgtcgcgtcctccctcccttgctgtcgatggtgcacaccggctccgtcgccctcgttgtcgagttgcgctgatggccgacgctgaagaaggaaggcaacaacggccggcagaggtggcggcgactggcaggggaggcaacagcctaccggcaaacagcagggagccaccgagccggcggacagcaatgaacgacgacgggtacgagagagagaagcgtgaagaaaagcagag

SEQ ID NO: 18251 - DNA, 3399 bp, Oryza sativa
  Clone ID: PAT_MRT4530_23827C.1
atggctcgtcttcctctccgctcgcgtgcgactctccttcgtcgacgcccgcaactgcgagtagttcctgcggagcaaccggtctttccggcacctcggtgctgtgattttactatggctggttttgccgatgcactgaggccggataaattcaccggtgtgcactttaagagatggcatatcagggtcactctatggctgacagctatgaaatgcttctggcagaagcaatttgaggaagccactactctctttgtggaatgcattcttagcgttcttggcgatcgtctggtcgaggtgtatatgcatatgaccgacgctaaggagttgtgggatgcactgaatactaaattcggtgctactgatgctagcaatgatctgtatatcatggagcagtttcatgactacaagatggctgacaaccgttctgtagttgaacaggctcatgagatacaaaccatggctaaggaactcgaactccttaagtgtgtcttacccgacaaatttgtggtcgggtgcattattgcgaaactacctccatcttggagaagtttcggcccagaacaagagaaggggaaatacaaagctcaacagaccaccaacttcaagaagcagaagaagaacaacaataatcctaatcaggatgagaggacttgctttgtgtgtggccaacctggtcatctggctaggaagtgtccacagcgcaaggggatgaagacacctacaagccagacttctaagtctgctaatgtgaccattggcaacactggagatcgaagcgggtatggtcgcacggggttccaccgtcctagtggggaatgggtcacatgcttctattcatggtgttggcacggtagatatgaagtttacttcgggaaagatcgtgcagctgaagaacgtgcaacatgtcccttctatcgacaggaatcttgttatgagtgcggaggcctgttccgcttttccctttctgatttctgcaataaatctgtgaaccatatttgtggcagtgtggatgatgaggctaatgtttggcactcacgtttatgtcatatcaattttggcttgatgtctcggctttccagcatgtttttaattcctaagttttccattgtcaaaggttctaagtgccatagttgtgtgcaatcgaagcaacctcgcaagcctcacaaggctgccgaggagagaaacttggcaccactagaactcctacattcagatctttgtgaaatgaatggggtgttgacgaagggtggaaaacgatatttcatgatgttgattgatgatgctactagattttgctatttgtacttgttaaaaacgaaagacgaggcactagactattttaaaatttataaggcagaagttgaaaatcaacttgatagaaagataaaaaggcttaggtttgatcgtggtggagagtttttctcaaacgagtttgacttattctgtgaggaacatggcatcatacatgagaggacgcctccctattctcccgagtctaatgggattgctaaaaggaagaaccgcacactgactgacttggtgaatgccatgttggacaccgcgggactacctaaggcacggtgggcggaggcattgttgacctcgaatcatgtgttaaacagagttcctaacagaaataaggacaaaacaccatatgagatatggattaggagaaaaccatcactttcttatttgcgcacatgggggtgcttggcgaaagtcaatataccaataacgaagaagcgcaaactgggacctaagtctgtggactgtgtctttctaggatatgctcatcacaacattgcctatagatttttaatagttaaatctgaggtacctgacatgcatgttggtacaattatggagtctcgtgatgctaccttctttgagaactttttcccaatgaaggatgcacatagtagtttgagccaaccctctgaagtaattcccagtccaatcacaccaccagaacaaactgaacatacacatgaacatgtcactgaggaggatgtcagtgaagctcctcgaaggagtaagagacaaaggacggctaagtcctctggtgatgatttcactgtgtacctcatggatgacactcctaagtcaattttagaagcatatgcatctcctgatgcagactactggaaggaggctatccgtagtgaaatggattccattattgctaacaggactttggaggtgacagagcgaccctatgggtgtaaacctgtggggtgcaagtgggtgttcaagaagaagcttaggcctgacggtactattgaaaagtacaaggctcggcttgttgctaaaggctatactcagaaagaaggcgaagatttctttgacacttactcacctgttgctagattgaccacaattcgtgtgctactttccctagcagcctcacatggtcttctcgttcatcaaatggacgttaagacagcttttcttaatggagagttggatgaggagatctatatggatcaacctgatgggtttgtagttgaaggtcaagaaggcaaagtgtgcaaattgttgaagtctttgtatggtctgaaacaggctcctaagcaatggcatgagaaatttgacaaaacattgacatctacaggctttgcagtcaatgaggcagataaatgtgtgtactatcgccatggtgggggagagggagttattctgtgcttgtatgttgatgacatactgatatttgggacaaaccttgaggtgataaatgagttctattatgtggagaagatcttgaatcgctttggctacattgatagtaagccttctccaacaccttatgatcctagcttgttgcttcgcaagaacaagagaattgctaggaaccaactggaatactcccaaatcattggctcgctgatgtacctggctagtgcaactaggcctgatatctcctttgttggatatagtgattctaactggatctctaatgtggatgagatcaaagccactagtggatatgtcttcacactgggtggtggtgctatttcgtggaggtcttgcaaacagatcattttgacgaggtcaaccatggaagcagagctgacggcactggatactgctactgttgaggcagaatggctgcgtgatctattaatggatctgcctattgttgaaaaaccggtgccgggtatccttatgaattgtgacaatcaaacggtaattgtcaaagtgaatagttctaaggataatatgaaatcgtctagacatgtgaaaagacgattgaggtctgtcaggaaattgagaaactccggagttataacgttggattacatccaaacagctagaaacctggcagatcccttcacgaagggactatcacgaaatgtgatagacaatgcatcgaaggagatgggtttgagacccatgtga

SEQ ID NO: 18252 - DNA, 1565 bp, Oryza sativa
  Clone ID: PAT_MRT4530_23828C.1
ggcaatcgctccacttgtcgcctatatacgccttggcctctcggcgtccgatgctagtggtagtggcccgcaaatcctcctcctccgctcgcgtcgccgcccaccgccacatatccacacacctcgacacgacggcgacggcgacggcgacgatgactgcgggccagcctctccgggacgatccccagccacgccggcacagcccgccggcgctccacccggccgtcgtgccggcgtacccgcccccggagtcggacgccgacgagtcgtgggtctggtcccagatcaaggccgaggcgcgccgcgacgccgacgccgagccggcgctcgcgtcgttcctctacgccaccgtgctctcccacccctccctcgaccgctcgctcgccttccacctcgccaacaagctctgctcctccacgctgctctccacgctcctctacgacctcttcgtcgcctccctcgccgcgcaccccaccctccgcgccgccgtcgtcgccgacctcctcgccgcgcgctccagggaccccgcctgcgtcggcttctcccactgcctcctcaactacaagggcttcctcgccatccaggcccagcgcgtcgcgcacgtgctctgggcgcaggaccgccgcgccctcgcgctcgcgctccagtcccgcgtcgccgacgtcttcgccgtcgacatccaccccgcggccgtcgtcggcaagggcgtcctcctcgaccacgccacgggcgtcgtcatcggagagaccgccgtcatcggcgacaacgtctccatcctccaccacgtcacgctgggcgggacaggcaaggccgtgggcgaccggcaccccaagatcggcgacggcgtcctcattggcgccggcgcgacgatcctcggcaatgtcaggatcggcgccggggccaagatcggggccgggtcgctggtgctcatcgacgtgccgccgaggaccacggcggtggggaatccggcgaggctgctcggcgggaagaagggcgacgacatgccgggtgaatccatggaccacacctccttcatccagcaatggtcggactacagcatctgagcaggacatggtgtatgcgctactaaattttctccttgtttcgagctgtgcttgaactggtactagtggtgttattacttaataacactacaagtaatagcacaatgtgtttcttttttgcttgtaatggctgtaagctttgctccggcgagctgaaggtgaaccgtactgcacattgtcgtgctcgtctccggacacttgtactggatgttcactttgtaattttgcgaaggtctcgtggaatgtaatactatccactaccttaaaataaaaaaaaaaaaaaaaaaaaagcgccgaggtctatttctcttcctctctgtataatccgtagtgttgatatgccaaaaactgatgtacttgtcgtgctttgggtaatctgtactgtagtgttgtatcatcagccgttttatcagtcgaatgcccatgctcatgtactgataactggtgattgatgaaatgatgagtcaaataaaagttgtataacttttgattttaacaaaa

SEQ ID NO: 18253 - DNA, 3823 bp, Oryza sativa
  Clone ID: PAT_MRT4530_23829C.1
atggctggttttgccgatgcactgaggccggataaattcaccggtgtgcactttaagagatggcagatcagggtcactctgtggttgacggctatgaaatgcttctgggtgagtactggcaaacctgaaggaattcttactgttgatcagcagaagcaattcgaggaagccactactctctttgtgggatgcattcttagcgttgttggcgatcgtctggtcgaggtgtatatgcatatgaccgacgctaaggagttgtgggatgcactgaatactaaattcggtgctaccgttgctagcaatgatctgtatatcatggagcagtttcatgactacaagatggctgacaaccgttctgtagtcgaacaggctcatgagatacaaaccatggctaatgaactcgaactccttaaatgtgtcttacccgacaaatttgtggccggttgcattattgcgaaagtacctccatcatggaaaagtttcggtactgcactcaaacacaagaaacaggaatactccgtggaggggttgatagcgtctcttgatgttgaggagaaagctcgggaaaaagacgccgcgtctaagggcgatggtgggcggtccagtgccaatgttgtgcacaaggcccagaacaagagcaaggggaaatacaaagctcaacctggtgtgtgggcaacctggtcatctggctaggaagtgtccacagcgtaaggggataaaggcacctgtagggcagacttctaagtctgctaatgcgaccattggcaacactggagatggaagcgggtatggtaatttaccaactgttttttcagttaatcagtctactaattggtgggttgatactggggccaatgtacatgtttgtgctgacatctcattgttttcttcttatcaggtcgcacggggttccactgtcctaatggggaatgggtcacatgcttctgtccatggtgttggcacggtagatctgaagtttacttcgggaaagaacgtgcagcatgtcccttctatcgacaggaatcttgttagtggctcccgtctgaatagagacagatttaagttggtttttgagtctaataaagtagtcatgtctaaacatggatattttattggtaaaggttatgagtgcggaggcctgttccgcttttccctttctgatttctgcaataagtctgtgaaccatatttgtggcagtgtggatgatgaggctaatgtttggcactcacgtttatgtcatattaattttggcttgatgtctcggttttccagcatgtatttaattcctaagttttccattgtcaaaggttctaagtgccatagttgtatgcaatcgaagcaatctcgcaagcctcacaaggctgccgaggagagaaacttggcaccactagaactcctacattcagatctttgtgaaatgaatggggtgttgacgaagggtggaaaatgatatttcatgacgctgattgatgatgctactagattttgctatgtgtacttgttgaaaacgaaagacgaggctctagactattttaaaatttataatgcagaagttgaaaatcaacttgatagaaagataaaaaggcttaggtctgatcgtggtggagagtttttctcaaacgagtttgacttattctgtgagaaacatggcatcatacatgagaggacgccttcctattctctcgagtctaatgggattgctgaaaggaagaaccgcacactgactgacttggtgaatgccatgttggacaccacgggactacctaaggcatggtggggggaggcattgttgacctcgaatcatgtgttaaacagagttcctaatagaaataaggacagaacaccatatgagatatggattgggagaaaaccatcactttcttatttgcgcacatgggagtgcttggcgaaagtcaatgtaccaataacgaagaagcgcaaactgggacctaagactgtggactgtctttctgggatatgctcatcatagcattgcctatagatttttaataattaaatctgaggtacctgacatgcatgttggtacaattatggagtctcgtgatgctaccttctttgagagctttttcccaatgaaggatacacatagtagttcgagccaaccctctgaagtaattcccaattcaatcacaccaccagaacaaactgaacatacacatgaacatgtcactgaggaggatgtcagtgaagctcctcgaaggagtaagagacaaaggacggctaagtcctttggtgatgatttcactgtgtacctcgtggatgacactcctaagtcaatttcagaagcatatgcatctcctgatgcagacaactagaaggaggttgtctgtagtgaaatggattccattatcgctaacgggacttgggaggtgactgagcgaccatatgggtgtaaacctgtggggtgcaagtgggtgttcaagaagaagcttaggcctgacggtactattgaaaagtacaaggctcggcttgttgctaaaggctatattcagaaagaaggcgaagatttctttgaaacttactcacctgttgctagattgaccacaattcgtgtgctacttttcctagcagcctcacatggtcttctcgttcatcaaatggacgttaagacagcttttcttaatggagagctggatgatgagatctatatggatcaacctgatgggtttgtagttgaaggtcaagaaggcaaagtgtgcaaattgttgaagtctttgtatggtctgaaacaagctcctaagcaatggcatgagaaatttgacaaaacattgacatctgcaggctttgcagtcaatgaggcagataaatgtgtgtactatcgccatggtgggggtgagggagttattctgtgcttgtatgttgttgacatactgatatttgggacaaaccttaggtgacaaatgaggttaaatcattcttgtcttaaaattttgatatgaaggatttgggagtagctgatgttatctaaaacattaagctaattagaggtgagaatgggattacgctcttgcagtcccattatgtggagaagatcttgaatcgtttttgctacattgatagtaagccttctccaacaccttatgatcctagcttgttgattcgcaagaacaagaaaattgctaggaatcaactagaatactcccaaatcattggctcgctgatgtacctggctagtgcaactaggcctgatatctcctttgctgtgagcaagttgagtcggtttaccactaatccggaagatgatcactggcgtgcgcttgagcgagtaatgtgttatctgaaaggtactatggaatcggggcttcactatactgggtatcctgcggtactggagggttatagtgattctaactagatctctgacgtggatgagatcaaagccactagtggatatgtcttcacactgggtggtggtgctgtttcatggaggtcttgcaaacagaccattttgacgaggtcaaccatggaagcagaactgacagcactggatactgctactgttgaggcagaatggctacgtgatctattaatggatctgcctattgtagaaaaaccggtgccggctatccttatgaattgtgacaatcaaacggtaattgtcaaagtgaatagttctaaggataatatgaaatcgtctagacatgtgaaaagacgattgaagtctgtcaggaaattgagaaactccggagttataacgttggattacatccaaacagctagaaacctggcagatcccttcacgaagggactatcacgaaatgtgatagacaatgcatcgaaggagatgggtttgagacccatg

SEQ ID NO: 18254 - DNA, 510 bp, Oryza sativa
  Clone ID: PAT_MRT4530_2382C.1
ggatcgaaacatgcaccttttatttcccacatacgcagttttaccttacgacagcacccctttattacacaccgccacgggtagtccctacgtcacgggcgttatcgtgacacaataaaaaacacagaggcgggccgctccacaccgtccgaagtggcctcggttccgaatttctggggcctcgaggggcccaaattccctatataggtgagttcgcttttaaacttcgataactccgtggtcacataaggcgtggtttccgtggtggtgacacatgtgttattccgcctcccaaattccaccaccaaccattaccgaggccggacacgacactacgatgtggtaacacggccgtgggggtgcctacagtgacggtgagcctaccctcaccacttaatgtgacggtgtggcgcctcaccgtggcccgcgcttctccaggtcgggaaaacccgtggtcggtggccaggcgtgggcattaagtggacactcgggccacaagcgccgcgcggg

SEQ ID NO: 18255 - DNA, 988 bp, Oryza sativa
  Clone ID: PAT_MRT4530_23830C.1
atggtggccggctcggatggcaacctcgccggagctagggtggtcggccgggattttggaggacacctacgcgtagaggacgtcggcgcgaacccgatggtactcaccaatgcgtccaacaacgagggacggcggccggcgacaacgcaagaggcggcggcggctcggttgaacggcggtgatggcgctacgacggccggcgacggcggagagggggcggccgagcttcctcgctcccgtgcgcacaagtatcatcgcccgagcatagaaggtatcaccaccaacaactacattacgaagtgcgctgacgcgagctttctcaaacgtgtggtccaggtgccgcgctaccgtcgtcttgcctccatgctccaccacgcgggcgaggcggccggcaacctgccaggctgctaggcgcgacggtgctggctgggcgacgatctccggcgggcaaccaaagcagccgacaaggcgaccagctaggcgcgacggcaccaggcgggggcggcgggcgaggatcttcggtggagacgagcagccgacatacgtggcgagggcgagccggcgaatcccctccaggccattcctcaaacaggtcccgatccgatcacccttttgcctcatctcttcctccgtgccccctctcctcttggcaagggagtttctaggttggattgagacggcaggttgtcacttgtcagcgggggaagctcaggatgccgaagcaatgccacccagtcccaggttctccttcagccagatctggcgaggaggccggcgggtggtggcatggaggggtcctaggccagctctcagggatggtggttcgatgaagtcggccgacggtggggcgtcggtgcggtgtggtggcagtcttgtcgttggcaggactggaagctaatcgcggaggggcatcggtcgggtgtggtggaagccatgtgccgccgatgtttagatggtggattcggattgggcgatggaccacggcggt

SEQ ID NO: 18256 - DNA, 666 bp, Oryza sativa
  Clone ID: PAT_MRT4530_23831C.1
tgaagcatgtgtggtggagagaagacgggaacacgcgcgcgctcgctcgcctggcctggaaggcggcgcgcgtgcacgacgtacgcgtcgaatggtccgcaaaattggctcatcacccttgcgcagatgaagcctccttttgccgttttgttttgctgcagaaaattcggatttgttttgttttggaaatattccgaaaaatccggtgcgtgaaaacagcgtggagtccggataagttacgcgcgacttatcaggttcggttacgcggagtggagatcgtacgggcgcctctgtgctgcgccgtcgctcgtagactactccatcccgctcgccggcgtgcaccgacgatcgggggagcaggtctccggaacctctgccttcgacgtcctgcaccggaagaaggcggcaataaggtttttgggaagcgcttcgcgcgactgctccctgttcgtccgcgacggctcgccttcctctccgctcgcgtgcttcgcgccttcgtcgacgctcgcaaccgcgagtagttcctgtcgagcaaccggtctttccgccacctcgctgtcccgccgctaagccacattgttggcatctttagcaagcagaagtagccatcaaatcacggacttcgagttaggacaggagactttgtttgctcatcatggcaaaggt

SEQ ID NO: 18257 - DNA, 2790 bp, Oryza sativa
  Clone ID: PAT_MRT4530_23832C.1
atggctgacaaccgttctatagtcgaacaggctcatgagatacaaaccatggctaaggaactcgaactccttaagtgtgtcttacccgacaaatttgtggccgggtgcattattgcaaaactacctccatcttggagaagtttcggtactgcactcaaacacaagagacaagaatactccgttgaggggttgatagcgtctcttgatgttgaggagaaagcttgggaaaaagatgctgcgtctaagggcgatgttaatcagtctattaattggtgggttgatactggggccaatgtcgcacggggttccaccgtcctaatgaggaatgggtcacatgcttctgttcatggtgttggcatggtagatctgaagtttacttcaggaaagatcgtgcagctgaagaacgtgcaacatgtcccttctatcgacaggaatcttgttagtggctcccgtctgactagagacggatttaagttggtttttgagtctaataaagtagtcgtgtctaaacatggatattttattggtaaaggttatgagtgcggatgcctgttccgcttttccctttttgatttctgcaataagtctgtgaatcatatttgtggcagtgtggatgatgaggctaatatttggcactcacgtttatgtcatattaattttagcttgatgtctcgactttccagcatgtgtttaattcctaagatttccattgtcaaaggttctaagtgccatagttgtgtgcaatcgaagcaacttcgcaagcctcacaaggctgccgaggagagaaacttggcaccactagaactcctacattcagatctttgtgaaatgaatggagtgttgacgaagggtggaaaacgatatttcatgacgttgattgatgatgctactagattttactatgtgtacttgttgaaaacgaaagacgaggctctagactattttaaaatttataaggaacatggcatcatacatgagaggacgcctccctattctcccgagtctaatgggattgctgaaaggaagaaccgcacactgactgacttggtgaatgccatgttggacaccgcgggactacctaaggcatggtggggggaggcattgttgacctcgaatcatgtgttaaaaagagttcctaacaaaaataaggacaaaacaccatatgagatatggattgggagaaaaccatcactttcttatttgcgcatatgggggtgcttgacgaaagtcaatgtaccaataacgaagaagcacaaacttggacctaaaactgtggactgtgtctttctggtatatgctcatcacaacattgcctatagatttttaatagttaaatctgaggtacctgacatgcatgttagtacaattatggagtctcgtgatgctaccttctttgagagctttttccctatgaatgatacacatagtggttcgagccaaccctttgaaataattcccatttcaatcacaccaccagaacaaactgaacatacacatgaacatatcactgaggaggatgtcagtgaagctcctcgaaagagtaagagacaaaggacggctaagtcctttggtgatgatttcactgtgtacctcgtggatgacactcctaagtcaatttcagaagcatatgcatctcctgatgcagactactggaaggaggctgtctgtagtgaaatggattccattatcgctaacgggacttgggaggtgacagagcgaccctatgggtgtaaacatgtggggtgcaagtgggtgttcaagaagaagcttaggcctgacggtactatcgaaaagtacaaggctcggcttgttgctaaggactatactcagaaagaaggcgaagatttctttgacacttactcacctgctgctagattgaacacaattcatgtgctactttccctagcagcctcacatggtcttctcgttcatcaaatggacgttaagacaacttttcttaatggagagctggatgaggagatctatatggatcaacctgatgggtttgtagttgaaggtcaagaaggtaaggtgtgcaaattgttgaagtctttgtatggtctgaaacaagctcataagcaatggcatgagaaatttgacaaaacattgacatctgcaggcttcacagtcaatgaggcagataaatgtgtgtactatcgtcatggtgggcgtgagggagttattctgtgtttgtatgttgatgacatactgatatttgggacaaaccttgaggtgataaatgaggttaaatcattcttttctcaaaattttgatatgaaggatttgggagtagctgatgttatcttaaacattaagctaattagaggtgagaataggattacactcttgcagtcccattatgtggagaagatcttgaattgctttggctacattgatagtaagccttctccaacactttataatcctagcttgttgcttcgcaagaacaagagaaatggtagggatcaactggaatactccgaaatcattggctcgctgatgtacctggctagtgcaactaggcctgatatatcctttgctgcgagcaagttgagccggtttacctctaatccgggagatgatcactggtgtgcgcttgagcgagtaatgcgctatctgaaaagtactatggaattagggcttcactatactgggtatcctgcggtactggagggttatactgattctaactggatctctgatgtggatgagatcaaatccactagtggatatgtcttcacactgggtatggtgttgtttcgtggaggtcttgcaaacaaaccattttga

SEQ ID NO: 18258 - DNA, 1439 bp, Oryza sativa
  Clone ID: PAT_MRT4530_23833C.1
atggctgacaaccgttctgtagtcgaacatgctcatgagatacaaaccatggctaaggaactcgaactccttaagtgtgtcttacccgacaaatttgtggccgagtgcattattgcaaaactacctccatcttggagaggtttcggtactgcactcaaacacaagagacaggaatactccgttgaggggttgatagcatctcttgatgttgaggagaaagctcgggaaaaagatgccgcgtctaagggcgatggtggacagtccactgccaatgttgtgcacaaggcccagaacaagagtaaggggaaatacaaagctcagcagaccaccaacttcaagaagaagaagaacaacaacaatcctaatcaggatgagaggacttgctttgtgtgtggtcaacctggtcatctggccaggaagtgtccacaacgcaaggggatgaaggcacctgcagggcagacctctaagtctgctaatgtgaccattggcaacactggagatggaagcgggtatggtaatttatctactgttttttcagttaatcagtctactaattggtgggttgatacagggggcaatgtcgcgcggggttccaccgtcctaatggggaatgggtcatatgcttctattcatggtgttggcacggtaggtcgagccgaaccaactaactgctacagccaaaaatgcaagggcaatttcacattacgaaaatgcagcctccgcctagccgccgaggatgagatccatgccctcctcgccatcatggagctcggcgcattccttcactcactcctcctccgcccggctgccagggatgagatcaatgccttcatgtcggcatggagttcggcgcgctcctccgcttactcggcccctgtctggcaaagcccacttctaataccatcgagttcgacgtgggttccgtcgagtttgatcgacgtgctcgcctccatactcacagaactcatcgtcgggccttgctgccccatcatcaccctcgaccaggcggaggtcaccgaggccttcagggcctttgactgcaagggcaacggcttcatctctgccattgagctcacacgctccatagctgacacggcgacaccgacagcctcatcatccttttatttgactgtgggtcccatcacccactgacatgtgggtcatagtattttttttcttatttgtttaactgatatgtgggccccacatattttgttttaaatttgtagttttcaattttgctcgttttattttttcgggatcaaactactacgtaagcgctacattaatgccacgtgggacaaagtcctcgtcaatcaaaatcagggagcaagaaatctcgtttgactggttttgtaagttgagagacgggatgaaactggtttttcggttcatggaccaaaatcagactaggacaaatttctaaaaaaaaaaaaaaa

SEQ ID NO: 18259 - DNA, 3357 bp, Oryza sativa
  Clone ID: PAT_MRT4530_23834C.1
atggctaaggaactcgaactccttaagtgtgtcttacccgacaaatttgtggccgggtgcattattgcaaaactacctccatcttggaggagtttcggtactgcactcaaacacaagagacaggaatactccgttgaggggttgattgcgtctcttgatgttgaggagaaagctcgggaaaaagatgccgcgtctaagggcgatggtgggcagtccagtgccaatgttgtgcacaaggcccagaacaagagcaagggaaaatacaaagctcagcagaccaccaacttcaagaagaagtgtccacagcgcaaggggatgaaggcacttgcagggcagacttctaagtctgctaatgtgaccattggcaacactggagatggaagcgggtatggtaatttacctactgttttttcagttaatcaatctactaattggtgggttgatactggggccaatgtcgcacggggttccaccgtcctaatggggaatgggtcacatgcttctgttcatggtgttggcacggtagatctgaagtttacttcgggaaagatcgtgcagctgaagaacgtgcagcatgtccattctatcgacaggaatcttgttagtggctcccgtctgactagagacggatttaagttggtttttgagtctaataaagtagtcgtgtctaaacatggatattttattggtaaaggttatgagtgcggaggcctgttccgcttttccctttctgatttctgcaataagtctgtgaaccatatttgtggcagtgtggatgatgaggctaatgtttggcattcacgtttatgtcatattaattttggcttgatgtctcggctttccagcatgtgtttaattcctaagttttccattgtcaaaggttctaagtgccatagttgtgtgcaatcgaagcaacctcgcaagcctcacaaggctgccgaggagagaaacttggcaccactagaactcctacattcagatctttgtgaaatgaatggggtgttgacgaagggtgaaaaacgatatttcatgacattgattgatgatgctactagattttgctatgtgtacttgttgaaaacgaaagacgaggctctagactattttaaaatttataaggcagaagttgaaaatcaacttgacagaaagataaaaaggcttagatctgatcgtggtggagagtttttctcgaacgagtttgacttattctgtaaggaacatggcatcatacatgagaggacgcctccctattctcccgagtctaatgggattgctgaaaggaagaaccgcacactgactgacttggtgaatgccatgttggacaccgcgggactgcctaaggcatggtggggggaggcattgttgacctcaaatcatgtgttaaacagagttcctaacagaaataaggacaaaacaccatatgagatatggattggtagaaaaccatcactttcttatttgcgcacatgggggtgcttggcgaaagtcaatgtaccaataacgaagaagcgcaaacttggacctaagactgtggactgtgtttttctgggatatgcttatcatagcattgcctatagatttttaatagttaaatccgaggaggatgtcagtgaagctcctcgaaggagtaagagacaaaggacggctaagtcttttggtgatgatttcactgtatacctcgtggatgacactcctaagtcaatttcagaagcatatgcatctcctgatgcagactactggaaggaggctgtccgtagtgaaatggattccattatcgctaacgggacttgggaggtgacagagcgaccctatgggtgtaaacctgtggggtgcaagtgggtgttcaagaagaagcttaggcctgacggtactattgaaaagtacaaggctcggcttgttgctaagggctatactcagaaagaaggcgaagatttctttgacacttactcacctgttgctagattgaccacaatttgtgtgctactttccctagcagcctcacatggtcttctcgttcatcaaatggacgttaagacaacttttcttaatggagagctggatgaggagatctatatgtatcaacctgatgggtttgtagttgaaggtcaagaaggcaaagtgtgcaaatttttgaagtctttgtatggtctgaaacaagctcctaagcaatggcatgagaaatttgacaaaacattgacatctgcaggctttgcggtcaatgaggcagataaatgtgtgtactatcgccatggtgggggtgagggagttattttgtgcttgtatgttgacgacatactgatatttgggacaaaccttgaggtgataaatgaggttaaatcattcttgtctcaaaattttgatatgaaggatttgggagtagctgatgttatcttaaacattaagctaattagaggtgagaatgagattacactcttgcagtcccattatgtggagaagatcttgaatcgttttggctacattgatagtaagccttctccaacaccttatgatcctagcttgttgcttcgcaagaacaagagaattgctaggaatcaactggaatactcccaaatcattggctcgttgatgtacctggctagtgcaactaggcctgatatctcctttgctgtgagcaagttgagccgatttacctctaatccgggagatgatcactggcgtgcgcttgagcgagtaatgcgctatctgaaaggtactgtggaattggggcttcactatactgggtatcctgcggtacaggagggttatagtgattctaactggatctctgatgtggatgagatcaaagccactagtggatatgttttcacactgggtggtggtgctgtttcatggaggtcttgcaaacagaccattttgacgaggtcaaccatggaagcagagctaacggcactggatactgctactgttgaggcagaatggctgcgtgatctattaatggatctgcctgttgttgaaaaaccggtgccggctatccttatgaactgtgacaatcaaacgacatgtgaaaagacgattgaagtctgtcaggaaattaagaaactccggagttataacgttggattacatccaaacagcgagaaacctggcagatcccttcacgaagggactatcacgaaatgtgatagacaatgcatcgaaggagatgggtttgagacccatattaaatcattatatgtctataatctcaacatggaggaggctgaaagagatcgcgagcgagaagcagaaaaaaccaacgatcagatcgattacagagatcgaagaacacacatgcatggccggccgcgagaagtcagtggagaaggagatcgtattatattcgtacgtacctcctga

SEQ ID NO: 18260 - DNA, 210 bp, Oryza sativa
  Clone ID: PAT_MRT4530_23835C.1
tcacttgattgtaatatttacatgaaggttcctgacagaatcgacatcccgaatcaaaggatgtggtacaaccgattaaacgtggagaaagatccattcagaccaaaggaagatggtgaggatgtacttggacctgattttccatatcttagtgctattggtgcacttatgtaccttgcaaatagtacgaggccagatattgctttctcg

SEQ ID NO: 18261 - DNA, 234 bp, Oryza sativa
  Clone ID: PAT_MRT4530_23836C.1
atggcgcggctggccggtgcggccgacggtgaggctggcggttgtcgggcaaggagccgtggtggtcatgtggcgccggtgaaagccttgccccagtttccaggtgaacggcagcgacgattcacgtcgcgtccctgctgtgggtaccgtttggagaaccttttcatgcgcatctctggtcgtggagttggcgttagctctagggatttctacttccacaccaacgctaaatag

SEQ ID NO: 18262 - DNA, 2760 bp, Oryza sativa
  Clone ID: PAT_MRT4530_23837C.1
atgaaatgcttctgggtgagtacaggcaagcctatgggcgttcttaatgttgatcagcagaaagaattcgatgaggccactactctctttgtgggatgcattcttagcgtgcttggcgatcgtctggtcaaggtgtatatgcatatgaccgacgctaaggagttgtgggatgcactgaatactaaattcggtgctacggatgctagcaatgatctgtatatcatggagcagtttcataactacaagatggctgacaaccgttctgtagtcgaacaggctcatgagatacaaaccatggttaaggaactcgaactccttaagtgtgtcttacccgacaaatttgtggtcgggtgcattattgcgaaactacctctatcttggagaggtttcggtactgcactcaaccacaagagacaggaatactctgttgaggggttgatagcgtctcttgatgttgaggagaaagctcgggaaaaagatgccgcgtctaaaggcgatggtggccagtccactgccaatgttgtgcacaaggccctgaacaagagcaaggggaaatacaaagctcaacagaccaccaacttcaagaagaagaacaacaacaacaattctaatcaggatgataggacttgctttgtgtgtggtcaacctggccatctggccaggaagtatccacaacgcaaggggatgaaggcacctgcagggcagacctctaagtctgctaatgtgaccattggcaacactggagatggaagcgggtatggttatgagtgcggaggcctgttccgcttttccctttctgatttctgcaataagtctgtgaaccatatttgtggcagtgtggatgatgaggctaatgtttggcactcacgtttatgtcatattaattttggcttgatgtctcagctttccagcatgtgtttaattcctaagttttccattgtcaaaggttctaagtgccatagttgtgtgcaattgaagcaacctcgcaagcctcacaaggctgccgaggagagaaacttggcaccattagaactcctacattcagatctttgtgaaatgaatggggtgttgacgaagggtggaaaacgatatttcatgacgttgattgatgatgctactagattttgctatgtgaacttgttgaaaacgaaagacgaagctctagactattttaaaatttataaggcagaagttgaaaatcaacttgacagaaagataaaaagggttaggtctgatcgtggtggagagtttttctcaaacgagtttgacttattctatgaggaacatggcatcatacatgagaggacgcctccctattctcccgagtctaatgggattactgaaaggaagaaccgcacactgactgacttggtgaatgccgtgttggacacagtgggactacctaaggcatggtggggggaggcattgttgacctcgaatcatatgctaaatagagttcctaacagaaataagaacaaaacaccatatgagatatggattgggagaaaaccatcactttcttacttgcgcacatgggggtgcttggtgaaagtcaatgtacaaataacgaagaagcgcaaacttggacctaagactgtggactgtgtctttctgggatatgctcatcacagcattgcctatagatttttaatagttaaatctgagtggaaggaggctgtccatagtgaaatggattccattatcgctaacggaacttgggaggtaacagaacgaccctatgggtgtaaacctgtggggtgcaaatgggtgttcaaaaagaagctgaggcctgatggtaccattgaaaagtataaggctcggcttgttgctaagggctatactcagaaagaaggcgaaaatttttttgacacttactcacctgttgctagattgaccacaagtcgtgtgctactttccctagcagcctcacatggtcttctcgttcatcaaatggacgttaagacagcttttcttaatggagagctggatgaggagatctatatggatcagcctgatgggtttgtagttgaaggtcaagaaggcaaggtgtgcaaattgttgaagtctttgtatggtctgaaacaaactcctaagaaatggcatgagaaatttgacaaaacattgacatctgcaggctttgcagtcaatgaggcaaataaatgtgtgtactatcgccatggtgggggtgagggagttattctgtgcttgtatgttgatgacatactgatatttgggacaaaccttgaggtgataaatgaggttaaatcattcttgtctcaaaattttgatatgaaggatttgggagtagctgatgttatcctaaacattaagctaattagaggtgagaatgggattactctcttgcagtcccattatgtggagaagatcttgaatcgctttggctacattgatataatggaaggatatagtgattctaactggatctctgatgtggatgagatcaaagccactagtggatatgtcttcacactaggtggtggtgctgtctcatggaggtcttgcaaacagaccattttgacgaggtcaaccatggaagcagagttgacggcactggatactgctaatgttgaggcagaatggctgcgtgatctattaatggatctccctattgttgaaaaaccagtgccggctatccttatgaacagtgacaatcaaacgacatgtgaaaagacgattgaagtctgtcaggaaattgagaaactccggagttataacattgggttacatccaaacagctag

SEQ ID NO: 18263 - DNA, 324 bp, Oryza sativa
  Clone ID: PAT_MRT4530_23838C.1
atgggatgtaacaccgtcaagaatcaccccaagccgagctccaggcgtggagaacgctcgccttctttcctcagccccgatctagacccgttggctttgttcctccctgtccgatctagtcgttctcgggtcgtcatcgtgtttgttgtgttgccgggcatctccaacgccgtcgctgcttcctggacctctccgacccctttcagctgcacgaccacctctttcatcagcgcggacacctacgtgttcgcatggacctcctctacagtttctctgttgaactcgaccccatccgagcctccgttcgccgccggcaggctctag

SEQ ID NO: 18264 - DNA, 2577 bp, Oryza sativa
  Clone ID: PAT_MRT4530_23839C.1
atgagaccagactactccatcccgctcgccagcgtgcaccggcgatcgggagagcaggtctccggaacctctgccttcgacgtcctgcaccgggagaaggcggcaataaggcactgtgattttactatggctggttttgccgatgcactgaggctggataaattcaccggtgtgcattttaagagatggcagatcagggtcactctgtggctgatagctatgaaatgcttctgggtgagtactggcaaacctgaaggagttcttactgctgaacagcagaagcaattcgaggaagccactactctctttgtgcgatgcattcttagcgttcttggcgatcgtctggtcgaggtgtatatgcatatgaccgacactaaggagttgtggaatgcactgaatactaaattcggtgctactgatgctagcaatgatctgtatatcatggagcagtttcatgactacaagatggctgacaaccgttctgtagtcgaacagactcatgagatacaaacaatggctaaggaactcgaactccttaagtgtgtcttacccgacaaatttgtagccgggtgcattattgcgaaactacctacatcttggagaagtttcggtactgcactcaaacacaagagacaggaatactctgttgaggggttgatagtgtctcttgatgttgaggagaaagctcgggaaaaagatgccgcgtctaagggcgatggtgggcagtccagtgctaatgttgtgcacaaggcccagaacaagagtaaggggaaatacaaagctcagcagaccaccaacttcaagaatcagaagaagaacaacaacaatcttaatcaggatgagaggacttgctttgtgtgtggccaagttagtcatctggctaggaagtgtccacagcgcaaggggatgaaggcatctgcagggcagacttctaagtctgctaatgtgaccattggcaacactagagatggaagcgggtatggtaatttacctactgtcgcacggggttccaccgtcctaatggggaatgggtcacatgcttctgttcatggtgttggcacggtagatctgaagtttacttcgagaaagatcgtgcagctgaagaacgtgcagcatgtcccttctatcgacaggaatcttgttagtggctcccgtctgactagagacggatttaagttggtttttgagtctaataaagtagtcgtgtctaaacatggatattttattggtaaaggttatgagtgcggaggcctgttccgcttttccctttctgatttctgcaataagtctgtgaaccatatttgtggcagtgtggatgatgaggctaatgtttggcactcacactactggaaggaggctgtccgtagtgaaatggattccattatcgctaacgggacttgggaggtgacagagcgaccctatgggtgtaaacctgtggggtgcaagtgggtgttcaagaagaagcttaggcctgatgcctcacatggtcttctcgttcatcaaatggacgttaagacagctttttttaatggagagctggatgaggagatctatatggatcaacctgatgggtttgtagttgaaggtcaagaaggcaaagtgtgcaaattgttgaagtttttgtatggtctgaaacaagctcctaagcaatggcatgagaaatttgacaaaacattgacatctgcaggctttgcagtcaatgaggcagataaatgtgtgtactatcaccatggtgggggtgagggagttagtctgtgcttgtatgttgatgacatactgatatttgggacaaatcttgaagtaataaatgaggttaaatcattcttgtctcaaaattttgatatgaaggatttgggagtagctgatgttatcttaaacattaagctaattagaggtgagaatgggattaccctcttgcagtcccattatgtggagatgatcttgaatcgctttggctacattgatagtaagccttctccaacaccttatgatcctagcttgttgcttcgcaagaacaagagaattgctaggaatcaactggaatattcccaaatcattggctcgcttatgtacctggctagtgcaactaggcctgacatctcctttgctggatatagtgattctaactggatctctgatgtggatgagatcaaagccactagtggatatgttttcacactaggtggtggtgctgcttcgtggagctcttacaaacagaccattttgacgaggtcaacaatgaaaactgagctgacagcattggatactgctactgttaagacagaatggttgcgtgatctattaatggatctacctattgttgaaaaaccggagccggctattcatatgaactgtgacaatcaaatggttgtcaaagtgaacagttctaaggataacatgaaatcgtctagacatgtgaaaagacgattgaagtctgtcaggaaattgagaaactccaaggttataacattgcattacatccaaacagctagaaacctagtagatcccttcacgaagggactatcacgaaatgtgatagacagtgcatcgaaggagattggtttgagacccatgtga

SEQ ID NO: 18265 - DNA, 495 bp, Oryza sativa
  Clone ID: PAT_MRT4530_2383C.1
atgtgggccccacaggagtctgacggagcgtggggctccttaccgggagaccgcgcaggcccccctttgccggttcggccgggggcgctaagtgaggttcttcgccctcgatctgaggaacgtcaacgagaaaagaaatgcgcaagacacgggcgacgtagacaggttcgggccgctgagaagcgtaacaccctactcctgtgttctggtggatctgtgtgtgaaggaatccagagggcggagagtgagagagaagcgcacgcctcctgccccgctcgcccgcttttcccggtggacgcccatttcaaccttcatttaatggccagcgacttccttgccatacttgcgctgaagcctggaacgaatctgaccgggactgacataccaactcctggagttggcacgccggctccggctagggacaagagccaggaagctctcatcattccgacgggacggggcgaggcgtgtgacaggtcgcctattgccacctaa

SEQ ID NO: 18266 - DNA, 767 bp, Oryza sativa
  Clone ID: PAT_MRT4530_23840C.1
ccggccgggcggccgggggactcccttccagagaaataaacgcaaggtgagagcacctcatttcgcccccatcttccttctttctccttgctggccgagagaacttcgtcgtcgccgccgtgtttctgtgaatctccgggaacgcacatctctttttggagccccggagcgcggccggtgtcgtcgcgtcacccaagcttccagtgttcccgacgttccaggccgagatacagggtggtgctgctcattttagttcatcttcctcccagatgtaacaccgtcaagaatcagcccaagccgagctccaggcgtggagaacgctcgccttctttcctcagccccgatctagacacgttggctttgttcctccctgtccggtgagctccagatcctttaccttggccaaaaagactctgcatgcaatgttctagctcattcaagcgtttatttggggtttttatggccagatctagtcgttctcgggtcctcatcgtgttcattgtgttgccgggcatctccaacgccgtcgatgcttcctggacctctccgacccctttcagctgcacggtgagacactgcataccccaagaaccaccgccgctgtagcttgtttttcgcgagctacagaccaccgctgtagctgtagcttgttcatcagcgcggacacctacgtgttcgcatggtcctcctctacagtttctctgttgaactcgaccccatccgagcctccgttcgccgtcggcaagctctagactgagcccagccat

SEQ ID NO: 18267 - DNA, 726 bp, Oryza sativa
  Clone ID: PAT_MRT4530_23841C.1
gttgaaattggtctgcatttggtctcaatggtcagaaattggatctcgtacgtcaccattattttgttttgctgcaggaaaattcggatttgttttgttgttggaaacattccggaaaatccggtgcgtgaaaacggcatggagtccggattagttacgcacgacttatccggttcggtgtggagtccggatcagttacgcacgacttatccggttcggttacgcggagtggagattgtgcgggcgccctgatcaagcgacctatctctatataaaccgagccgctgccttcacgcaacacacgcgaaatcaatctagggtttgcctcctcctctgtgctgcgccgtcgctcataggctactccatcccgcttgcaggcgtgcacctgcgatcggaagagcaggtttccggaacctctgccttcgacgtcctgcaccgggagaagcggcagtaaggtttttgggaagcgcttcacgcgactgctccctgtttgtccgcgacggctcgccttcctcttcgttcgcgtgctgcgcgccttcgtcgacgctcgcaaccgcgagtagttcctgccgagcaaccggtctttccgccaccttgccccctccctctcctctccccgctgcccattcggcctcctccccgcgcgcgcgccgctgacgggcgggcccgcccgcctccctcgctgacgggtggggcccacccgtcatccccttcatcccgccgctc

SEQ ID NO: 18268 - DNA, 1428 bp, Oryza sativa
  Clone ID: PAT_MRT4530_23842C.1
atggcgttccatgtcttcctcatcgctgcgctgctgttgctgcctctccccgccgccttctccaaggccgtgcgcacccaatcccttctcgccaacccgctctccccggatcctatcactcaggagcagcagctcagcctcgccgcgccccgcaccaacgcctccacgctccacttccgcctcgcccaccgcgagcacttcgcgctcaacgccaccgcctccgatctgctcgcgcacctcctcgcccgggacgccgcgcgcgccgccgccctgcttgctgcacccaacaatgccacgcgcccgcgccgccgcggcggcttcgcggcgcccctgctgtccggcctcccgcaggggagcggggagtacttcgcccaggtcggggtcggcacgcccgccaccaccgcgctcatggtgctcgacaccggcagcgacgtcgtctggctccagtgcgcgccctgccgccactgctacgcgcagtccggcagggtcttcgacccgcgccgctcccgctcctacgccgcggtggactgcgtcgcgcccatctgccgccgcctcgattccgccggctgcgacaggcgccgcaactcctgcctctaccaggtagcctacggcgacggctctgtcaccgccggggacttcgcctccgagacgctcaccttcgcgcggggcgcccgcgtgcagcgggtggccatcgggtgcgaccacgacaacgaggggctcttcatcgccgcgtcgggactcctcggcctcggccgtggcaggctgtcgttcccctcccagatcgcccgcagcttcggccggagcttctcctactgcctcgtggaccggacctcgtcggtgaggccctcctccacccgctcctccaccgtaacgttcggcgccggcgcggtggcggcagcggcgggcgcgtccttcacgccgatggggaggaaccccaggatggcgacgttctactacgtgcacctcctgggcttcagcgtgggcggcgcgcgcgtgaagggcgtgtcccagtccgacctccggctgaacccgaccaccgggcgcggcggcgtcatcctggactccggcacgtcggtgacacggcttgccaggcccgtgtacgaggccgtgcgcgacgcgttccgcgcggcggcggtggggctccgtgtgtcgccgggcgggttctcgctgttcgacacgtgctacaacctgagcgggcggagggtggtgaaggtgccgacggtgtcgatgcacctggcgggcggcgcgtcggtggcgctgccgccggagaactacctgatcccggtggacacgagcgggacgttctgcttcgcgatggcgggaacggacggcggcgtctccatcatcggcaacatacagcagcaggggttccgggtggtgttcgacggcgacgcccagcgcgtaggcttcgtgccaaagagctgttaa

SEQ ID NO: 18269 - DNA, 604 bp, Oryza sativa
  Clone ID: PAT_MRT4530_23843C.1
tacgcgtcgaatggtcctccaaaaattggttcctcatcttgcgcagatgcagtttccttttgcagttttgttttgctgcaaattcggattcgtttttgttttggaaacgttccgaaaaatctagtgcgtgaaaacggcatggagtccggataagttacgcgcgatttatccggttcggttacgcgcagtggagatcgtgcgggcgccctgatcaagcgacccttctctatataaaccgacctaccgtcttcacgcaacacacgaaaaatcaatctagggtttgcctcctactctgtgctgcaccgtcgctcgtaaattactccatcccgctcgccggcgtgcaccggcgatcaggagagcaggtctccggaacctctgccttcgacgtcctgcaccgggagaaggcggcaataaggtttttgggaagcgcttagcgcgactgctccctgttcgtctgcgacggcttgtcttcctcttcgctcgcgtgctgcgcgccttcgtaaacgcctgcaatcgcaaaaagttcctgccgagcagcctgtctttctaccacctcggtacgtgttcaatcaaataacatgcgaagtaaatcaagggaataaaa

SEQ ID NO: 18270 - DNA, 1494 bp, Oryza sativa
  Clone ID: PAT_MRT4530_23845C.1
atggcaacttatctaatgtatcctgggactggtactatatcacagcagaatgaaacaagacagaaacgttacaaggaaatgagcatcgatggagtcacagaagaattttcaggggattaccaaacccaaattgacatcaatcttctcgccgaccaactagaggcaaaactatgcgacgttcctttggacgacggcggccggcgacacggctcgccggagtgccacatttccatcgtgaagccgcaagtccgcctcgtcgacgtatcgcagtacgctccgcaggtgctgctcgtcggcgcctaccaccacaggtcgctggaccggtgtgagctggacaagctggcggcgctccggcgtgccctccccgacggcgacgacgagcgggcgtccacgctgaggcgctacctggcggccatcgccggcctcgaaagcgaggcgcggagctactaccgcgatgacacggatgacatgggcgcggaggagtttgcgttgatgctgctgctcgacgggtggtacatactccactacttcggcgtcggcgtcggcggcggcgggagagcggtggacatcttcgccgtgcgcgacgtgttctacctgctcgagaaccagatacccttcttcatcctcgagaaggtctacgagctgatccactctccccctccttctccgggagctacagccatcgccggcggcgggtcgtcgtcttcctccgtcgtggttgtcgatgggttcgtgcgccatctccggtcactcctccgagaccagggctactcgaatctggaggtggacatcaccagcacacgcccctgtcacctcgtccacttactccacatgcacttcacacccatggcgatggcgccggccgccgacgacgctgccgctgtccccatccccaccaggcgcgcgcgcgccaccgtgtaccgctggcgcggggcgacgcagtaccacgccgccggcgtgaggttcaagagacgggccctcggcctcggcgacgcacggtgcgtcctcgacgtggagctccggcggctgacgctgcacgtcccgacgctgacggtggacaacaacacgtggcgggtcctgcgcaacctgatggcgctggagcagaacaacccaaacctgggcagccacgtcacggcctactgcctcttcatgtcgcatctcgccggcacggcgaacgacgtcgcgctcctggcgagcaaaggcgtcgtcgtgcacttcatggggtgcgacgaggacgtcgctaagggattcgccggcctgtgcaggggcgtggcgctcagcgtcgacgacgcgcgccagaactacctgcagccgacgtgggagaagatggagcggcggtacagcagccggccagtcaactggatggcgctgctgcggcggcggcatttgagcaacccgctggtggcgaccgcgctgctcgccgccattgttggcctagtctgtgaagttcttcaggctgtgtatgccgtcaagagctacaagactagaagctaa

SEQ ID NO: 18271 - DNA, 531 bp, Oryza sativa
  Clone ID: PAT_MRT4530_23846C.1
atggagaaactgtgtgaacataaactcaccttgccagaacttgtctctggcgtccggcggtggaggcagtgctacgcccagcggcggcggcggcagcggcgcgacgcggcatattcggcatccgacgatacacccggcttccgtcaacggcagcgctgcgctcggcttccatcgacggcggcggcgctgcgtgcaacttccatcgatggcgccgcggccgaccccccatctgcagcaagcgacatcctccggctccgcttcctcgtcgacgccggggccgaagccgaccctgtgtaccctcgcatccttccattgcacctcgcttggatccctcccgcacacatctccggcatgttgcttgtggaactagggctggaggatcagatcgggatgaggaagatgaattggaggggatgcaggcgtcatccggtcgccggcgcaagtgaggcggcacagaaggcggcgctgctcctccgtgagactttggaagtcacgggagcactgcccagccgtgtgaatggaatagattag

SEQ ID NO: 18272 - DNA, 617 bp, Oryza sativa
  Clone ID: PAT_MRT4530_23847C.1
atggaggaggatatatgccaaggggaaaccatagccgagaggaagtcgttgccaccagatccatgccatcgtcacccgccgccatcggattcgcgccgccgcaacccactgtcgccggatccacgcccccgtgactcgtcgccgccggatccgtgcccccgtgacctgctgctgccgaatctgcaccctcacgacccacgatcgctagatccggaccgagccacccctgccctccagccaaatctaggagggaggggagagccgggccaccgtagcttctccctacagtgcgaccgtctcgtcgtcgtggtcgcgtcctggacggaagcacaccgccgcctcccctccggtgctgccgacctccactacgtggctctccttgcctccgccaagcatggccaagtcgtgctgccgctgccgccgagcgccgccatcattgaccgccgccgctgcaccccttcgctgctactagctagagagagagagataaagaaagaaagaaagaaagaaagaaagagagaagggttggatctgaggggtcgaggaaaaaaagagggagcacgtgatgtttattccctcccacgatttttgcaagcgaggctcccaacaccccgcca

SEQ ID NO: 18273 - DNA, 1210 bp, Oryza sativa
  Clone ID: PAT_MRT4530_23848C.1
catcaatcgatcatggccggagttgtgaggtcggcggcgtgcagcggcggcgagggggagcggaagacgtcgtggccggaggtggtggggctgtcggcggaggaggcgaagaaggtgatcctcaaggacatgcccgacgccgacatcgtcgtgcttccggcggggtcgccggtgaccctcgacttccgctccaaccgcgtccgcatcttcgttgacaccgtcgccggcacccccaccatcggctagcctccctcatctgccttccttcagcgcccgggcccccggccatctttatcttaattaaataatgatcacatgcacgcaagtgatatgtactgtgtgcatgtttcgatcgatccatccccatctgaataatgttttaccgtcaatgtttttttcctatgaataaatatggaagaatcttctcccatcgaaaaaaaaaaaaaaaaaaaaaaaaaaaaaaaaaaaaaaacaaaaaataaaaaaaataaaaaaaaaaaaaaaagaacaataaacacaccctttggggaaaaaaaaaaaaaaacacaaacaaaccccctcggggggggggcccgggccccaatttgcgcctaaaaggagggggtttattgcgccccccccatgggccccggtatttaaacaggccaggtgcggtgaaaaccctcgggcggtcccccatctagaaagctttctgtgaatatacccccctgtagcaaataggagaattgagatcagatatggccacgagcaccttagtgtcttagacatataggtgggggacacgatcgatagcatgcagtgagcacccgcgcatgtaaagtcaccaggttactaccttgttaaagtattatgtaacacaacatttcacgacgggcgtcggaagctgacgcttggcatgggtcatctcagtctccatgtctgtccccgcttgtgttggaagtattctctaaagtacatagagctctgacattatatcttgacgctggcataagatctcgtcttctccgcagtcaggacgtaggatagcgatgagtacatagttcagtagaggttcgatagtgtagatctagagggtcactcctgatgcttacgctcgctcatgaggagccctgtggtcgcccgttgctctatcttagtcgtgtgttgtcagtattcatacgtgttgatttaggtatgtgatattactttataatatatggttcctcttata

SEQ ID NO: 18274 - DNA, 1537 bp, Oryza sativa
  Clone ID: PAT_MRT4530_23849C.1
atggaggaggatatatgccaaggggaagccatagccgggaggaagtcgttgctgccagatccccaccatcgtcacctgccgccatcggattcgcgccaccgtgacccgctgtcgccggatccatgcccccgtgactcgtcgccgtcggatccatgcccccgtgactcgctgctgccagatctgcaccgtcacgacctgccgtcgccagatccggaccgagccaccccctcccctccaaccaaatctaggagggggaggggagagccaggccaccgcaactgctctgatccctacattgatcgtgtccggaggtgtgagaggtcggcgatgagctccggcggcaagcaggacggtgcggcggcggcgggcgaggaggagcggaagacgtcgtggccggaggtggtggggctgccggtggaggaggcgaagaaggtgatcctcaaggacatgcccgacgccgacatcgtcgtgcttccggcggggtcgccggccgaggaccaccgctgcctgatctacctccttcaccgcccctcatcttcgccgccgtggaggcggatccagtggtatcgaacaccaccccagtcagatctatcccctacactatcgccacccgtctcctttgccgctatggaggaggatatatgccaaggggaaaccatagccgagaggaagtcgttgccaccagatccatgccatcgtcacccgccgccatcggattcgcgccgccgcaacccactgtcgccggatccacgcccccgtgactcgtcgccgccggatccgtgcccccgtgacctgctgctgccgaatctgcaccctcacgacccacgatcgctagatccggaccgagccacccctgccctccagccaaatctaggagggaggggagagccgggccaccgtagcttctccctgcagcgcgaccgtctcgttgtcgcggccgcgtacgggacagaaccacaccaccgcctcccctccgctgccgccgacctccactacgtggctctccttgccgcccccaagcatggccaacatcttaagagcaccgcctgcaaaaatacctctatttttgtcggcggccctcttaacccggccgccaacgaagatccattttcgctgccgacccttgttaaaatttcgctggttgttttcaccggcggcgagggggagcggaagacgtcgtggccggaggtggtggggctgtcggcggaggaggcgaagaaggtgatcctcaaggacatgcccgacgccgacatcgtcgtgcttccggcggggtcgccggtgaccctcgacttccgctccaaccgcgtccgcatcttcgttgacaccgtcgccggcacccccaccatcggctagcctcgctcatctgcctgcagccttcagcatccttcgtatcttaattaaataatcacatgcacgcaagtgatatgtactctgcatgtttcgatcgatccatccccatctaaataatgttttaccatacgtacgtactacgtgttaatgctttttcctacgaataaataaagagaccttcatttaa

SEQ ID NO: 18275 - DNA, 3612 bp, Oryza sativa
  Clone ID: PAT_MRT4530_2384C.1
atgagtgccgcggcgaccaccggcggcggcggcgagcggcggagcctccgtggcatgttcaagttcgcggaccgggtggacgtgctgctcatggcgctgggcacgctgggtgccatcggcgacgggtgctcgaccaacctgctcctcatcttcgccagcgacgtgatgaactcgctcgggtacgcgcgcgccggcgcccacggcggcgccgccgccgccaccggcgtggacttcatgcgcgaggtcgagaagtcttgcctgaatttcgtgtacctggcgttcgcggtgctggcagtggcgtttatggaggggtattgctggagcaggacgagcgagaggcaggtgctgaggatcaggtacctgtacctgcaggccatactgcggcaggaggtgggcttcttcgactcgcaggaggccaccacctcggagatcatcaacagcatctccaaggacgcctcgctcattcaggaagttctcagtgagaaggttccactctttctgatgcactctacagttttcatctctgggctggcattctccacatatttctcctggaggctggctctggtttcttttcctctggtcctgctcctgataattccagggctcatctacggcaagtatctcctgtacctctcccgacaatcgcgccacgagtacacaaacgcaaactcgttggttgagcaagctcttggctctatcaagactgtctactctttcactgctgagaaaaggataatccagagatacacagcagttcttgacaagacgatcaagctggggattagacaaggtattgcgaaaggtttggctgtcggattcacgggcctttccttcgccatctgggctttcctcgcttggtacggcagtagactggtgatgtaccatcatgaaagcggaggaaggatatatgctgcagggatttccttcgttttaggcggcctatcccttggaatggcactccctgaactgaagcatttcacagaagcgtcggttgctgccacaagaattctcgatcggataaaccgtgtgccagagataaatgctgatgaccccaagggacttattttggatcaagtccggggagagcttcagtttgagtctgtccgctttgtttacccatcgaggcctaacatgacggtcctcaaagacttcaacctccagattcctgctgggcaaactgttgccttggttggatccagtggcagcggcaagtcaaccgcaatagcattggttcaacggttctatgatgccactgaaggaactgtcaaggttgacggtgtcaacattaaagaactccagctcaagtggatcaggagcaagatggggcttgtcagccaagatcatgcactcttcggtacatccataaaagagaacatcttgtttggcaaaccagatgcaacaatggatgaactgtatgcagcagccatgacagcaaatgctcacaacttcataagggggcttcctgaggaatatgagactaagattggcgagcgtggagcactgctatctggtggccagaagcaacgtattgccattgcacgggcagtcatcaagaacccggctatacttttgctcgatgaagccacaagtgcacttgattcagaatcagaaaagctggtgcagcatgcacttgaccaagcatctatgggaagaacaacactggtagtagctcataagctttccacagtgaagaatgccgatcagattgcagtggttgatgggggcactatagctgaaattggcacacacgatgaactgattaataagggtggcccatattcacgacttgtgaaactgcagaagatgggcctcttcagtggcaaggaccagtaccagccgtctcagtatgtccagagcaagtccaatgccacttacaccaggcttcttgcgatgaatgcaccagagtggagacaagcagtcataggaagtctctctgctttggtatatggttccttgcagcccatctatgctataaccatcggaggaatgattgctgcattttttgttcaagatctcaaagagatgaatgcaattatcagccgctatgccttgattttctgctcattgtcggtgatatccattgttgttaatctacttcaacattacaattttgcttacatgggagagcatctagtaaggcgtatcagagtccaagtacttgaaaagatcttaacctttgaggcagcatggtttgatgaagaaactaattcaagtggttcactgtgctctcggcttagcaatgaggcttctcttgtcaaaacccttgttgcagatagaatttccctactgcttcagacagcttctggaattataattgcagtgacaatgggccttatagtagcttggaaacttgctcttgtcatgatcgctgtacagccaactacgatgatatgctactatgccaaaaagatagttctctcaaatgtgtcaagggacttagcaaaggctcagcaccaaagtactcagattgctatagaagctgtttacaaccacaggatggtgacctcttttggatgctcatcaaaggttcttcagctctttgagcatacacaagaggaaccactgaagagagcaaggaagaaatcatgggtggccgggatcaccactggactgtcaccttgcctttcattcttgtcatgggctcttgacttctggtatggtgggaaattggcacaatctggggagatctccgcaggtgatgtcttcaaaacattttttgtcttggtgagtacaggaaagttgattgctgatgctggcagcatgacatccgacctggctaagggagcaaatgcagttgcttcagtgtttgaggtgctagacaggaaatctatctctccacaaaattcacaggtggaaaaggacaatcagaagaacaaaatacaaggaaggatagagttcaaaagggtagattttgcatatccgacaagaccacaatgccttatcctgcaggattttagcttggatgtgaaagcaggaacaagtattggtcttgttgggagaagcggctgtggaaaatctaccatcattggtttgatccagaggttctatgatgttgacagaggggctgtaaaggttgatggtatggatgtgagggagatggatatcctttggtatcgaggatttacagcccttgttagccaggagcctgcaatattttctggtagtgtcagggacaacattgcttttggtaaaccagaagctgatgaagacgagatcgtggaagctgctaaagctgcaaatgcacatgaattcatatcatctctaaaggacggatatcatactgactgtggtgagcatggattacaactatcaggagggcaaaagcaacgaattgcaattgcgagggcaataatccggaatccagcaatacttctacttgacgaagcaacaagtgctctcgatgcacagtcagagcaagttgtgcaggaagcccttgatagaatcatgtcaggaaggactacaattgtggtggcacatcgactgaacacaatcaagaatgtagattcgattgccttcttaggagagggtaaggtagtggaacgtggtacttatccacacctcatgagtaagaaaggagcattctacaacctagcggctcttcagaaataa

SEQ ID NO: 18276 - DNA, 456 bp, Oryza sativa
  Clone ID: PAT_MRT4530_23850C.1
tagcattgacagtgcccgatccttaacccactgtaccattagggaactcttaagatcttattttttacctaaagtacactgaaggtaaggggtgggtcaggaaattctgatgtaggatgtggtacaatcttggcttaattaaggtgtaggtagcaatgtaatataatgccagatattacatataataagccagctggttctacataatgtataccccacattgagtatctaaactcttgggctttttttacagaatccagccctaaccctaaaaactgacattatcttccctgaacctgactatggcagttttaaacatagcttccaaaatctttttcacttctgccttctagaggtagagcctctgtcctttccttgaatctaggttctccgaccattaggatatagcttaagtgatgctggaataatttccaagctcaagtcttaagaaactgg

SEQ ID NO: 18277 - DNA, 310 bp, Oryza sativa
  unsure (1)..(310): unsure at all n locations
  Clone ID: PAT_MRT4530_23851C.1
acattgggggacaaaaaagggccttggaaaggtgcccctcaaacggggggcaaaaatatggccaagggatgggattttgggtactaaaaaccaaaaccagggttgaaccatggggggggggggnggggacccaaaaccaccccctggatccccccagggttttttgggccaaaaacccccccctcgtcataatgatgatccgcacaacaccaacaaatgggggagagataaagaggagggaaggaccttaacaaactccccactggcttcctttccttcttttctcctggggaatcttttttggggccca

SEQ ID NO: 18278 - DNA, 703 bp, Oryza sativa
  Clone ID: PAT_MRT4530_23852C.1
cacgaaattcttaattgaactggatttccccctcattccagtagtcaaatgctcacctttggagatgccatctattcctgagactttaaatggtgcatccgtcagtaatgtgctgaaaactgtttctgattctgccaccgatctcattgtggagcttaattcaagtgaggaagttgttaatgtccgaccaaacatttctgaattagtccaatctgctggaagaggggttgctgtaacagggccagctcctgttggatctagctatgatttttcagtcgtttcttctgcccaaaatatggattgaatgaggatcctgtatgtggtagtgtgcactgtgccttggctccttactggggcaagaagctaggtaaacaatgcatgactgcctccatggcttccccaaggagtggaacgctttatctgcaatgggatgaggcggcccagagggttcaaattcgcggagaagctgttactgtcatggttgggaacattctagtctagaaaatacttctgattattgaacaactgccatcaaatcaacgaataattttggcagctttggtctgaagtttgaaactttgatcctgaatccgtacttaatgcttgtaatcactggagtacatgtcatgtaaacgtaaattcgtaaattgcaaaacttgtttgcaaaaaagaaaatgtcaaaacattagttttttaagagact

SEQ ID NO: 18279 - DNA, 689 bp, Oryza sativa
  unsure (1)..(689): unsure at all n locations
  Clone ID: PAT_MRT4530_23853C.1
atggagatagcagctttttttacaccggcgaccgcagcggcagaggcggttgtcgcgatcactaggaactgggttttttacttctgcatgcgtaccattgtcttcgctggagggttgcttgcgctttttattggctatgttatggctgcctattccaagacctggcttgatagcctgtcgttactgccccttctatttgcagctgtcatcctacctgtgtatgctgcagtggctatccaggatgcacgacgcttggagagagagagggtggtttggatagtgcgcaaggcactcgagattgagggcctgtaagagcggcctgtcttggtttagagagaaagaaccaagattagacacacagaacaacgagttttttgtcccatggttgtttcttggacagcgtggatcagtggacacctttagcttgtagggaagtagactaaggttggcaggaaattactccactagaacacctgggggaccagatggaacttacagggttttcttgctgtgaccttgtacacgcatgtaatgtaccaatgatgctcggatgatccatggtggntctgagatagttcagtccaaactgccaagaccataacctgctgataataactttgtgaaaanggatcttgttgtcgaccgggtatgtccctcaccccgtaaaaaatnaccgccaaaaaaaaaaa

SEQ ID NO: 18280 - DNA, 697 bp, Oryza sativa
  Clone ID: PAT_MRT4530_23854C.1
tccccgggctgcaggactcggcagtaggatcgagaaccaccacgcggctctccaccactccgccgagctcccgtcgacgccctccgacgacgacgagaacgcggatgaggacgactacgatggacgcagggcgggtgcgccgccgccgccgctgttgaagtcccaccaccagcccatggtcaccttcgcggagaccagcggctccctcctccaatcctcggaagacgacgacgacgacgaggaggatgaggaggaagacgaggaatacggcgaggacgccatgcccgtgcgatcgagcggctccctctcccccgcgcactggaggggagcctccaaatcccgtggttgcttcagatgcgggaaagggggcagcttctgggcccgcggggacaaggaggcttgcctcgcctgcggcgcgcggtactgcggtggttgcttgctccgggcgatggggtccatgccggaggggcgcaagtgcctggactgcatagggcggccggtggccgagtcaaagcgggattcgctggggagaggctcacgtgtgctgcggcggctgctcagcgccacggaggtggagcttgtcatgaggagcgagcgggaatgcgccgccaaccagctgcgaccggaggacgtgtatgcgaatggcaccaagctgtcgccggaggagctcgtcatgctgcaggggtgccagtgcccc

SEQ ID NO: 18281 - DNA, 1533 bp, Oryza sativa
  Clone ID: PAT_MRT4530_23855C.1
atggcagcagatgatgacgcggagcacgagacgtcgccggcgtcggcgtcggcgtcgagcgctccagccacgaggaagcggaagaggccgggagccaccgccaccgatggcgcgcctgctcaatctgctgacgatgcaggcggcatgtgcgacgacgtcctccgcaacatcttctcccgcctgccggcgcgcgccgccgtcgcgtgcacggcgctgtcgaagcaccaccgccgcctggtgaccggcgcggagttccggcgcctccacctcctcctcggcgcgcccctcccccgcccgcacgtcgcgtacctcgcgacggcgccgataacgaggagaggggacgacagggtggtcagcaagttccacggcttccacgtcgccggcgccgggatggggatcggcgcccacgccccgatgcgcgcgctcaccgacgggagatacgagaacaagagctatgtcaacacatgcaacggcgtcatactcctcgccatgaagaagaagaccccttctcgatcattcatcctctggaacccggccatcgccgacgacgagaagaaactgaccatccctgaaggtttacaggataatggggagtattatgtagctggacttggctatggtcgcaggagcaaaacctacaagctactcttgtgccgcctcaagtgcttgagcagcaaaggaccaggaggctgccgtatattctaccgttgtgcagagttggtggtctacacgctcggcgccggcgccggcgccggtgaccaaccacggacggtgctgtccggcctggacacgaagatcaaacgtcagtcactctacctggacggcacgatctaccttctcgacgccgaggactccatcgtcttcgccttcgacgtcgacgacgagacggtcaccgccatcgacttgccgggagagcgctccataaccaagcacgccagctcgaagctcatggagatgtccggccgcgtgtgcgtcgtgacgaaggacgggacgcacaccttctccgtgtggctgctcgtggcggaggacgatcaccggtggcagcggaggtgcgcgatcggggagagcaacatctactacaggtcgatcaccgccgcctgggaccacggcgatgcgctgctcctgctggtcgacggctcgccgtacctgtacgacatcacagacgagaggatgacgaagacggagatgccgatcgacgtgaagccggaggaggcagcctacacgctgtgctggggttacaagccgacgctcgtgtcgccggggagcatcgtcggcgacggcgacggcgacgaagaggaggggcggaggcgccgcggccgggatcggacggcggacatagttgccgccgtgaggcccgtccgcgagcgcgacgtccggagagggaggaaggcgacgttggacgtgacgtgtttcatggagatgctggtccgcatcatgcgggagctgcctggcggcatgcaggacgtgatcgacatgccgttgctgaacgcctctctgaacgttaggtatcggtattctgatgatgaggactga

SEQ ID NO: 18282 - DNA, 292 bp, Oryza sativa
  Clone ID: PAT_MRT4530_23856C.1
gaagcaggtcggcatgagcgacggtgagtgcgtgatatgaaatgaagatcagtttgacatgtacagcgcgtaggatgaggatcaaaacccagggttaatttgcagtaggcacttggcctgagtgttagtgtggtaatgttctgccttattgatggtacagtggtaccaagagcatgtcatgtagtttgttactctgtgcttagtgctcacattttttatgataaaaaaaaaaaaaaaaaaaaaaaaaaaaaaaaaaaaaaaaaaaaaaaaaaaaaaaaaaaaaaaaaaaaaa

SEQ ID NO: 18283 - DNA, 480 bp, Oryza sativa
  unsure (1)..(480): unsure at all n locations
  Clone ID: PAT_MRT4530_23857C.1
gctccgccgccgccgccgcctcttgctactgcctccctccctccgccgcatactcccctcgccctccgaccactccccctcctctactcccccgtctcctcctcgccacttcgccaccccgccgccttcgccgatcccctcacccatcccgccgcgagctgagcagaggagccgtgggtttccgtcgtcctgctgcttccgcctccgtgatcgagtggtgcgttctcatcaacgggccttgtgcgctaaattatgcgatcttcatgggctgactcagctgcgaacgccgaggaatcggcgcccgcggctgctgctaaccacggcaactcgcgcctcccgcgcagctcatacgttcccccgcacctccgcggccaagcggctcctgcagcgccggcgcaagctggcgcgctgccctcggccgccgncgncgcgcagccttctgttggccagctggtgtggttgggtggccctcgctgggcg

SEQ ID NO: 18284 - DNA, 516 bp, Oryza sativa
  Clone ID: PAT_MRT4530_23858C.1
gggaaggaaaaaaaagccctaaaattttgggttaatttatttgggacaaaacccggccggggttggcccaaaaagaacccccaggtggttaaaactaaaagggttccccgttttttttttttttacaaaaaaaaaaaaatccttttgggtcaaaaaaaggggtaaaaaaaggccatttaagcctttttaaggggacccctttcaaaattaggggttcaggccaaacatggggtatataaaaacccgcacatactataaggacagggggccgggaagtttttaattggagctggggggacaaaaggggaaatccaaaattttttttatggggacccttaagttaaagcttttgaaacggacgggggttgggaaaaaaaaaaaacccgctaagggaaccgtcgctacatgaaagggggactttgtaaaaacccgtttgggggaacccacaggccacttcaaaattgacaaagggcgggtttttccatttaaagaaaatggaaccataggggggggggg

SEQ ID NO: 18285 - DNA, 1367 bp, Oryza sativa
  Clone ID: PAT_MRT4530_23859C.1
ggatccccgggctgcaggaattcggcacgaggctcagctaagctctccaccattgcttgcaaagctggtcgtgtcactcctcccgttaagcttcccgcggcggcgagagcaagctaagctaggtcgggcatggggaaggacgaggtgatggagagcggcggcgccgccggcgagttcgcggccaaggactacacggacccgccgccggcgccgctgatcgacgcggcggagctggggtcgtggtcgctgtaccgcgccgtcatcgccgagttcatcgccacgctgctgttcctgtacatcaccgtggccacggtgatcgggtacaagcaccagacggacgcgtcggcctccggcgccgacgcggcgtgcggcggcgtgggcgtgctcggcatcgcgtgggcgttcggcggcatgatcttcatcctggtctactgcaccgccggcatctccggcgggcacatcaacccggcggtgacgttcgggctcttcctggcgcgcaaggtgtccctggtccgcgccatcctctacatcgtggcgcagtgcctcggcgccatctgcggcgtcggcctcgtcaaggcgttccagagcgcctacttcaacaggtacggcggcggcgccaacaccctcgccgccggctactccaagggcaccggcctcgccgccgagatcatcggcaccttcgtgctcgtctacaccgtcttctccgccaccgaccccaagcgcaacgcccgcgactcacatgtcccggtcttggcgccgctgccaatcggcttcgccgtgttcatggtccacctggcgacgatcccgatcaccggcaccggcatcaacccggccaggagcatcggagcggccgtcatcttcaacaacgagaaggcgtggcacaaccattggatcttctgggtcggcccgttcgtcggcgccgccatcgcggcgttctaccaccagtacatcctccgggccggcgccatcaaggccctcggctccttcaggagcaacgcgtgatatcaaggggttcgagaagccattgttgggggataatggctggaaggcgttgatgaagcaatggccatgatgatcgatgatgagttctaccgtgttaagattctcccttttcaaaaaaaattaagttcgccgctggtcgttttgtttcagcagctgctcctcctcctgcttgtcgtgtgtgtgaagtgaacatccatgtgtttgtaatctgttttaaatcgagggatgtctcatgtgtttagcctgtactcccatttaatttagcgacgataagcatcgatgcccgcctctcctatctggaatatatcaatcagttttatcaagtggttcgccgtaattgaaaaaaaaaaaaaaaaaaaacaaaa

SEQ ID NO: 18286 - DNA, 1065 bp, Oryza sativa
  Clone ID: PAT_MRT4530_2385C.1
tctcggcaggtacaccatctcttcattccgtattccttgtagagatccaccaaccgttctcgaatgatcgagaaggcgcagagcatggtcgtttgtctctacatgatccgataaggccttatccgctttgggcgtccccagccgaagttcccttaagttcctcagaggccttgtcaggacggcgtaaagggacatgaggataggtttcagctctaggtgtcgttgtggtaagggatctctgggaaaaacacttggtgatattatgtacctgatatcaactttggagtagaggtaatgggaggatcgttgtaccgctggtcaaaaaccagttgtagccccaacccgaccacttgaagtaaaggtagtgggagaatcgctacaccactggtcgagaaccaggtagtagtcgtaactcgaccacttgaagtggaaaatagcgggagaattgctatatctctgatcaaggaccaggtagtagccttaactcgaccactagaagtaaatgtacgagagatcgctacaattgactggttgagaaccagtgagtaggtgtctctcgaccattgttcgagaactagtgagtagaattatctctcgaacaccaattgaagtgcggtgcatgagattgcgcttttactggttcgagaaccatcgagtagaattatctctcgaacaccaatggaagtgccaaagttggtttattacataaccattttctcaaacagcccagccatagccggtgctatgagataggtcgccggtcttggttggtaggttgggcgcgacgactctgcatttgtcgagatcgttctcgataatggggtgtactcgaccacaacttactcgagtgctcaattgttccttgttgcgtactcgttcgatatcatgtgatctgacatcttttggtacaccgcggagcttgaggctcgaatgatctcgatagatcaagttgttgacgacgatggttccgatcttgtcggaggatatattccggtcgggtttgatctccccacagccgaagtcgtcgagtagcttgttgttggagaatccatctcttaaacccat

SEQ ID NO: 18287 - DNA, 132 bp, Oryza sativa
  Clone ID: PAT_MRT4530_23860C.1
ggctatggatgtcctggactttctgggacagctcacgccattcgttcacggcacctcctcctggcgcaccagctccggatccagctcctgtcggcggcggcgtaccaccagctcctgtcggcgggccagtag

SEQ ID NO: 18288 - DNA, 4486 bp, Oryza sativa
  Clone ID: PAT_MRT4530_23861C.1
tcagccctcctcttcttcctcctctccccatctccctctctcttcaactctctcccctctcctctctcgcgacgcgcgcgacggcagaggctcggctccggcggctatggacggaagaggtagggggcggcgggaggtggacctagctgcggcgaccggcggagaggaactgggcgtcagcagcggaagcggagtctcgaaggctggcccccaggcgatgcggaatcgacagcgggagctgcgggaagacggcagccgctgtggccgcccgcgcatggaggagaggtgggagccagagagcgcgagctcctcctcttccgcgacgccaccggcctcaatgctcgatctcaccctcctcgcggcgttagagctccgtctaatattcttgtcgagatccggccagagtagcaccaagcccacgaggccaagctggccatcgtcccgccacagctcgatgagacgatggtgctcctcgattggtgagctcgagccggcggccagatgcagagcggaagaggacgcagagcacgtgctacgacaagtccgcccggcggccggctgtgtccggtgttctgtgttcatgtgcgctcctccatgggggaagccgccccgatctaatgatgcgttcatgctagttttcatctgtaatgtcatgatttatttatggaataaattaaatccttatatgcccataatctcaacaatccaaaaaccttattataggcactgtgattttactatggctggttttgccgatgcactgaggccggataaattcaccggtgtgcattttaagagatggcagatcagggtcactctgtggctgacagctatgaaatgcttctgggtgagtactggcaaacctgaaggagttcttactgctgaacagcagaagcaattcgaggaagccactactctctttgtgggatgcattcttagcgttcttggtgatcgtctggtcgaggtgtatatgcatatgaccgacgctaaggagttgtgggatgcactgaatactaaattcggtgctactgatgctagcaatgatctgtatatcatggagcagtttcatgactacaaaatggctgacaaccgttctgtagtcgaacaggctcatgagatacaaaccatggctaaggaactcgaactccttaagtgtgtcttacccaacaaatttgtggccgggtgcattattgcaaaacttcctccatcttggaggagtttcggtactgcactcaaacacaagagacaggaatactccgttgaggggttgattgcgtctcttgatgttgaggagaaagctcgggaaaaagatgccgcgtctaagggcgatggtgggcagtccagtgccaatgttgtgcacaaggcccagaacaagagcaaggggaaatacaaagctcagcagaccaccaacttcaagaagcagaagaagaacaacaacaatcctaatcaggatgagaggacttgctttgtgtgtggccaagttggtcatctggctaggaagtgtccacaacgcaaggggatgaaggcacctgcagggcagacttctaagtctgctaatgtgaccattggcaacactggagatggaagcgggtatggtaatttacctactgttttttcagttaatcaatctactaattggtgggttgatactggggccaatgtcgcacggggttccaccgtcctaatggggaatgggtcacatgcttctgttcatggtgttggcacggtagatctgaagtttacttcgggaaagatcgtgcagctgaagaacgtgcagcatgtcccttctatcgacaggaatcttgttagtggctcccgtctgactagagacggatttaagttggtttttgagtctaataaagtagtcgtgtctaaacatggatattttattggtaaaggttatgagtgcggaggcctgttccgcttttccctttctgatttctgcaataagtctgtgaaccatatttgtggcagtgtggatgatgaggctaatgtttggcattcacgtttatgtcatattaattttggcttgatgtctcggctttccagcatgtgtttaattcctaagttttccattgtcaaaggttctaagtgccatagttgtgtgcaatcgaagcaacctcgcaagcctcacaaggctgccgaggagagaaacttggcaccactagaactcctacattcagatctttgtgaaatgaatggggtgttgacgaagggtggaaaacgatatttcatgacattgattgatgatgctactagattttgctatgtgtacttgttgaaaacgaaagacgaggctctagactattttaaaatttataaggcagaagttgaaaatcaacttgacagaaagataaaaaggcttaggtctgatcgtggtggagagtttttctcgaacgagtttgacttattctgtgaggaacatggcatcatacatgagaggacgcctccctattctcccgagtctaatgggattgctgaaaggaagaaccgcacactgactgacttggtgaatgccatgttggacaccgcgggactgcctaaggcatggtggggggaggcattgttgacctcaaatcatgtgttaaacagagttcctaacagaaataaggacaaaacaccatatgagatatggattggtagaaaaccatcactttcttatttgcgcacatgggggtgcttggcgaaagtcaatgtaccaataacgaagaagcgcaaacttggacctaagactgtggactgtgtttttctgggatatgctcatcatagcattgcctatagatttttaatagttaaatccgaggatgtcagtgaagctcctcgaaggagtaagagacaaaggacggctaagtcttttggtgatgacttcactgtgtacctcgtggatgacactcctaagtcaatttcagaagcatatgcatctcctgatgcagactactggaaggaggctgtccgtagtgaaatggattccattatcgctaacgggacttgggaggtgacagagcgaccctatgggtgtaaacctgtggggtgcaagtgggtgttcaagaagaagcttaggcctgacggtactattgaaaagtacaaggctcggcttgttgctaagggctatactcagaaagaagacgaagatttctttgacacttactcacctgttgctagattgaccacaattcgtgtgctactttccctagcagcctcacatggtcttctcgttcatcaaatggacgttaagacagtttttcttaatggagagctggatgaggagatctatatggatcaacctgatgggtttgtagttgaaggtcaagaaggcaaagtgtgcaaattgttgaagtctttgtatggtctgaaacaagctcctaagcaatggcatgagaaatttgacaaaacattgacatctgcaggctttgcagtcaatgaggcagataaatgtgtgtactatcgccatggtgggggtgagggagttattttgtgcttgtatgttgacgacatactgatatttgggacaaaccttgaggtgataaatgaggttaaatcattcttgtctcaaaattttgatatgaaagatttgggagtagctgatgttatcttaaacattaagctaattagaggtgagaatgggattactctcttgcagtcccattatgtggagaagatcttgaatcgctttggctacattgatagtaagccttctccaacaccttatgatcctagcttgttgcttcgcaagaacaagagaattgctaggaatcaactggaatactcccaaatcattggctcgttgatgtacctggctagtgcaactaggcctgatatctcctttgctgtgagcaagttgagccgatttacttctaatccgggagatgatcactggcgtgcgcttgagcgagtaatgcgctatctgaaaggtactgtggaattgggacttcactatactgggtatcctgcggtactggagggttatagtgattctaactggatctctgatgtggatgagatcaaagccactagtggatatgttttcacactgggtggtggtgctgtttcatggaggtcttgcaaacagacaattttgacgaggtcaaccatggaagcagagctaacggcactggatactgctactgttgaggcagaatggctgcgtgatctattaatggatctgcctgttgttgaaaaaccggtgccggctatccttatgaactgtgacaatcaaacgacatgtgaaaagacgattgaagtctgtcaggaaattaagaaactccggagttataacgttggattacatccaaacagcgagaaacctggcagatcccttcacgaagggactatcacgaaatgtgatagacaatgcatcgaaggagatgggtttgagacccatagcattcttgaaggaactcacctttgtgagcttgactgttggtcgcagtctatgaagattttgggtgaatcttctaggaagcttactaaagacctaggagtatga

SEQ ID NO: 18289 - DNA, 535 bp, Oryza sativa
  Clone ID: PAT_MRT4530_23862C.1
ctgattcggggtcccggttgcacaactggctagtctaaaggggatccagcggaagttgacatcgtcgcgggtgaggtcgccactgatggaaagatgaattattgatctgtatgagccatactttattccaaagggccgagcgcagaagtggtcctgcaactttatccgcctccatccagtaggcatcgtggtgtcacgctcgtcgtttggtatggcttcattcagctccggttcccaacgatcaaggcgagttacatgatcccccttcgaccagaccctgcaagtccaaatgcgtcctaggcgaaggctaaatggtgaagggtgcttgccgaaggaggatgacttcgcggtatcaagcccagctccaaggaggcccaaggggccatcccagccgctctatcccattggccagtgggccaacattcgccaaccggcccattggaggcccatatatttcaattacattgtatgcccatacaagtgtccctctcatgagggcaaccatgtaaattcccctgtaaaacctaaaccctaa

SEQ ID NO: 18290 - DNA, 268 bp, Oryza sativa
  unsure (1)..(268): unsure at all n locations
  Clone ID: PAT_MRT4530_23863C.1
caatgtttatttcttgcgaggttgcctgaacggccaggtgatttatctgcttcgttgtctttagctttattattcttttgctgcaatccttacccttacatggggagtttttggcaatggtggatgatcaacagaagaanaggattacatgtatgaacgataacctaacgcagtgtcncttgcgacaanatgggaaatttactggacaatatcattgatcagctctaatttcgcatccaaaaaaaaaaaaaaaaaaaaaaaaaaaaaa

SEQ ID NO: 18291 - DNA, 694 bp, Oryza sativa
  Clone ID: PAT_MRT4530_23864C.1
cgacgtacgcgtcgattggtccgcaaaattggctcctcacccttgtgcagatgcagcctccttttgcagttttgttttgctgcaggaaaattcggatttgttttgtttttggaaacattccgaaaaatccgatgcgtgaaaacggcgtggagtccggataagttacgcgcgacttatccggttcggttacgcggaggggagatcgtgcgggcgccctgatcaagcgacctatctctatataaaccgagccgccgccttcacgcaacacatgcgaaatcaatctatggtttgcctcctactctatactgcgccgtcactcgtagactactccatcccgctcgccggcgtgcaccggcgatcgggagagcaggtctccggaacctctgccttcgacgtcctgcaccgggagaagggggcaataaggtttttgggaagcgcttcgcgcgactgctccctgttcgtccacgacggctcgccttcctctccgctcgcgtgctgcgcgccttcgtcgacgcccgcaaccgcgagtagttcctgccgagcaaccggtctttccgccagctcggtacgtgttcgacatcaacaaggaataagtcctattgccgtcccttcacactattaatcttcgcccctaaactgtataaaaccgaattatgttctgtcggttacggataaggcataccctctatcctac

SEQ ID NO: 18292 - DNA, 4101 bp, Oryza sativa
  Clone ID: PAT_MRT4530_23865C.1
atgcagcctccttttgtaaccgacccgccgtcttcacgcaatatatgcgaaaatcagtctagggtttgcctcctactctgtactgcgccgtcgctcgtagactactccatcccgctcgccagcgtgcaccagcgatcgggagagcaggtctccggaacctctgcctttgacgtcctgcaccgggagaaggcggcaataaggcattgtgattttactatggctggttttgccgatgcactgaggccggataaattcaccggtgtgcattttaagagatggcagatcagggtcactctgtggctgacagctatgaaatgcttctgggtgagtactggcaaacctgaaggagttcttactgctgaacagcagaagcaattcgaggaagccactactctctttgtgggatgcattcttagcgttcttggcgatcgtctggtcgaggtgtatatgcatatgaccgacgctaaggagttgtgggatgcactgaatactaaattcggtgctactgatgctagcaatgatctgtatatcatggagcagtttcatgactacaaaatggctgacaaccgttctgtagtcgaacaggctcatgagatacaaaccatggctaaggaactcgaactccttaagtgtgtcttacccgacaaatttgtggccgggtgcattattgcaaaactacctccatcttggagaaagctcgggaaaaaagatgccgcgtctaagggcgatggtgggcagtccagtgccaatgttgtgcacaaggcccagaacaagagcaaggggaaatacaaagctcagcagaccaccaacttcaagaagcagaagaagaacaacaacaatcctaatcaggatgagaggacttgctttgtgtgtggccaagttggtcatctggctaggaagtgtccacagcgcaaggggatgaaggcacctgcagggcagacttctaagtctgctaatgtgaccattggcaacactggagatggaagcgggtatggtaatttacctactgttttttcagttaatcaatctactaattggtgggttgatactggggccaatctacatgtttgtgctgacatctcattgttttcttcttatcaggtcgcacggggttccaccgtcctaatggggaatgggtcacatgcttctgttcatggtgttggcacggtagatctgaagtttacttcgggaaagatcgtgcagctgaagaacgtgcagcatgtcccttctatcgacaggaatcttgttagtggctcccgtctgactagagacggatttaagttggtttttgagtctaataaagtagtcgtgtctaaacatggatattttattggtaaaggttatgagtgcggaggcctgttccgcttttccctttctgatttctgcaataagtctgtgaaccatatttgtggcagtgtggatgatgaggctaatgtttggcattcacgtttatgtcatattaattttggcttgatgtctcggctttccagcatgtgtttaattcctaagttttccattgtcaaaggttctaagtgccatagttgtgtgcaatcgaagcaacctcgcaagcctcacaaggctgccgaggagagaaacttggcaccactagaactcctacattcagatctttgtgaaatgaatggggtgttgacgaagggtggaaaacgatatttcatgacattgattgatgatgctactagattttgctatgtgtacttgttgaaaacgaaagacgaggctctagactattttaaaatttataaggcagaagttgaaaatcaacttgacagaaagataaaaaggcttaggtctgatcgtggtggagagtttttctcgaacgagtttgacttattctgtgaggaacatggcatcatacatgagaggacgcctccctattctcccgagtctaatgggattgctgaaaggaagaaccgcacactgactgacttggtgaatgccatgttggacaccgcgggactgcctaaggcatggtggggggaggcattgttgacctcaaatcatgtgttaaacagagttcctaacagaaataaggacaaaacaccatatgagatatggattggtagaaaaccatcactttcttatttgcgcacatgggggtgcttggcgaaagtcaatgtaccaataacgaagaagcgcaaacttggacctaagactgtggactgtgtttttctgggatatgctcatcatagcattgcctatagatttttaatagttaaatccgaggtaccggacatgcatgttggtacaattatggagtctcgtgatgctaccttctttgagagctttttcccaatgaaggatacacatagtggttcgaaccaaccctctgaaataattcccagttcaatcacaccaacagaacaaactgaacatacacatgaacttgtctctgaggaggatgtcagtgaagctcctcgaaggagtaagagacaaaggacggctaagtcttttggtgatgatttcactgtgtacctcgtggatgacactcctaagtcaatttcagaagcatatgcatctcctgatgcagactactggaaggaggctgtccgtagtgaaatggattccattatcgctaacgggacttgggaggtgacagagcgaccctatgggtgtaaacctgtggggtgcaagtgggtgttcaagaagaagcttaggcctgacggtactattgaaaagtacaaggctcggcttgttgctaagggctatactcagaaagaaggcgaagatttctttgacacttactcacctgttgctagattgaccacaattcgtgtgctactttccctagcagcctcacatggtcttctcgttcatcaaatggatgttaagacagcttttcttaatggagagctggatgaggagatctatatggatcaacctgatgggtttgtacttgaaggtcaagaaggcaaagtgtgcaaattgttgaagtctttgtatggtctgaaacaagctcctaagcaatggcatgagaaatttgacaaaacattgacatctgcaggctttgcagtcaatgaggcaaataaatgtgtatactatcgccatggtgggggtgagggagttattttgtgcttgtatgttgacgacatactgatatttgggacaaaccttgaggtgataaatgaggttaaatcattcttgtctcaaaattttgatatgaaagatttgggagtagctgatgttatcttaaacattaagctaattagaggtgagaatgggattacactcttgcagtcccattatgtggagaagatcttgaatcgctttggctacattgatagtaagccttctccaacaccttatgatcctagcttgttgcttcgcaagaacaagagaattgctaggaatcaactggaatactcccaaatcattggctcgttgatgtacctggctagtgcaactaggcctgatatctcctttgctgtgagcaagttgagccgatttacctctaatccgggagatgatcactggcgtgcgcttgagcgagtaatgcgctatctgaaaggtactgtggaattggggcttcactatactgggtatcctgcggtactggagggttatagtgattctaactggatctctgatgtggatgagatcaaagccactagtggatatgttttcacactgggtggtggtgctgtttcatggaggtcttgcaaacagacaattttgacgaggtcaaccatggaagcagagctaacggcactggatattgctactgttgaggcagaatggttgcgtgatctattaatggatctgcctgttgttgaaaaaccagtgccggctatccttatgaactgtgacaatcaaacgacatgtgaaaagacgattgaagtctgtcaggaaattaagaaactccggagttataacgttggattacatccaaacagcgagaaacctggcagatcccttcacgaagggactatcacgaaatgtgatagacaatgcatcgaaggagatgggtttgagacccatagcattcttgaaggaactcacctttgtgagcttgactgttggtcgcagtccatgaagattttgggtgaatcttctaggaagcttactaaagacctaggagtatga

SEQ ID NO: 18293 - DNA, 3288 bp, Oryza sativa
  Clone ID: PAT_MRT4530_23866C.1
atggctaaggaactcgaactccttaagtgtgtcttacccgacaaatttgtggtcgggtgcattattgcaaaactacctccatcttggaggagtttcggtactgcactcaaacacaagagacaggaatactccgttgaggggttgattgcgtctcttgatgttgaggagaaagctcgggaaaaagatgccgcgtctaagggcgatggtgggcagtccagtgccaatgttgtgcacaaggcccagaacaagagcaaggggaaatacaaagctcagcagaccaccaacttcaagaagcagaagaagaacaacaacaatcctaatcaggatgagaggacttgctttgtcgcacggggttccaccatcctaatggggaatgggtcacatgcttctgttcatggtgttggcacggtagatctgaagtttacttcgggaaagatcgtgcagctgaagaacgtgcagcatgtcccttctatcgacaggaatcttgttagtggctcccgtctgactagagacggatttaagttggtttttgagtctaataaagtagtcgtgtctaaacatggatattttattggtaaaggttatgagtgcggaggcctgttccgcttttccctttctgatttctgcaataagtctgtgaaccatatttgtggcagtgtggatgatgaggctaatgtttggcattcacgtttatgtcatattaattttggcttgatgtctcggctttccagcatgtgtttaattcctaagttttccattgtcaaaggttctaagtgccatagttgtgtgcaatcgaagcaacctcgcaagcctcacaaggctgccgaggagagaaacttggcaccactagaactcctacattcagatctttgtgaaatgaatggggtgttgacgaagggtggaaaacgatatttcatgacattgattgatgatgctactagattttgctatgtgtacttgttgaaaacgaaagacgagactctagactattttaaaatttataaggcagaagttgaaaatcaacttgacagaaagataaaaaggcttaggtctgatcgtggtggagagtttttctcgaacgagtttgacttattctgtgaggaacatggcatcatacatgagaggaagcctccctattctcccgagtctaatgggattgctgaaaggaagaaccgcacactgactgacttggtgaatgccatgttggacaccgcgggactgcctaaggcatggtggggggaggcattgttgacctcaaatcatgtgttaaacagagttcctaacagaaataaggacaaaacaccatatgagatatggattggtagaaaaccatcactttcttatttgcgcacatgggggtgcttggcgaaagtcaatgtaccaataacgaagaagcgcaaacttggacctaagactgtggactgtgtttttctgggatatgctcatcatagcattgcctatagatttttaatagttaaatccgaggtaccggacatgcatgttggtacaattatggagtctcgtgatgctaccttctttgagagctttttcccaatgaaggatacacatagtggttcgaaccaaccctttgaaataattcccagttcaatcacaccaccagaacaaactgaacatacacatgaacttgtctctgaggaggatgtcagtgaagctcctcgaaggagtaagagacaaaggacggctaagtcttttggtgatgatttcactgtgtacctcgtggatgacactcctaagtcaatttcagaagcatatgcatctcctgatgcagactactggaaggaggctgtccgtagtgaaatggattccattatcgctaacgggacttgggaggtgacagagcgaccctatgggtgtaaacctgtggggtgcaagtgggtgttcaagaagaagcttaggcctgacggtactattgaaaagtacaaggctcggcttgttgctaagggctatactcagaaagaaggcgaagatttctttgacacttactcacctgttgctagattgaccacaattcgtgtgctactttccctagcagcctcacatggtcttctcgttcatcaaatggacgttaagacagcttttcttaatggagagctggatgaggagatctatatggatcaacctgatgggtttgtagttgaaggtcaagaaggcaaagtgtgcaaattgttgaagtctttgtatggtctgaaacaagctcctaagcaatggcatgagaaatttgacaaaacattgacatctgcaggctttgcagtcaatgaggcagataaatgtgtgtactatcgccatggtgggggtgagggagttattttgtgcttgtatgttgacgacatactgatatttgggacaaaccttgaggtgataaatgaggttaaatcattcttgtctcaaaattttgatatgaaagatttgggagtagctgatgttatcttaaacattaagctaattagaggtgagaatgggattacactcttgcagtcccattatgtggagaagatcttgaatcgctttggctacattgatagtaagccttctccaacaccttatgatcctagcttgttgcttcgcaagaacaagagaattgctaggaatcaactggaatactcccaaatcattggctcgttgatgtacctggctagtgcaactaggcctgatatctcctttgctgtgagcaagttgagccgatttacctctaatccgggagatgatcactggcgtgcgcttgagcgagtaatgcgctatctgaaaggtactgtggaattggggcttcactatactgggtatcctgcggtactggagggttatagtgattctaactggatctctgatgtggatgagatcaaagccactagtggatatgttttcacactgggtggtggtgctgtttcatggaggtcttgcaaacagaccattttgacgaggtcaaccatggaagcagagctaacggcactggatactgctactgttgaggcagaatggctgcgtgatctattaatggatctgcctgttgttgaaaaaccggtgccggctatccttatgaactgtgacaatcaaacggtaattgtcaaagtgaatagttctaaggataatatgaaatcgtctagacatgtgaaaagacgattgaagtctgtcaggaaattaagaaactccggagttataacgttggattacatccaaacagcgagaaacctggcagatcccttcacgaagggactatcacgaaatgtgataaacaatgcatcgaaggagatgggtttgagacccatgtga

SEQ ID NO: 18294 - DNA, 1987 bp, Oryza sativa
  Clone ID: PAT_MRT4530_23867C.1
atggagatcgaccgggcggtgcgggggagcagcgaccgccgcctgcggaccaagtacgacaacgccgtctacgtcgtgcagcgaccctgcgcggtctaccccaaccctctcctccccctcctccgaaattgctcctcctacgcagcgccgcggcggcggcggtagaaggcggcggagctctccacccttcccctccgccgcggcggcatgaatactatccaaaactgtcctgtgcgcaccatctattttgagagcccttgtgctttccctgaaatcaactcattcacttatgaaactgtctcaacttatggtttgccactggaaactatccgctcggattttaagtctggcctagaaggcctattgaaagagaggcctactaaagcaatttttattggtactagaattggcgatccaaatgcagtaattttcttgttcccttgtttagttgctcttcaaatctcgatagacttgttatgtccaatcctcatgcccatagacctttcacttattgatgtccctagactcccgataaacctattacttactacagtttgggattataggtatacttccattggaagcatatatgatactgttcccaatgcgcttctttgtgattcaacaactgggaaaagttttagggcaacatacatgttggctgatgaaaggcttgaaagagctggcagaacaaagaagaatattagttctgtttcaagcaatggtacaaacagtactgaggtggaacagacgatctcacgctcagcgtcgatcattgtagttggtgatgaaatattgttcggcacagttgaggataagctaggtgcaggcttgtgcaagaagcttcatgcaattggctggcgagtttctcatgtagcagttgtttccaatgaaattgattctgttgctgaagaagttgaacgttgcaaatctacagatgacatggtgtttcttgttggaggacttgggcctttacattcagacatttcgctggctggcgttgcaaaagcatttggagttcgtctggctcctgatgaagagtttgaagaataccttagtcaactgataggagacaattacactggtgatcgaaatgagatggctttgttgccagaaggtattacggaattattgcatcacaaaatgctaccgttgccattgatcaaatgcaaaaatgtggtcattctcgctgcaactaatgtggatgagcttgaaacggagtggggttgtcttctagacacacaagagagcggtttagtgatggctaaatcttttgtgtcaaagcatctctgcacgtcgctattagatgttaaaattgccccagtggttgcaaaactatgcatagatttttctgatgtatacataggttgttatcggatctcaagatctgggcctttggttgtgagttttattgggaaggacaatcagagggtagaagcagctgccgagaagctgacgaatagctttgaagggcaattctcccaagttgacagttgcaaataagctttctgagtacacacttcgatagtcttcccgtgttcttcctgctggaagttctgaaattgtgcagggctaatgacgcgatacggtgctcggatggcttgatccaatggccggaatctggactctggagctccacatattatttaggaaaggaaacatagaaattttgtcctagaaatttagaagtgaattactgaatcaacagcagaggtgctctagcatgaagctgatatagaatggcggctttccacgcccgatattttgaccgggctaagggctcgtaatattcttttggaattaaactcaaattagattataatttatagcctccagtcctccatagttcaataatttaatcatggttttttttttacgataagcacgttcaaatcagggaagatgtggaagattatgggcttgtttggcttagtaccgtaccaaaatttaagcaaattttgacactaaaaaaaaaaaaaaaaaaaaa

SEQ ID NO: 18295 - DNA, 908 bp, Oryza sativa
  Clone ID: PAT_MRT4530_23868C.1
atggaggtcaccgtggacatgccatcttggggactctcccttctattttactggaaaaacagaacccacgtgcgccgtagatgctcctgccccccctcaatttggtcggagaactcgccgttcgtccaaaccccaaaccgccccaaagctctgccatggcgttgcaatgccgcaacgctcgcccctgctccgcctcgcgccgccgccgaaggtggagggccgccggaacccgtccgcacctctcctggtcgtagccgagccatcgctggccgagtccgccccacccaagccagtgctcatgcgtctgttgccctgtccgcaccaagtcatcttctagtagtgcctttggtgctcttcgttgtccccggtggccttcgtcatctctagagatggcaacggggaattccccgtcggaggttactccaccagacccgcctccgcggtggagaattttccccgcccccgcccccgtgaaatgcaacggggcaacatctttccccatcaccgcctctgtgcggcacatcaacaacaactacaagaacacaaatattgacggagggtggaggaggaggccgacgtccggtggccggtgccgagtccacgacgtcctcggacctgggaggctgggactgggagtgaagggaacgggacggcgcggcgtggcgctgggacctggccacggggctcgggagctgggagctgggccacctgggaccgggcagctcggcgctggcgcggacgccgacacggcgggtgcggcggccctgcgcgcgggcgcgagatcgggagccagcgctactcagccgctgtggccgacggacgacggcgtggcgcgtggcggcgtggggattgggacgagcggggcggacggtggcgtgtggactggggaatggggacggaggggataa

SEQ ID NO: 18296 - DNA, 1989 bp, Oryza sativa
  Clone ID: PAT_MRT4530_23869C.1
atggctggttttgccgatgcactgaggccggataaattcaccggtgtgcactttaagagatggcagatcagggtgagtactggcaaacctgaaggaattcttactgttgatcagcagaagcaattcgaggaaaccactactctctttgtgggatgcattcttagcattgttggcgatcgtctagtcgaggtgtatatgcatatgaccgacgctaaggagttgtgggatgcactgaatactaaatttggtgctaccgttgctagcaatgatctgtatatcatggagcagtttcatgactacaagatggctgacaactgttctgtagtcaaacaggctcatgagatacaaaccatggctcatgaactcaaactccttaagtgtgtcttagctgacaaatttgtggccgggtgcattattgcgaaactacctccatcatggagaagtttcggtactgcactcaaacacaagaaacaggaatactccgtggaggggttgatagcgtctcttgatgttgaagagaaagctcaggaaaaagacgccgcgtctaagggcgatggtgggcagtccagtgccaatgttgtgcacaaggcccagaacaagagcaaggggaaatacaaagctcaacctggtcgcacggggttccaccatcctaatggggaatgggtaacatgcttctgttatggtgttggcatggtagatctgaagtttactttgggaaagaacgtgaagcatgtcccttctatcgacaggaatcttgttagtggctcccgtctgactagagacggatttaagttggtttttgagtctaataaagaggatgtcagtgaagctcctcgaaggagtaagagacaaaggacagctaagtcctttggtgatgatttcactgtgtacctcgtggatgacactcctaagtcaattttagaagcatatgcatctcctgatgcagactactggaaggaggctgtccgtagtgaaatggattccattatcgctaacgcgacttgggaggtgactgagcgaccatatgggtgtaaacctgtggggtgcaagtgggtgttcaagaagaagcttaggcctgacggtactatagaaaagtacaaggctcggcttgttgctaaatgctatactcagaaagaaggcgaagatttctttgacacttactcacctgttgctagattgaccacaattcatgtgctacttttcctagcagcctcacatggtcttcttgttcatcaaatggacgttaagacagcttttcttaatggagagctggatgatgagatctatatggatcaacctgatgggtttgtagttgaaggtcaagaaggcaaagtgtgcaaattgttgaagtctttgtatggtctgaaacaagctcctaagcaatggcatgagaaatttgacaaaacattgacatctgcaggctttgcagtcaatgaggcagataaatgtgtgtactatcgccatggtgggggtgagggagttattctgtgcttgtatgttgatgacatactgatatctgggataaaccttgaggtgacaaatgaggttaaatcatttttgtctcaaaattttgatatgaaggatttgggagtagctgatgttatcttaaacattaagctaattagaggtgagaatgggattacgctcttgcagtcccattatgtggagaagatcttgaatcgctttggctacattgatagtactatggaattggggcttcactatactgggtatcctgcggtactggaggattatagtgattctaactggatctctgacatggatgagatcaaagccactagtggatatgtcttcacattgggtggtggtgctgtttcgtggagatcttgcaaacagaccattttaacgaggtcaaccatggaagcagaactgacagcactggatactgctactgttgaggcagaatggctacatgatctattaatggatctgcctatgttgaaaaaccggtgccggctatccttatga

SEQ ID NO: 18297 - DNA, 176 bp, Oryza sativa
  Clone ID: PAT_MRT4530_2386C.1
ctttggcgaatgaactttacataaacaagggggggtttttttagagattttgagcggtacattcgctctaacttttggcctatactggggctattctaatcggttatgattatataaggctgacttgccttgcattaacctcaggactattgtggtgttcaaggattattaagtgt

SEQ ID NO: 18298 - DNA, 683 bp, Oryza sativa
  unsure (1)..(683): unsure at all n locations
  Clone ID: PAT_MRT4530_23870C.1
cgcagaaacagcatccgcaaacgtgcccccgtctatccactcccctcctccccttcccttccctttgtggaggccaggccaagcctcccctcccctccccgctcctcctacgcagcgccgcggcggcggcggtagaaggcggcggagctctccaccctcccctccgccgcggcggcggccgtgttcctctgcggtggagaggccccccctggtcgtttctccgcgccggctcggcatctctccggaggaggaggaggaggaggagggaggagtaaggtgtgnggggatggnanancnaccgnncggngcgggggagcagcgaccgccgcctgcggaccaagnacgacaacgccgnctacgncgngcagcgagccttcgcgctctacccgtttgaggaagttgccttcagctttaatggtgggaaggattcaacagttctgttgcatttacttcgggctggctactacctccacaaatcaagctctgatggtgaagtcgaaatgaatactatccaaaactgtcctgtgcgcaccatctattttgagagcccttgtgctttccctgaaatcaactcattcacttatgaaactgtctcaacttatggtttgccactggaaactatccgctcggattttaagtctggcctagaaggcctattgaaagagaggcctactaaagcaatt

SEQ ID NO: 18299 - DNA, 3126 bp, Oryza sativa
  Clone ID: PAT_MRT4530_23871C.1
atggctggttttgccgatgcactgaggccagataaattcagcggtgtgcactttaagagatggcagatcagggtcactctgtggctgacagctatgaaatgcttctgggtgagtactggcaaacctgaaggagttcttactgctgaacagcagaagcaattcgaggaagccactactctctttgtgggatgcattcttagcgttcttggcgatcgtctggtcgaggtgtatatgcatatgaccgacgctaaggagttgtgggatgcactgaatactaaattcggtgctactgatgctagcaatgatctgtatatcatggagcaatttcatgactacaagatggctgacaaccgttctgtagtcgaacaggctcatgagatacaaaccatggctaaggaactcgaactccttaagtgtgtcttacccgacaaatttgtggccgggtgcattattgcgaaacttcctccatcttggagaagtttcggtactgcactcaaacacaagagacaggaatactctgttgaggggttgatagcgtctcttgatgttgaggagaaagctcaggaaaaagatgctgcgtctaagggcgatggtgggcagtccagtgccaatgttgtgcacaaggcccagaacaagagcaaggggaaatacaaagctcagcagaccaccaacttcaagaagcagaagaagaacaacaacaatcctaatcaggatgacaggacttgctttgtgtgtggccaacctgatcatctggctaggaagtgtccacagcgcaaggggatgaaggcacctgcagagcagacttctaagtctgctaatgtgaccattggcaacactggagatggaagcgggtatggtaatttacctactgttttttcagttaatcagtctactaattggtgggttgatactggggccaatgtcgcacggggttccaccgtcctaatggggaatgggtcacatgcttctgttcatggtgttggcacagtagatctgaagtttacttcgggaaagatcgtgcagctgaagaacggtggaaaacgatatttcatgatgttgattgatgatgctactagattttgctatgtgtacttgttgaaaacgaaagacgaggttctagactattttaaaatttataaggcagaagttgaaaatcaacttgacagaaagataaaaagacttaggtctgatcgtggtggagagtttttctcaaacgagtttgacttattctgtgaggaatatggcattatacatgagaggacgcctccctattctcccgagtctaatgggattgccgaaaggaagaaccgcacactgactgacttggtgaatgccatgttggacaccacgggactacctaaggcatggtggggggaggcattgttgacctcgaatcatgtgttaaacagagttcctaacagaaataaggacaaaacaccatatgagatatggattgggagaaaaccatcactttcttacttgcgcacatgggggtgcttgacgaaagtcaatgtaccaataacgaagaagcgcaaacttggacctaagactgtggactgtgtctttctgggatatgctcaccacagcattgcctatagatttttaatagttaaatccgaggtacctgacatgcatgttggtacaattatggagtctcgtgatgctaccttctttgagagctttttcccaatgaaggatacacatagtagttctagtcaaccttctgaaataattcccagttcaatcacaccaccagaacaaactgaacatacacataaacatgtcactgaggaggatgacagtgaagctcctcgaaggagtaaaagacaaaggatggctaagtcctttggtgatgatttcattgtgtacctcgtggacgacactcctaagtcaatttcagaagcatatgcatctcctgatgcagactactggaaggaggctgtccgtagtgaaatggattccattatcgctaacggaacttgggaggtgacagagcgaccctatgggtgtaaacctgtggggtgcaagtgggtgttcaaaaagaagctgaggcctgatggtaccattgaaaagtacaaggctcggcttgttgctaagggctatactcagaaagaaggcgaagatttctttgacacttactcacctgttgccagattgaccacgattcgtgtgctactttccctagcagcctcacatggtcttctcgttcatcaaatggacgttaagacagcttttcttaatggagagctggatgaggaaatctatatggatcaacctgatgggtttgtagttgaaggtcaagaagacaaggtgtgcaaattgttgaagtctttgtatggtctgaaacaagctcctaagcaatggcatgagaaatttgatagaacattgacatctacaggcttcgcagtcaatgaggcagataaatgtgtatactatcgccatggtgggggtgagggagttattctgtgcttgtatgttgatgacatactgatatttgggacaaatcttgaggtgataaatgaggttaaatcattcttgtctcaaaaatttgatatgaaggatttgggagtagctgatgttatcctaaacatcaagctaattagaggtactattgaattggggcttcactattctgggtaccctgcggtactagaaggatatagtgattcaaactggatctctgatgtggatgaaatcaaagccactagtgaatatttcttcacactaggtggtgatgctgtttcgtggaggtcttgcaaacagaccattttgacgaggtcaaccatggaagcagagttgatggcattggatactgctattgttgaggcagaatggctgcgtgatctattaatggatctgcctattgttgaaaaaccggtgccggctatccttatgaactgtgacaatcaaacagtaattgtcaaagtgaatagttctaaggataatatgaaatcgtctagacatgtgaaaagacgattgaagtctgtcaggaagttgagaaactccggagttataacgttggattacatccaaacaactagaaacctggcagatcccttcacgaagggactatcacgaaatgtgatagacaatgcatcgaaggagatgggtttgagatccatgtga

SEQ ID NO: 18300 - DNA, 4311 bp, Oryza sativa
  Clone ID: PAT_MRT4530_23872C.1
atgtgtatgaaacaagtgtatgtacattcgagtgacaaaaaccacatcctaatgcaacgatgtgaacatccaagggcagtataaaaggaggtgcagctgcgaggcattgacctgcactcccttcctcctagctcgaagtgagcaatcactcttgtgaaacttttgcagacgccagccatggcgatcaggggcatcccgtcctctcgcgagatgaccgtggacgacttcaagaactggctgaagcagttcgacaccgacaacgacggccggataagccggggcgagctccgggaggccatccgccgccgcggcggctggttctccggcctgaaagccggccgcgccgtccgccacgccgacagggacaacagcggcttcgtggacgagtccgagatcgagaacctcgtcgccttcgcccagaaaactctgggcatgaaggttactgcctggcactgtgattttactatggctgattttgccgatgcactgaggccggataaattcaccggtgtgcattttaagagatggcagatcagggtcactctgtggctgacagctatgaaatgcttctgggtgagtactggcaaacctgaaggagttcttactgctgaacagcagaagcaattcgaggaagccactactctctttgtgggatgcattcttagcgttcttggcgatcgtctggtcgaggtgtatatgcatatgaccgacgctaaggagttgtgggatgcactgaatactaaattcggtgctactgatgctagcaatgatctgtatatcatggagcagtttcatgactacaaaatggctgacaaccgttctgtagtcgaacaggctcatgagatacaaaccatggctaaggaactcgaactccttaagtgtgtcttacccgacaaatttgtggccaggtgcattattgcaaaactacctccatcttggaggagtttcggtactgcactcaaacacaagagacaggaatactccgttgaggggttgattgcgtctcttgatgttgaggagaaagctcgggaaaaagatgccgcgtctaagggcgatggtgggcagtccagtgccaatgttgtgcacaaggcccagaacaagagcaaggggaaatacaaagctcagcagaccaccaacttcaagaagcagaagaagaacaacaacaatcctaatcaggatgagaggacttgctttgtgtgtggccaagttggtcatctggctaggaagtgtccacaacgcaaggggatgaaggcacctgcagggcagacttctaagtctgctaatgtgaccattggcaacactggagatggaagcgggtatggtaatttacctactgttttttcagttaatcaatctactaattggtgggttgatactggggccaatgtcgcacggggttccaccgtcctaatggggaatgggtcacatgcttctgttcatggtgttggcacggtagatctgaagtttacttcgggaaagatcgtgcagctgaagaacgtgcagcatgtcccttctatcgacaggaatcttgttagtggctcccgtctgactagagacggatttaagttggtttttgagtctaataaagtagtcgtgtctaaacatggatattttattggtaaaggttatgagtgcggaggcctgttccgcttttccctttctgatttctgcaataagtctgtgaaccatatttgtggcagtgtggatgatgaggctaatgtttggcattcacgtttatgtcatattaattttggcttgatgtctcggctttccagcatgtgtttaattcctaagttttccattgtcaaaggttctaagtgccatagttgtgtgcaatcgaagcaacctcgcaagcctcacaaggctgccgaggagagaaacttggcaccactagaactcctacattcagatctttgtgaaatgaatggggtgttgacgaagggtggaaaacgatatttcatgacattgattgatgatgctactagattttgctatgtgtacttgttgaaaacgaaagacgaggctctagactattttaaaatttataaggcagaggttgaaaatcaacttgacagaaagataaaaaggcttaggtctgatcgtggtggagagtttttctcgaacgagtttgacttattctgtgaggaacatggcatcatacatgagaggacgcctccctattctcccgagtctaatgggattgctgaaaggaagaaccgcacactgactgacttggtgaatgccatgttggacaccgcgggactgcctaaggcatggtggggggaggcattgttgacctcaaatcatgtgttaaacagagttcctaacagaaataaggacaaaacaccatatgagatatggattggtagaaaaccatcactttcttatttgcgcacatgggggtgcttggcgaaagtcaatgtaccaataacgaagaagcgcaaacttggacctaagactgtggactgtgtttttctgggatatgctcatcatagcattgcctatagatttttaatagttaaatccgaggatacacatagtggttcgaaccaaccctctgaaataattcccagttcaatcacaccaccagaacaaactgaacatacacatgaacttgtctctgaggaggatgtcagtgaagctcctcgaaggagtaagagacaaaggacggctaagtcttttggtgatgatttcactgtgtacctcgtggatgacactcctaagtcaatttcagaagcatatgcatctcctgatgcagactactggaaggaggttgtccgtagtgaaatggattccattatcgctaacgggacttgggaggtgacagagcgaccctatgggtgtaaacctgtggggtgcaagtgggtgttcaagaagaagcttaggcctgacggtactattgaaaagtacaaggctcggcttgttgctaagggctatactcagaaagaaggcgaagatttctttgacacttactcacctgttgctagattgaccacaattcgtgtgctactttccctagcagcctcacatggtcttctcgttcatcaaatggacgttaagacagcttttcttaatggagagctggatgaggagatctatatggatcaacctgatgggtttgtacttgaaggtcaagaaggcaaagtgtgcaaattgttgaagtctttgtatggtctgaaacaagctcctaagcaatggcatgagaaatttgacaaaacattgacatctgcaggctttgcagtcaatgaggcagataaatgtgtgtactatcgccatggtgggggtgagggagttattttgtgcttgtatgttgacgacatactgatatttgggacaaaccttgaggtgataaatgaggttaaatcattcttgtctcaaaattttgatatgaaagatttgggagtagctgatgttattttaaacattaagctaattagaggtgagaatgggattacactcttgcagtctcattatgtggagaagatcttgaatcgctttggctacattgatagtaagccttctccaacaccttatgatcctagcttgtcgcttcgcaagaacaagagaattgctaggaatcaactggaatactcccaaatcattggctcgttgatgtacctggctagtgcaactaggcctgatatctcctttgctgtgagcaagttgagccgatttacctctaatccgggagatgatcactggcgtgcgcttgagcgagtaatgcgctatctgaaaggtactgtggaattggggcttcactatactgggtatcctgcggtactggagggttatagtgattctaactggatctctgatgtggatgagatcaaagccactagtggatatgttttcacactgggtggtggtgctgtttcatggaggtcttgcaaacagacaattttgacgaggtcaaccatggaagcagagctaacggcactggatactgctactgttgaggcagaatggttgcgtgatctattaatggatctgcctgttgttgaaaaaccggtgccggctatccttatgaactgtgacaatcaaacgacatgtgaaaagacgattgaagtctgtcaggaaattaagaaactccggagttataacgttggattacatccaaacagcgagaaacctggcagatcccttcacgaagggactatcacgaaatgtgatagacaatgcatcgaaggagatgggtttgagacccatagcattcttgaaggaactcacctttgtgagcttgactgttggtcgcagtccatgaagattttgggtgaatcttctaggaagcttactaaagacctaggagtatga

SEQ ID NO: 18301 - DNA, 3651 bp, Oryza sativa
  Clone ID: PAT_MRT4530_23873C.1
atggctggttttgtcgatgcactgaggccggataaattcaccggtgtgcattttaagagatggcagatcagggtcactctgtggctgacagctatgaaatgcttctgggtgagtactggcaaacctgaaggagttcttactgctgaacagcagaagcaattcgaggaagccactactctctttgtgggatgcattcttagcgttcttggcgatcgtctggtcgaggtgtatatgcatatgaccgacgctaaggagttgtgggatgcactgaatactaaattcggtgctactgatgctagcaatgatctgtatatcatggagcagtttcatgactacaaaatggctgacaaccgttctgtagtcgaacaggctcatgagatacaaaccatggctaaggaactcgaactccttaagtgtgtcttacccgacaactttgtggccgggtgcattattgcaaaactacctccatcttggaggagtttcggtactgcactcaaacacaagagacaggaatactccgttgaggggttgattgcgtctcttaatgttgaggagaaagctcgggaaaaagatgccgcgtctaagggcgatggtgggcagtccagtgccaatgttgtgcacaaggcccagaacaagagcaaggggaaatacaaagctcagcagaccaccaacttcaagaagcagaagaagaacaacaacaatcctaatcaggatgagaggacttgctttgtgtgtggccaagttggtcatctggctaggaagtgtccacagcgcaaggggatgaaggcacctgcagggcagacttctaagtctgctaatgtgaccattggcaacactggagatggaagcgggtatggtaatttacctactgttttttcagttaatcaatctactaattggtgggttgatactagggccaatgtacatgtttgtgctgacatctcattgttttcttcttatcaggtcgcacggggttccaccgtcctaatggggaatgggtcacatgcttctgttcatggtgttggcacggtagatctgaagtttacttcgggaaagatcgtgcagctgaagaacgtgcagcatgtcccttctatcgacaggaatcttgttagtggctcccgtctgactagagacggatttaagttggtttttgagtctaataaagtagtcgtgtctaaacatggatattttattggtaaaggttatgagtgcggaggcctgttccgcttttccctttctgatttctgcaataagtctgtgaaccatatttgtggcagtgtggatgatgaggctaatgtttggcattcacgtttatgtcatattaattttggcttgatgtctcggctttccagcatgtgtttaattcctaagttttccattgtcaaaggttctaagtgccatagttgtgtgcaatcaaagcaacctcgcaagcctcacaaggctgccgaggagagaaacttggcaccactagaactcctacattcagatctttgtgaaatgaatggggtgttgacgaagggtggaaaacgatatttcatgacattcattgatgatgctactagattttgctatgtgtacttgttgaaaacgaaagacgaggctctagactattttaaaatttataaggcagaagttgaaaatcaacttgacagaaagataaaaaggcttaggtctgatcatggtggagagtttttctcgaacgagtttgacttattctgtgaggaacatggcatcatacatgagatgacgcctccctattctcccgagtctaatgggattgctgaaaggaagaatcgcacactgactgacttggtgaatgccatgttggacaccgcgggactgcctaaggcatggtggggggaggcattgttgacctcaaatcatgtgttaaacagagttcctaacagaaataaggacaaaacaccatatgagatatggattggtagaaaaccatcactttcttatttgcgcacatgggggtgcttggcgaaagtcaatgtaccaataacgaagaagcgcaaacttggacctaagactgtggactgtgtttttctgggatatgctcatcatagcattgcctatagatttttagtagttaaatccgaggtatcggacatgcatgttggtacaattatggagtctcgtgatgctatcttctttgagagctttttcccaatgaaggatacacatagtggttcgaaccaaccatctgaaataattcccagttcaatcacaccaccagaacaaactgaacatacacatgaacttgtctctgaggaggatgtcagtgaagctcctcgaaggagtaagagacaaaggacggctaagtcttttggtgatgatttcactgtgtacctcgtggatgacactcctaagtcaatttcagaagcatatgcatctcctgatgcagactactggaaggaggctgtccgtagtgaaatggattccattatcgctaacgggacttgggaggtgacagagcgaccctatgggtgtaaacctgtggggtgcaagtgggtgttcaagaagaagcttaggcctgacgcctcacatggtcttctcgttcatcaaatggacgttaagacagcttttcttaatggagagctggatgaggagatctatatggatcaacctgatgggtttgtagttgaaggtcaagaaggcaaagtgataaatgaggttaaatcattcttgtctcaaaattttgatatgaaagatttgggagtagctgatgttatcttaaacattaagctaattagaggtgagaatgggattacgctcttgcagtcccattatgtggagaagatcttgaatcgctttggctacattgatagtaagccttctccaacaccttatgatcctagcttgttgcttcgcaagaacaagagaattgctaggaatcaactggaatactcccaaatcattggctcgttgatgtacctggctagtgcaactaggcctgatatctcctttgctgtgagcaagttgagccgatttacctctaatccgggagatgatcactggcgtgcgcttgagcgagtaatgcgctatctgaaaggtactgtggaattggggcttcactatactgggtatcctgtggtactggagggttatagtgattctaactggatctctgatgtggatgagatcaaagccactagtggatatgttttcacactgggtggtggtgctgtttcatggaggtcttgcaaacagaccattttgacgaggtcaaccatggaagcagagctaacggcactggatactgctactgttgaggcagaatggctgcgtgatctattaatggatctgcctgttgttgaaaaaccggtgccggctatccttatgaactgtgacaatcaaacgacatgtgaaaagacgattgaagtctgtcaggaaattaagaaactccggagttataacgttggattacatccaaacagcgagaaacctggcagatcccttcacgaagggactatcacgaaatgtgatagacaatgcatcgaaggagatgggtttgagacccatatgagttatactatggtgagcattcttgaaagaactcacctttgtgagcttgactgttggtcgcagtctatgaagattttgggtgaatcttctaggaagcttactaaagacctaggagtatga

SEQ ID NO: 18302 - DNA, 196 bp, Oryza sativa
  Clone ID: PAT_MRT4530_23874C.1
cgcactcgtgcttggctgccaccctgatccatacctggtgctccacgctttactgcatgatgaggccccactaggccgagctggtgttgtcgggcatcgaatacttgaaggcgtaagagaggtctcccatgatgaggacggcgccttcgaatgacgccttcaagagctcaagggtggaggtggctatctaatgtct

SEQ ID NO: 18303 - DNA, 201 bp, Oryza sativa
  Clone ID: PAT_MRT4530_23875C.1
cgctggttggcacgcagcaaggcctcccacacggaacacgcgcaacccgcctgccgaccgcgagtccgcaacgcacgacggcgtttgacgccatatctaattccgatcctctccgcaccgcgcgggccagcgcaggtaatcactccggggccatcctacgatggcacgaagctctccgaattgccgatagcccacgcataa

SEQ ID NO: 18304 - DNA, 3849 bp, Oryza sativa
  Clone ID: PAT_MRT4530_23876C.1
atggctggttttgccgatgcactgaggccggataaattcaccggtgtgcattttaagagatggcagatcagggtcactctgtggctgacagctattaaatgcttctgggtgagtactggcaaacctgaaggagttcttactgctgaacagcagaagcaattcgaggaagccactactctctttgtgggatgcattcttagcgttcttggcgatcgtctggtcgaggtgtatatgcatatgaccgacgctaaggagttgtgggatgcactgaatactaaattcggtgctactgatgctagcaatgatctgtatatcatggagcagtttcatgactacaagatggctgacaaccgctctgtagtcgaacaggctcatgagatacaaaccatggctaaggaactcgaactccttaagtgtgtcttacccgacaaatttgtggctgggtgcattattgcgaaactacctccatcttggagaagtttcggtactgcactcaaacacaagagacaggaatactccgttgaggggttgatagcgtctcttgatgttgaggagaaagctcgggaaaaagatgccgcgtctaagggcgatggtgggcagtccagtgccaatgttgtgcacaaggcccagaacaagagcaaggggaaatacaaagctcagcagaccaccaacttcaagaagcagaagaagaacaacaataatcctaatcaggatgagaggatttgctttgtgtgtggtcaagttggtcatctggctaggaagtgtccacagcgcaaggggatgaaggcacctgcagggcagacttctaagtctgctaatgtgaccattggcaacactggagatggaagcgggtatggtaatttacctactgttttttcagttaatcaatctactaattggtgggttgatactggggccaatgtcgcacggggttccaccgtcctaatggggaatgggtcacatgcttctgttcatggtgttggcacggtagatctgaagtttacttcgggaaagatcgtgcagctgaagaacgtgcagcatgtcccttctatcgacaggaatcttgttagtggctcccgtctgactagagacggatttaagttggtttttgagtctaataaagtagtcgtgtctaaacatggatattttattggtaaagcaacccgcaagcctcacaaggctgccgaggagagaaacttggcaccactagaactcctacattcatatctttgtgaaatgaatggggtgttgacgaagggtggaaaacgatatttcatgacattcattgatgatgctactagattttgctatgtgtacttgttgaaaatgaaagacgaggctctagactattttaaaatttataaggcagaagttgaaaatcaacttgacagaaagataaaaaggcttaggtctgatcgtggtggaaagtttttctcgaacgagtttgacttattctgtgaggaacatggcatcatacatgagaggacgcctccctattctcccgagtctaatgggattgctgaaaggaagaaccgcacactgactgacttggtgaatgccatgttggacaccgcgggactgcctaaggcatggtggggggaggcattgttgacctcaaatcatgtgttaaacagagttcctaacagaaataaggacaaaacaccatatgagatatggattggtagaaaaaccatcactttcttatttgcgcacatgggggtgcttggcgaaagtcaatttaaatccgaggtaccggacatgcatgttggtacaattatggagtctcgtgatgctatcttctttgagagctttttcccaatgaaggatacacatagtggttcgaaccaaccatctgaaataattcccagttcaatcacaccaccagaacaaactgaacatacacatgaacttgtctctgaggaggatgttagtgaagctcctcgaaggagtaagagacaaaggacggctaagtcttttggtgatgatttcactgtgtacctcgtggatgacactcctaagtcaatttcagaagcatatgcatctcctgatgcagactactggaaggaggctgtccgtagtgaaatggattccattgtcgctaacgggacttgggaggtgacagagcgaccctatgggtgtaaacctgtggggtgcaagtgggtgttcaagaagaagcttaggcctgacggtactattgaaaagtacaaggctcggcttgttgctaagggctatactcagaaagaaggcgaagatttctttgacacttactcacctgttgctagattgaccacaattcgtgtgctactttccctagcagcctcacatggtcttctcgttcatcaaatggacgttaagacagcttttcttaatggagagctggatgaggagatctatatggatcaacctgatgggtttgtagttgaaggtcaagaaggaaaagtgtgcaaattgttgaagtctttgtatggtctgaaacaagctcctaagcaatggcatgagaaatttgacaaaacattgacatctacaggctttgcagtcaatgaggcagataaatgtgtgtactatcgccatggtgggggtgagggagttattttgtgcttgtatgttgacgacatactgatatttgggacaaaccttgaggtgataaatgatgttaaatcattcttatctcaaaattttgatatgaaggatttgggagtagctgatgttatcttaaacattaagctaattagaggtgagaatgggattacactcttgcagtcccattatgtggagaagatcttgaatcgctttggctacattgatagtaagccttctccaacaccttatgatcctagcttgttgcttcgcaagaacaagagaattgctaggaatcaactggaatactcccaaatcattggctcgttgatgtacctggctagtgcaactaggcctgatatctcctttgctgtgagcaagttgagccgatttacctctaatccgggagatgatcactggcgtgcgcttgagcgagtaatgcgctatctgaaaggtactgtggaattggggcttcactatactgggtatcctgcggtactggagggttatagtgattctaactggatctctggtgtggatgagatcaaagccactagtggatatgttttcacactgggtggtggtgctgtttcatggaggtcttgcaaacagaccattttgacgaggtcaaccatggaagcagagctaacggcactggatactgctactgttgaggcagaatggctgcgtgatctattaatggatctgcctgttgttgaaaaaccggtgccggctatccttatgaactgtgacaatcaaacgacatgtgaaaagacgattgaagtctgtcaggaaattaagaaactccggagttataacgttggattacatccaaacagcgagaaacctggcagatcccttcacgaagggactatcacgaaatgtgatagacaatgcatcgaaggagatgggtttgagacccatagcattcttgaaagaactcacctttgtgagcttgactgttggtcgcagtctatgaagattttgggtgaatcttctaggaagcttactaaagacctaggaattaaatcattatatgtctataatctcaacaaaaaccacttaatcttaagtgtgcactgcaatgattggaaggcctactcttgtaccacaatgatattcagccagtgtgctagaaaccagaaaagcagcgctattccgagtgtcacagtgattggtcgacgcaaggccataacaatatgtatctctacatcgagccagagacctatcccgctgataatcgagcaaaatgattggtcaatgttctcctga

SEQ ID NO: 18305 - DNA, 274 bp, Oryza sativa
  Clone ID: PAT_MRT4530_23877C.1
aactagtggatccccgggctgcaggattcggcacgagggcgccttagttcaccgatcacgacgtactgtagtgtgtcaattgtgatgtgtacttttgtagcgccgtacgtgctcgttcgcgcggattgttcttggaagcgccggtgctgggtactagtagctggtcgaattcacaaaattcgttcaaattatgtttttgggaccatcccaatgggacatatcagatgtgtgatatgtaggatcatccttgagttcaatatactccaatatttgt

SEQ ID NO: 18306 - DNA, 237 bp, Oryza sativa
  Clone ID: PAT_MRT4530_23878C.1
ctactccatcccgctcgccggcgtgcaccggcgatcgggcgagcaggtctccaaaacctctgccttcgacgtcctgcatcgggagaaggcggtaataaggtttttgggaagcgcttcgtgtgactgctccctgttcgtccgcgacggctcgccttcctcttcgctcgcgtgctgcgcgcctttgtcgacgcctgcaaccgcaagtagttcctgccgagcaactggtctttctgccat

SEQ ID NO: 18307 - DNA, 200 bp, Oryza sativa
  unsure (1)..(200): unsure at all n locations
  Clone ID: PAT_MRT4530_23879C.1
ggctgcaggaatcggacgagggagaactagtctcgagtttttttttttttttttgcagttgcaataaagagcaaggtttttaagaagtagggtaagacattatgcggttagcttctcaaacagttatagccggactaaatgaagttatagcggctaaatngatatgagagcaaatagttagaatccttctcaaacttctc

SEQ ID NO: 18308 - DNA, 473 bp, Oryza sativa
  Clone ID: PAT_MRT4530_2387C.1
cctgctagttttagaagggagcttaaaagagccttgaactgttgattgatttgagacatattaaagaacaaaaatatatccttgacggagcgtggggctcctcaccgggagaccgcgcaggcccccctttgccggcctgggcctcctttttatctggtcaggggtcaccacatgggcctctagctgcctaagaagggaaacatgctttttacaatcagggctagtcacagccggaagtgacctctgacaagcagagcacacgcctcctgccccgctcgcctgctttcccggtggacgcccatttcaaccttcatttaatggccagcgacttccttgctatacttgcgctgaagcctggaatgaatctgacggggactgacataccaactccaggagttagcacaccagctccggctagggacgagagccaggaagctcttatcattccgacgggacggggcgaggcgtgtgac

SEQ ID NO: 18309 - DNA, 346 bp, Oryza sativa
  Clone ID: PAT_MRT4530_23880C.1
atggaattggatcaattaaagggaatttatccagaagagtccgagttcaagaaggatgcggcatggcagttgatagtttctttcttgtccgacaaggacttatcaacccatgggtataaatatgtacacccagggtctatgtaatctatcaatctcgatcaatacaactactctcggcgcatcgccaccctctttcctgaggtttttacttatcaaccggcggaatttggaaccttacgcggggctgcatcgactttcgatctccggcgaaggggtaagtcctacgttccgccggccctagtgaatctgtcggctacgttggtgttgttcgaggctgcatccacta

SEQ ID NO: 18310 - DNA, 880 bp, Oryza sativa
  unsure (1)..(880): unsure at all n locations
  Clone ID: PAT_MRT4530_23881C.1
ntggagcncnaccgcggtgcggccgctctagaactagtggatcccccgggctgcaggaattcggcacgagttttttttttgaaaaattgcaatggaattatcagctgagtagatcaactactatttggntcanttcgnnttnacaagttacaatancatncangtttccccngtgaggncggnaggtgtcaaaagtttaccnangnaaaancttggtnaaacctncaaannttnncnaaatttaantatnccccgcntngaaacanctnnnaantgcnggngnaatncccgtntcacntgtcgtnnntccaagggtntggctttagtnttgggcaaggggnancccnaggttgggcccccaaggaaacttgncccnnaacnnggggnanaatttttnncacnnccnntnnntntgnnncncnccctnttttnnnnnnnttgncgnntncnccacgggnnnnttncnacccntntgtgnaangtnnnggcngnnggttgcttggcnncnnttgntcatnggttgtgnttgtnntnctncgagttngcgccccnnggnnttnnannnnngtnnagttnttttacgnncngnnngnggtnnncngggngtgncnntnnntncncggnncnnntttnnngnnntgnnnnnnnnnnnngnatttgtnnnnngngggnncngctgnnnngttcnngnnnncncgagttntttcntntntnnnnntgtnnnnngnactggnnnnnngntngggtntngtgtttngtgntnnnatngantnnnttcncttngtnnnncnnngtntnnnnttganannntnnanttnnncgtnnttngnnnntnnntnnggttnntgnncngnnngnanccntttgnnnttntnattng

SEQ ID NO: 18311 - DNA, 1420 bp, Oryza sativa
  Clone ID: PAT_MRT4530_23882C.1
atgatgctgctcgcccgcgccgtcctccgctcccgcctccgctgcccgccgctgtctgctgcggcggcgtcgacggcggcgttctcgtcggccccgtcgccggcggcggcggaggcggagcgcgcggtacgggacgggcccaggaacgactggagccggcccgagatccaggccgtctacgactcccctctcctcgacctcctcttccacggggctcaagtccatagaagtgtccataaattcagagaagtgcaacagtgcactcttctttcaataaagacaggtgggtgcagcgaagattgttcatactgcccccagtcctcaagatacagtacaggattgaaggcacaaaaattaatgaataaagatgctgtcttagaagcagcaaaaaaggcaaaggaggctgggagcacccgcttttgcatgggagcagcatggagagaaaccattgggaggaaaacaaattttaatcagatccttgaatatgtcaaggacattagaggtatgggcatggaggtctgttgcactcttggcatgctagagaagcaacaagctgaagaactcaagaaggctgggcttacagcatataatcataatttagatacatcaagagaatattaccccaacattatttccacaagatcatatgacgatagactgcagactcttgagcatgtccgtgaagctggaataagcatatgctcaggtggaattattggtcttggagaggcagaggaggaccgtgtaggattgttgcatacactggctactttgcctgcacacccagagagtgttcctattaatgcattggttgctgtcaaaggcacgccccttcaagatcagaagcctgtagagatctgggaaatgatccgcatgattgccacagctcgaattgtgatgccgaaggcaatggtgaggctttcagcaggacgagtacgtttctccatgccagagcaagcgctctgcttcctagctggggccaactccatcttcgctggtgagaaacttctaacaaccacaaacaacgactttgatgcagaccaggcgatgttcaagatccttggtctgattcccaaggctccaagctttggtgatgaagcaccagctgcagacactgagagatgtgaggaagctgcatcaatgtagaacaccaatagaaactcttgagaacacgttcggtgcaaaagtagcaccattatttccggttagcgcattgtattgtagagattacaatatcttgtagtaagttagaaaaagatcgacccaaaataaatagggaattttctgtatctttgttcttgttgtgccattttgtgacatttcaatcagcttcaatctcagttttcctttttcctctttgatgctacactgaagtactgatcattatcaatgaacctacttgtgaaaaaaaaaaaaaaaa

SEQ ID NO: 18312 - DNA, 507 bp, Oryza sativa
  Clone ID: PAT_MRT4530_23883C.1
atggcggtgctgttcccgtccaattacttcctgcttagcttctggttttttcttggtttttggataatctaccaggcgttcggcgcattcggcgctgttgttaacatcgacaagccgatcgagagctccatcgagcttgtcggcgtcagcgggctggtgccggtgctggccctggctccaggtccaggagttgcctcgcggccggcgttcaatctactcgtgcgcatcgacaacgaccacatcctcgaccggcaccgagagggcggcagcgtcaaggtctcctacgccggcgtcccactggcgtacgggagcatacccagcttccggctcggggcgagggaggccttgacggtggcggtggacgcgacgagcgaggcggcgggcgtgccggaggatctgcttcggctcatggcggcggagcaaaggatgggcgtggcgcagctggagatcggcatgcagctgggcgggccaggccgggagtcgtactcctggagtgtggatttttga

SEQ ID NO: 18313 - DNA, 543 bp, Oryza sativa
  Clone ID: PAT_MRT4530_23884C.1
atggtctccgcgctagcccttgtcatccgtgctgccaccgacctgcagctcacccaccaccacccatcatcttcatccgccgccgcccacgcccacccgcgtcgatggggagcccgacgcccggccacacgtcgatggcgagcctggcgcctggccgcgcgtcgatgggcatccgagcggccggcggcgcgtcgggtagtcccggcgttgcatcgatggggagtcggcgccgcctcactggaactttgggagacagggatagatcaatttgtcggggtagacggtgtgctaatgttttcaatcaacaagtcaaagctgatcaaaaggaaatggcaaggaggggatgaattctgtaaattgtgtggcaagattgagtctactgatcatgccctttttaagtgccctctggctgtgtttacttggtgtgtgcggtggtgtatcatgctaaaggaaggagatcaagctgctatgaaaggatggggtgatctactgatggctaaacttcaacggctgaagccgtgctgcctccctgcttcagtgtga

SEQ ID NO: 18314 - DNA, 915 bp, Oryza sativa
  Clone ID: PAT_MRT4530_23885C.1
atggcgccgcgatgcctggctgctcttgcacccctggccgtgctgctgctgctctcctcctgcctcgccgccgctccggcgacggcgcagcagagcagcagcatcggcgacaccgtggtgttctggggccggaacaaggccgagggctccctccgtgaggcctgcgacaccggcctctacaacaccgtcatcatctccttcctcagcgcgttcggccgcggcagctacaagctcgacctctccggccaccccgtcgtccccgtcggcggcgacatcaagtactgccagtccaagggcaagacagtcctcctcgccatcggcgggcagggcggcgagtactacctcccgtcctcccaggccgccgccgacctggacgactacctctggaacgccttcctcggcggcggccgcagcggcgtcgcccgcccattcggcgacgccgtcgtcaacggcatcgacttcttcatcgaccagggcgcgacggagcactacgacgagctggccaggctgctccacggccacagcaatggcggcgtgatgctgacggcgacggcgcggtgcgtgttcccggaccagcggcagcaggcggcgctggcgacggggctcttcagccgcatccacgtgaagctgttcaacgacgggcggtgcacctggggccggagagagtcgctggagaagtgggcggcggcgtacccggacagccggatctacgtcagcattgtggcttcgccggaggcggacagggacgcctacatgtcgcacaaggatctctacttcgatgtgctgcagttcatcaacaagctccccaactacggaggcatcatggtctggaacaggtactgggacaagaagaccggctacatcaacggtgacgtgttctaattccttattaagctaaacatatattaccaagat

SEQ ID NO: 18315 - DNA, 1574 bp, Oryza sativa
  Clone ID: PAT_MRT4530_23886C.1
cccacgcgtccgcccacgcgtccgcccacgcgtccgatcgataggtagctaactactccatctagctaagacccgtagtgtatagtagtcaagatcaatggcgtcccgacgccttgccccgctgctggtcctactgctctcgtccagcctcgccgccggccagagcaccggcgacaccgtcgtgttctggggccggaacacggaccagctcgaggggtccctccgtgaggcgtgcgacaccggcctctacaccaccgtcatcatctccttcctcagcgccttcggctacatcccgggcacctacaagctggacatctccggccacaccgtctccgccgtcggccccgacatcaagcactgccagtccaggggcatcctcgtcctcctcgccatcggcggccagggcggcgagtactccctgccgacctcccaggcggccgtcgacctcgaggactacctctggaacgccttcctcggcggcggccgccccggcgtcgcccgccccttcggcgacgccgtcgtcgacggcatcgacttcttcatcgaccagggcgccacggagcactacgacgagctggcgcggcggctgtacgcgcacaacaaggactacaaggggaggctcggggtgatgctgacggcgacggcgaggtgcgtgttcccggaccagcggctgcaggcggcgctgtccacggggctcttctcgcggatccacgtcaaggtgttcggcgacgggcggtgcgcgtcgaggagggaggagctggagaagtggatggcggcgtacccgcagagccgcgtcctcgtcggcgtcgtcgcgtcgccggaggctgacagggacggctacgtgtcgcacaaggatctctactacgacgtgctgcagttcatcaacaagctgcccaactatgggggcatcatggtctggaaccaggtactgggacaagaagaccggatggacggctggtaatgagcctggtctcctggatcaggttctgtgatggacggctggtaattaaccagaccttgatccattttcactttgatcactgatcacttcactggattcatgcacgagctactactagtacgtgcacaaataaagtaagtaatgtcatgtgacgtgcatgcacaaataaagatggaaatgatatgataaaagattggggtatgtgtgtgtgtgtgtgttggataatgtaatgtaatgcacaaataaagtgaggtgatcaggacgggcaggcttactttcttctgggtgatatgttgtatgtattttgttttattggattggaataaatatatatatatatatatatatttcatcgccagataaaaaaaaaaaaaaaaaagggcagcctcccgcgatctagaaccatcatggtctggaacaggtactgggacaagaagaccggctacatcaacggtgacgtgttctaattccttattaagctaaacatatattaccaagatgaatatgatatgttaaatgtgtaatatgttgaacaatgtacaaataaagtgaggtcagtatgtgcagatctcacgtacagtgaattactaactggtggtgattgtaatttgtt

SEQ ID NO: 18316 - DNA, 2152 bp, Oryza sativa
  Clone ID: PAT_MRT4530_23887C.1
atggcgtcaagggatctccggcggctgctcgacggcgcggccctcgtcgcccgcgaggccgccaggcgcgcctcggcccccgacgtcctcaggtccgcgctcctcgccgccaccgacctcgccgggctcaccaggggcaccccgcgcaccccgaggcccacccctccccttggaccccaccccaccgccgccgccgccggcggcgaggctcgtgcctccgtcgtgtacttctcccacgacgatgccggtcccgtctctccgccgcggcggccgccgcaggatcccccgctggagcagcggccgcctgcgcgtgaatccccccacccggcccaggcgaaggagatcaccgaagccggcgtagccgcggccgtgggcgcagctgagcctgaacctgtggcggtggccagaccacccgatggcgaagctgctggccgctcacctgcaccctcgccatcgccctcgccggtggtgcgggtggagaagaggcggcggccgcgggagcggagggttccctccaccccattcaccagagccctcgggtcagtatgccacaccatgcatcgatttgaacagggagaaatgcgcattcgtttgtttgtgaaattacgaatcgaacagtgcgtgaatcgtgttgttttttttgcaaaatttgtgctggcaaaattaaggttcgcaggtctgggtgctggcctcgcatggggaacgctacaggaatcagctcggcgggtggtgtatgggagaccagcggacgcagatggcaagcgttctgctatgtccccgttcttatcagatcagaatgctgagcgtatcgccctggcgctgtgccggatgcggggtgcagcgctcaaggtgggacagatgctgagcatccaggacgaatcccttgtgcctccaccggtcttggcagctcttgatattgttcgccaaggtgctgatgttatgccgaggaagcagctcaattcagttcttgatgctgagctaggtcaggactggtcctccaagttaacgagttttgactatgagccactagctgctgcaagtattggacaggtccaccgggcggtcttaaaggatggttcagatgttgtcatgaaaatacaataccctggggtcgcagatagtatagaaagtgatattgagaatgtcaggctacttctgtcttacaccaatctcatccctaaaggtcttttccttgatagagccatgaaggtggcaaagcttgagctggcaagggaatgtgattatgtgttagaagcaactaaccaaaaacggtacaaagagttgctatctgatagtgaaggctattatgtccctaaggtcattgatgagttgtctagcaaaaaagtgttaatgtcagagtttgttccaggatttccaattgacaagactgatccaaattggagcaacttccttttcgatgaacctacaaggaagttcaatctgattgactttggcgcagctcgtgattttccaaaacgttttgtggacgactaccttcgtatggtagttgcctgtgcgaacaaggatagagctggtgtcttagaaatgtcccgcagactaggatttctcacaggtgaggaaccggaagtcatgctggatgctcatgtccaagctgccttcattgttggtgtgccattcgcaaaaccaggtggtcacgatttccgtgcaaacaacatcacacatagtgtttccaacctcggagctaccatgttgaagcacaggctgacgccaccacccgacgaagtttacagcctccacagaaagttgtcaggtgcattcctagcctgcatcaagataggggcagttgtaccctgtagggagatgctgttcaaggtttatgagcaatacaatttcagcgatgatcgtccggaagtattgtccagcaccggatagaaatatgaaaggccaaccttttgcccacttcccttttggggaactttaaatagttacaggtcggttgcagctcattttttcgagagccacacaatcggctgctccatttgttgttaggctgaaagaatgctctgacaaattgtattattgatagcttgaaaagtgaggatattctgtttagggatgagctctacaaaaactgtataatgctcttatacttaagatgatgaaagttactctgcatatttttgagcacaag

SEQ ID NO: 18317 - DNA, 632 bp, Oryza sativa
  Clone ID: PAT_MRT4530_23888C.1
gatccaagaagggttctattcttagcttgtccccacctctaattaaactattcataagcattaagcaagcttaatactccagtcttgaccgattttgggtccaactggggccacgaccgaaaaggctgcacggctgccctgggcggcgtgatattgaacctggactgtccatgttcgtccctctgactcaatttgggcctccttctgatcccatgtcttgggggcgccgacgatgatgatcttgtgcacgtggacgctttccatagccttcagccatgtgccagccttgagtgacttggtgtcacgtccctcggcatccagagaagtcaatgtgttaccgccgagggtgaacttacgggggatgtattgaccttgctcgtaatggaacgaatcaccgtcatggacataaagctcaccctctgcggcgccaggcttggaagctgagacaacaagcgtgtattcgccgaatcgcatgagtgcacttgatcgtcgaggagtgtcacgtcggggaatgatgggtcctccttgtggtaggacaggaatattctacagcggagcgctcactgcaagagatttgcccttgcttgacttgagaacattgtaggtaaagtggtcatagtagacttggtcgc

SEQ ID NO: 18318 - DNA, 1873 bp, Oryza sativa
  Clone ID: PAT_MRT4530_23889C.1
cggcagagggctacactttgtcactagctaagctagcaagtgcaactgtgcaagccatggcgtcgatgtgttcgaggtcgataccccagctcatcctcctcctctccctgaccgtcttcctcctcgccaatgcgcatcccatggccccgccatcgccgccgcggaaggcggccgcgcctccgacggcggcgaagggggtgaccggcatttcgccggtgctcgtctccacgctgcgcgagacgctggacgcgatcaagaacgtcgcgtccatcatctcgtcgttccccatcggcggcatcctcggtggcggcgacctccgcctctcctccgccatcgccgactgcctcgacctgctcgacctgtcctccgacgagctgtcctggtcgatgtccaccacgtcgtcgtcgtcctaccagcccaccaacgccggcgccgccacgtcgtcccacgtcggcaccggtgacgctcgctccgacctccggtcgtggctgggcggcgcgctgagcaaccaggacacctgcaaggagggcctcgacgacaccggctccgtgctcggctcgctcgtcggcaccgccctccagaccgtcacgtcgctcctcaccgacggcctcggccaggtggccgccggcgaggcctcgatcgcgtggtcgtcgtcccgccgcggcctcgccgagggcggcggcgccccgcactggctgggagcccgggaacgccggctgctgcagatgccgttgggccccggtggcatgccggtggacgccgtggtcgccaaggacgggagcggcaactacacgacggtgagcgcggccgtggacgcggcgccgacggagagcgcgagccggtacgtgatctacgtgaaaaagggcgtgtacaaggagacggtggacatcaagaagaagaagtggaacctgatgctggtcggcgacggcatgggcgtgaccgtcatctccggccaccggaactacgtcgacggctacaccaccttccgcagcgccacagtcgctgtgaacgggaaggggttcatggcgcgggacgtgacgttcgagaacacggcggggccgtcgaagcaccaggcggtggcgctccggtgcgactccgacctctccgtcttctaccgctgcgggttcgagggctaccaggacacgctgtacgcgcactcgctccgccagttctaccgcgactgccgcgtctccggcaccgtcgacttcgtcttcggcaacgccgccgccgtgttccagaactgcaccctcgccgcgcgcctcccgctccccgaccagaagaactccgtcaccgcgcagggccgcctcgacggcaacatgaccaccggcttcgccttccagttctgcaacgtcaccgccgacgacgacctccagcgcgcgctcgccggcggcggcaaccagagctccgccgcggcggtgacgcagacgtacctcggccggccgtggaagcagtactccagggtggtgttcatgcagtcgtacatcggcgccgtggtgcgccccgaggggtggctggcgtgggacggacagttcgcgctcgacacgctctactacggcgagtacatgaacaccgggcccggcgccggcgtcggcggcagggtcaagtggccggggttccacgtcatgacgagccccgcccaggccggcaacttcaccgtcgctcagttcatcgagggcaacatgtggctgccgccaaccggcgtcaagtacaccgccggcctcacgtcttgatcaccaattcaccatcgagtacgtgcttcttgtgtgcgacagtagtacagcacatgatcatactacactttccatacgttggagggaggtttaattaaggatctggtgtataaaatctttaggaattaaaaaaaaaaaaaaaa

SEQ ID NO: 18319 - DNA, 209 bp, Oryza sativa
  Clone ID: PAT_MRT4530_2388C.1
gtggaattaaaataagagatggataaaccccacataaggggagatggtcgaatacaacctggaccgccggtcgccaacaccacgcgctctcatatcccaggcgctgtccaaccgactaagagcctacaaggccaaataggaaaccaagctccgaattctgacagcggtactggcttaggtaatcaccataacgtgatcgacctataggt

SEQ ID NO: 18320 - DNA, 321 bp, Oryza sativa
  Clone ID: PAT_MRT4530_23890C.1
atggagaggagaagacggctagagcgcgtgagcgagggatatggggaagcagcgtggcggaggaggggaagtgagcgcatccggggacggcggcgactgtatgcgatgcggaagattggaggctgtcagtattatcagtggaaggatgaaatgttggacactggagtgcggacacatcttgcccttgctccaattcatgcaggtcacctacaggcagtggcaccacttggtggtttccctactgcagctccacaggctatcatgcaggatcgggctgctggagttgtaggcaatgcacaagtggacattagggtgatgtag

SEQ ID NO: 18321 - DNA, 525 bp, Oryza sativa
  Clone ID: PAT_MRT4530_23891C.1
ctcctcactccgtctcggcggcggcggcggcggcgaggcgtctccgacgaaaaccctagcatccctccccccacctcgcgtctgtctacgaagccatggagaggcgagatcgcggcggcggaagcagcagcaggaatcctcatggagctccggtggaagaggaggaggagctggaggatgattttgatgagttccggctgcccatgagccaccgccccacggagaacctcgagacggaggggctggagcaggcgtccgttgacacgcagctcacctcctccaacgtcggattcaggctgctccagaagatggggtggaagggcaaggggctcggcaagaacgagcaaggtataacagagccaataaaagctggtatcagagatgcaaaattgggtgtggggaagcaagagcaagatgacttcttcacatcagaagataatgtgcaaaggaggaaattaaacatacagcttgaggagactgacgaacctcataagaagcgcgaggttatagtagcacgcgcgcaga

SEQ ID NO: 18322 - DNA, 380 bp, Oryza sativa
  Clone ID: PAT_MRT4530_23892C.1
ggggcatccgaagacaacctaaccatgtaaacaatttcacaaagaaacgaatggaatcgagaggattccccgcttttacaagcaaggtaaatacaatacagagttgtactttcaactacttttgacaaaccaacttagcttgtttttttaggaacacaccctgaaaaactatcaatacatactgtccagctggttacactacactttctgcattgcttgaaataagcaatgcaaactacttcccaaaatgcaagcatttctggctttaagcctagacaagcttgactagattcaaagctagaaatacttatatttcgagatgaaggtacaagcattgcccaactagctagctgaacctgaacaccaaaaccaaacaggcc

SEQ ID NO: 18323 - DNA, 2130 bp, Oryza sativa
  Clone ID: PAT_MRT4530_23893C.1
atgggatctacatcaggcatcgacgacttcgccttcccccaagagcaggtgtatcgctttggcagccttgacttcatcaccgacaatttcggcaagatctcttttcttagctcggattcaaaccagtcggagaggcgagatcgcggcggcggaagcagcagcaggaatcctcatggagctccggtggaagaggaggaggagctggaggatgattttgatgagttccggctgcccatgagcacccatcagagagctcttcagagacaatttcaatgaagtacttgccgaccccttcacttccggctcatcctacttccttcaccgacggcgagcacgggagatgcgcggcgcggcgagcgggagcggcgggctcggcaccggcggcggcggcctcccttccccgacctcccatccggcgcggaagcggcgggctcggcaccagcggcggcctcccttccccgacctcccatgcgcggcggcgacctcccttccccgatggcggcgggcagcgggcggcggccacggcgacggcctgcaacggcggatccggcggcaccgtcctcgggagggccggatccgccgccctacggaggagctcggcgtgcggtaggcacggcggtggatctggacggcggcggcgacccccctcccctggccgcagcagcagcaccagcccgatgaacccccgcccaacagcgaaactcgacgcggaggggctggagcaggcgtccgtcgacacgcagctcacctcctccaacatcggattcaggctgctccagaagatggggtggaagggcaagggcctcggcaagaacgagcaaggtatcaaacttcatcttctcttgctccagaaacaagatggtatgtaagggcaaggggctcggcaagaacgagcaaggtataacagagccaataaaagctggtatcagagatgcaaaattgggtgtggggaagcaagagcaagatgacttcttcacatcagaagataatgtgcaaaggaggaaattaaacatagagcttgaggagactgaagaacatataaagaagcgcgagctgttggcattacatattgatatttgtatcttattcatgcaagagttgctagcatcagccctcatgatccttgagcattttgggcattttttatttggtggttctttttcctgcttggtgcaaatcatgacaatccaggtcatagcagaacgcgagcagaaaatacgtagtgaggtcaaggagatacagaaggtgttcttttgcagtctctgtaacaagcagtacaaattggcgcatgaatttgagtctcatttgagctcatacgaccacaatcataggaaggactatatttctgataagttcactgtggttacaacagaggttcaaggaaatgaaagaaatgcaaagcagcagcagcagcagcctgctgatgctcatagaaagcagcagcagcagaagcaagaaccatcagagagctcatcagagagaattacaatgaagaacttgcctaacccttcaaatcaggatcagcgtaaaaccttgaagtttggcttctccaaaatggctccttccaaggctccagttggcaatgtaagcaagaaacctaaggttgctacaaaaatgtcatcggtttttggcaatgaaagtgacgaagaatcatgatctttgcccgcccaagagtgattgcactgaaggaaatggtcctgtagaagagaattaattttgggaacatgccatgccatgatcttgtcacgctctttaatcctgatgtggatggtggcatctcctgcgttctcatatgaacatgaaatgttgaaatgttaattgtatggagtcgagggtacattggaacagtaactcagtttcccctacacatgctggatatggaacttttgattcgtacattctgtcttaagggctcagacaaagcccatgggacacctttgtattattgtgttggcttttatttagtacctttcaattcagacctgggattgcatctggtaactcgtggtctggatcatgtctggcaaaatttctagaaagcttgtccttgagggcactattcaactgtagctggttccttgccttggtgtatgaacagttgaacacttaacgaaaccgccggttgtttcc

SEQ ID NO: 18324 - DNA, 1179 bp, Oryza sativa
  Clone ID: PAT_MRT4530_23894C.1
atggtgctgcaatctcacgatgtatcggatctctgcatcggcaagccgccggtgaggtggctgccgccgtcctccaccgtcgccgacgccatcgccgagatcgaggccggcggcggccggggtccggacgccgccgtcgccgtgtgggacgggacgaagggggaagtggatggcagggtgtgcatggccgacgtgcacctcttcctctgcggcggcgacggcgaggcggccagcctggcttccccggccgccgcgcttcaggccacgctctccgacctcctcgccgccggcgcgccgcccgtccgccgcatcgagccccacgcgagtgtggtggaagcggtggacgccttcttggacggcgcgcactgcctcgtcgtgccgatccgggagcggcggcggcgcgcggcggcggcggcggcgggggagatgtgcatgtgctggctcacggtggaggacgtcgtgcgcttcttcgtcggctgcatcggcctcttcgccccgacggcctcgctctcggtttctcagctcggcatcgtccgcgaggccacgctcgccgtcgccgccggcgacagggcgctctccgccgtgccgctcctccgcgccgcgctggcgacgcactcctccgtcgccgtcatcacgggcgcaggcatcgccccccgcctcgccggcgaggtgtcgccgtcggcgctctgctcctgcgacgtatccgtcgcggcggccatcgccgcgctctcggctggcgacctcacggccttcctccaccgcagcgacctccggtgccgccgcaacctccccggcatggtcgacctcctgtacgccggcgacccttcgtcgtggcccccctccccctcctcctcttcctcctcctcgtcgtcatcgtcgtcgttatcctccttctcgtcttcctccgacgacgaggcggaggacgggtacaaacactatgcgccagcgccgtgcgcgcggcgagacaacaacaggcagatcatcgcgtgccacccggggagctcgctggtggcggtgatggcgcaggcggtcgcgcaccgcgtgacgcaggtgtgggtggtggacttcgacgacggcgagctggtcggcgtcgtccgcttcctcgacgtgctctgggttcttcgcgaacacctcaaccaaccaccccctgatctacccatcgaatttctcatcaattaa

SEQ ID NO: 18325 - DNA, 810 bp, Oryza sativa
  Clone ID: PAT_MRT4530_23895C.1
atggccgccgcgacggatacgtcgcaggagcagagcgccgacggcgacacctcgccggcgaggcggggggcgatgcctgcgcccgtgatgacggcgacggaggagtgcgtcgccagcgcggggctgaggagctggcgtggtggagatgctggcctgtcgcctgtgctgtgttgcgttgcggtgtggcttttggagcgagccggtcgggtcgaagagcccgatgcacccgacgaagaagcgcacgacgtcctccaccgtgagccagcacatgcacatctcccccgccgccaccgcgccccgccaccgctcccggatcggcacgacgaggcagtgcgcgccgtccaagaaggcgtccaccgcttccaccacactgtaaccaacaaatttcgtcagacgaaacgcatgtggcgccggcggtcaagatcgatacacgtggcgtgcgcgcgacctcgcgtggggctcgatgcggcggacgggcggcgcgccggcggcgaggaggtcggagagcgtggcctgaagcgcggcggccggggaagccaggctggccgcctcgccgtcgccgccgcagaggaagaggtgcacgtcggccatgcacaccctgccatccacttcccccttcgtcccgtcccacacggcgacggcagcgtccggaccccggccgccgccggcctcgatctcggcgatggcatcggcgacggtggaggacggcggcagccacctcaccggcggcttgccgatgcagagatccgatacatcgtgagattgcagcaccatgcaacgatacacacgtacagcgacggctgctgctag

SEQ ID NO: 18326 - DNA, 317 bp, Oryza sativa
  unsure (1)..(317): unsure at all n locations
  Clone ID: PAT_MRT4530_23896C.1
ggttgataggatcaaaacagttgtattaccacagctttttattggatggaagactgccaaatttcgcaaagactgaacctaacatagacaatcatggaacatgatgcaatgcactcagaaatataaatcaatgagtgcggtctctgtaaatgatattntcctatacttgatggctttatcacagcaatgacgggctgcgctgggattaagataacattatgacgcagctggcttaggtgtactctcaatcattcacagcagatagcttaagacagtcaggtcttgaatcttgaactctgaatatgcagagtatctgt

SEQ ID NO: 18327 - DNA, 3870 bp, Oryza sativa
  Clone ID: PAT_MRT4530_23897C.1
atggctggttttgccgatgcactgaggccggataaattcaccggtgtgcattttaagagatggcagatcagggtcactatgtggctgacagctatgaaatgcttctgggtgagtactggcaaacctgaaggagttcttactgctgaacagcagaagcaattcgaggaagccactactctctttgtgggatgcattcttagcgttcttgtgcgatcgtcatggtcgacggtgtttcatgactacaaaatggctgacaaccgttctgtagtcgaacaggctcatgagatacaaaccatggctaaggaactcgaactccttaagtgtgtcttacccgacaaatttgtggccgggtgcattattgcaaaacttcctccatcttggaggagtttcggtactgcactcaaacacaagagacaggaatactccgttgaggggttgattgcgtctcttgatgttgaggagaaagctcgggaaaaagatgccgcgtctaagggcgatggtgggcagtccagtgccaatgttgtgcacaaggcccagaacaagagcaaggggaaatacaaagctcagcagaccaccaacttcaagaagcagaagaagaacaaccacaatcctaatcaggatgagaggacttgctttgtgtgtggccaagttggtcatctggctaggaagtgtccacaacgcaaggggatgaaggcacctgcagggcagacttctaagtctgctaatgtgaccattggcaacactggagatggaagcgggtatggtaatttacctagtgttttttcagttaatcaatctactaattggtgggttgatactggggccaatgtacatgtttgtgctgacatctcattgttttcttcttatcaggtcgcacggggttccaccgtcctaatggggaatgggtcacatgcttctgttcatggtgttggcacggtagatctgaagtttacttcgggaaagatcgtgcagctgaagaacgtgcagcatgtcccttctattgacaggaatcttgttagtggctcccgtctgactagagacggatttaagttggtttttgagtctaataaagtagtcgtgtctaaacatggatattttattggtaaaggttatgagtgcggaggcctgttccgcttttccctttctgatttctgcaataagtctgtgaaccatatttgtggcagtgtggatgatgaggctaatgtttggcattcacgtttatgtcatattaattttggcttgatgtctcggctttccagcatgtgtttaattcctaagttttccattgtcaaaggttctaagtgccatagttgtgtgcaatcgaagcaacctcgcaagcctcacaaggctgccgaggagagaaacttggcaccactagaactcctacattcagatctttgtgaaatgaatggggtgttgacgaagggtggaaaacgatatttcatgacattgattgatgatgctactagattttgctatgtgtacttgttgaaaacgaaagacgaggctctagactattttaaaatttataaggcagaagttgaaaatcaacttgacagaaggataaataggcttaggtctgatcgtggtggagagtttttctcgaacgagtttgacttattctgtgaggaacatggcatcatacatgagaggacgcctccctattctcccgagtctaatgggattgctgaaaggaagaaccgcacactgactgacttggtgaatgccatgttggacaccgccggactgcctaaggcatggtggggggaggcattgttgacctcaaattatgtgttaaacagagttcctaacagaaataaggacaaaacaccatatgagatatggattggtagaaaaccatcactttcttatttgcgcacatgggggtgcttggcgaaagtcaatgtaccaataacgaagaagcgcaaacttggacctaagactgtggactgtgtttttctgggatatgctcatcatagcattgcctatagatttttaatagttaaatccgaggtaccggacatgcatgttggtacaattatggagtctcgtgatgctaccttctttgagagcttttttccaatgaaggatacacatagtggttcgaaccaaccctctgaaataattcccagttcaatcacaccaccagaacaaactgaacatacacatgaacttgtctctgaggaggatgtcagtgaagctcctcgaaggagtaagagacaaaggacggctaagtcttttggtgatgatttcactgtgtacctcgtggatgacactcctaagtcaatttcagaagcatatgcatctcctgatgcagactactggaaggaggctgtccgtagtgaaatggattccattatcgctaacgggacttgggaggtgacagagcgaccctatgggtgtaaacctgtggggtgcaagtgggtgttcaagaagaagcttaggcctgacggtactattgaaaagtacaaggctcggcttgttgctaagggctatactcagaaagaaggcgaagatttctttgacacttactcacctgttgctagattgaccacaattcgtgtgctactttccctagcagcctcacatggtcttctcgttcatcaaatggacgttaagacagcttttcttaatggagagctggatgaggagatctatatggatcaacctgatgggtttgtagttgaaggtcaagaaggcaaagtgtgcaaattgttgaagtctttgtatggtctgaaacaagctcctaagcaatggcatgagaaatttgacaaaacattgacatctgcaggctttgcagtcaatgaggcagataaatgtgtgtactatcgccatggtgggggtgagggagttattttgtgcttgtatgttgacgacatactgatatttgggacaaaccttgaggtgataaatgaggttaaatcattcttgtctcaaaattttgatatgaaagatttgggagtagctgatgttatcttaaacattaagctaattagaggtgagaatgggattactctcttgcagtcccattatgtggagaagatcttgaatcgctttggctacattgatagtaagccttctccaacaccttatgatcctagcttgttgcttcgcaagaacaagagaattgctaggaatcaactggaatactcccaaatcattggctcgttgatgtacctggctagtgcaactaggcctgatatctcctttgctgtgagcaagttgagccgatttacttctaatccgggagatgatcactggcgtgtgcttgagcgagtaatgcgctatctgaaaggtactgtggaattgggacttcactatactgggtatcctgcggtactggagggttatagtgattctaactggatctctgatgtggatgagatcaaagccactagtggatatgttttcacactgggtggtggtgctgtttcatggaggtcttgcaaacagacaattttgacgaggtcaaccatggaagcagaactaacggcactggatactgctactgttgaggcagaatggctgcgtgatctattaatggatctgcctgttgttgaaaaaccggtgccggctatccttatgaactgtgacaatcaaacgacatgtgaaaagacgattgaagtctgtcaggaaattaagaaactccggagttataacgttggattacatccaaacagcgagaaacctggcagatcccttcacgaagggactatcacgaaatgtgatagacaatgcatcgaaggagatgggtttgagacccatagcattcttgaaggaactcacctttgtgagcttgactgttggtcgcagtctatgaagattttgggtgaatcttctaggaagcttactaaagacctaggagtatga

SEQ ID NO: 18328 - DNA, 169 bp, Oryza sativa
  unsure (1)..(169): unsure at all n locations
  Clone ID: PAT_MRT4530_23898C.1
atccactcgtacgggctgacggagacgtacgggccggcgacggtgtgcacgtggaagccggagtgggacgcgctgacggcggaggagcgcgcccggntcaagtcgcggcaggggctccaccacgtcgggctggaggcggcggacgtnaaggacccggcgacgatgcgga

SEQ ID NO: 18329 - DNA, 3045 bp, Oryza sativa
  Clone ID: PAT_MRT4530_23899C.1
atggagcagaaggacagcggcggcggcggcggtgggttggcgcggcggttgatgctggatgcgagcgggagggagatggactcgccgcggttcagggcgatcctgcgggcgacgagcgggcggcggaagcgggcgcccgacgtgaagagcttctcgcacgagctcaacattcgcgggccgctcctccacccgctgcagcagcggaagccgcgcgggtgcgtgaacagcccggaggagttcatcggcgccatcaggacaaagttcatcaggctcaaggaggaggtcgacgccgagctcggggtgttcgccggggacctcgtcggcgcgctcgacaaggccgacggggacgaggagcgcgtcgcgctcgaggacctgctcgtcgtcgcgcagcggtgcgccgagatgagccccgaggagctctgggtcaagtgcgagtgcatcgtccagggcctcgacgaccgccgccaggagctcaccgccggcgtcctcaagcaggcgcacacccgcgtcctcttcatcctcacgcgctgcacccgcctcctccagttccgcaaggaaggcggcggatacgtcgccgccgacgacaagcagcacgtcctcagcctgcaccagctcagcgacctcggcctctaccccttcaaggtcgccggcggctccagcgagctcggccgcaagagcacctccagcttgaccgagctcaaggagaggctcatcaggcggaggatgctggagcacaagcaactcaccctcgacttctcggcgggccgtgtcatttcgtcagacaccggcggcgattccccgggcagcggcggcaagatctcatcctggaagaagcttccatcccctgccgagaagaccctgcacaaggttacggaaccgacaacggaggagaagaccacccctacaaagaagaaggccattacgaggaacaaggtcgccgtggatgagatcgtcgagaggattgacgcggctagcattcaccccgacggattgtcatatcttggggactctgctgtgaagctcgaggttccatctgggttcccagaggctcagcagatcatcgtcgacgggaagccgaggatgatatgcaggatctgtgactttgagatccccatggtatgcgcagaagggcacttcatagtgtgcacattagctgatcggtgtgattccaagggcctgaatacggaccagcggctgcagagggttgccgaggtgctcgggagggttttgggttgctttgaatcgaagagcccgcaaactgcagaatgtaatcataatgagactgcaagaggtagcacgtcgagtttaacggaatccgatggatccatggatcatgatattctgtctcatctgttgacagtgccatcgacagagttgttttcagagggagcactcacaccagcgtcaggcagcatgccacagtcaccattgctgacaccaagaactagccacgcagagtcacagctgactaaacacaaggcattcgtggaactagagaactttcagcaggttgaaagcttaatgactattgctagaggcatcgagagaataaaaaactctgagtacaactcgcttgaggacttgagctcttatctagaagatctaaatgctgtcattgacacaagaaaagtggatgcccttgttgtggagacatttggaagaaggatagctaaattactacaggagaaatttattcaactatgcggacaaatagaggactcaaacactgattcattaggttcaatagacgaagatggtcctatggagagtagtgtaagctcgagaacaagccagatgaatggtaaattcaaagatcgtacctcaattgaggactttgaaattataaagccaatcagccgtggtgcatttgggcgtgtgtttcttgcaaagaaaagggtaacaggagacctttttgccatcaaggtgctcaaaaaggctgatatgatccgcaagaatgcagtggaaagcatcttggcagaacgtgatatcttaatatcagctcgcaacccatttgtggttcgatttttctactccttcacatgtagggaaaacctttatcttgttatggagtacttgaatggaggagatctgtattccctcttgagaaacctaggttgtttagatgaagatatggcaaggacgtatatggctgaacttgttcttgctttggagtatctgcattctatgaatgtgattcatcgtgatttgaagcccgataaccttttgatctcccgtgatggccatataaagttgactgattttgggctatcaaaagttggtcttatcaatagcaccgatgatttgtctggtccagatgtcagcaatgttcttgttggtgatcatcaacctgcagatgcagaacaacgtgcacaaaagcgagagcaaaggcaaaaacaggcagctgtgggtactccagactatttggcccctgagatactgctagggatgacccatggtccaactgcagattggtggtcagttggcgtcattctctttgagcttcttgtgggaattcctccattcaacgctgagcatccgcagataatatttgataatataatgaatcgggaaataccttggccacaagtaccagaggaactgagtttcgaagcatatgacttgattgacaaatgctattttaactcagttaactttcatgtcaggttgctaattgaaaaccctgtacaaagattaggagcaactggtgctggagaggtaaaggctcatcctttcttcaaagatataaattgggatatgattgccagacaacaggcggatgaatttggtagcatggaagaattcggagctccatcactgtcagtgaaatattctttcagcaatttctcattcaagtccaatatatatgccaaaaatgcttgctgtgattggcaaatggaagttgcagatcttactctcaaggatgaattcagaataggaaaatactttacagctaattaccagtctttcacctacaccatccatgatcaaccacaaaagaagagaatccaaacgagccaggaaatcaccacacaccacaagaattaa

SEQ ID NO: 18330 - DNA, 478 bp, Oryza sativa
  unsure (1)..(478): unsure at all n locations
  Clone ID: PAT_MRT4530_2389C.1
gccccacgagaagcttctcaaatggttacaatggcagaattacacctgactaagaaaccgaagcccaaacaaacaaacagtttgtctgtgagtcagtttaaatgactagcctataaacaaactagtggcatattcctaacctcactaaaattctgttgaaagcaaacctgcatatgtgtaaggtctatttggtagagttctaactcctaaatttagctctacgagttacatctagagtagagttgtggaacagtctaaactcagcttcacatctctagttcattttgtgagagtgctccacctagctccgctcccattatagataaagctgaaaatattaggctgagctccagctccaagagaggtagagctgaagctgaagttgtgccaaacaggcctgtantattcgtgggctctaggatttgaactctggtgggtaaagtgatgcacccactacttgaccaccatgggtcgatac

SEQ ID NO: 18331 - DNA, 204 bp, Oryza sativa
  unsure (1)..(204): unsure at all n locations
  Clone ID: PAT_MRT4530_238C.1
gagagaagcagcgtggagaggggagggccggccgggcagcagcacactggtagcctggtagcagctccnntcagttctttntccacctcagtgactcnnnccgccgccgggggagcaaagggccgtacgagcgcggnggcnacgngnagggggacggaagcnctngcnccnatngcngnagcnacgtngacnaagcnaagngcc

SEQ ID NO: 18332 - DNA, 617 bp, Oryza sativa
  Clone ID: PAT_MRT4530_23900C.1
gcacgaggagccgaccaagagacgaggtatatatctcgacgacgagacgaagcaaagcaagcaaggtgtgatctgatccaagtgttttggagaatggcgtccatgatgggaggagacttcgtggaggcgtacgtgctcaagaacgcctacaaggagaagctcaggcgcatggaggccgcggaggcggctgcggcggcggcggtggccgggaagaaggacgtcgccgccgccgccgatggctctgcggggcagaagaaggcggctgcgggcggcgggatgtttgggttcatgaagaagaaggtgcaccccagagcggcggagacggcgccggcgccggccatggaaaccagtagcgcttgatcgatcaagagctggccttcttcctcccctcctcctgttgattccgctcttttgctactagttgagcttgttcctgggtttaattatattattactagtagtaatctccagctggctgttcgataggatgatgaagattgtgtagtgtgttctttacttgtttctcttcttttgaagaggtgtgtgtaactcactccatgtaaatgttggttcatttgttgctttctttacttgaaatgggagtaaaagaaaagtaa

SEQ ID NO: 18333 - DNA, 5876 bp, Oryza sativa
  Clone ID: PAT_MRT4530_23901C.1
atggccggcttttctttgatcagttgcgctgtgggtatcatcttcttctccgtttgctacctgcctgcggctcctgccgccgccttgtccttcaactactccaccttcagctcggacaaccaggaggacttcacattcgaaggcaacgcctccatccacgacgggtgtattgatttcgttgcgaacgggacctggggcaggggctacaggccctacagcaccggacgggtgtcctacaaattgccggtgcggctctgggacgctgccaccggcgaggtggccagcttcaccacaaccttctccttcaacatcacgccgatgaatattagcgacaagggcgatggcatggccttctttctcgtcagctatccatcaaggatgccgctgaccgccgacggcgacactctcggcctcgtgagcaacaaacccgaaaacgctccggccggcggcgaccaattcgtcgccgtcgagtttgacacctacccaaaccccggcttggaccctaacgctaccggtgaccacatcggcatcgacatcaactcagtccgatcgttgacgaccgaacccttgaccaactccagcctcatcggtaacatgaccgccatcgtccactacgatagcagttcgagcatcctgtcggtgaagctgtggataaatgacacgacgaagccgccttacaaccttagctacgaaattgttgatctcaagaaaaaattgccggagaacgtcaccatcggcttctcggcggcaacgggcgcatcagatgagctacaccagctgacttcttggtacttcaactcgagctcgtcgttcgagcataagcatggacgtgccggggttgtagcgggagccaccgtcggcgcgacgttgttcgttgtgctgctcttcactgctgcagctatcctcatacggcgacgtcggatcaaaaacaggaaggaggcagaggatgagcaggacataagctcggacagcgaagacaatgacggcgagcccatcgtggagattgagatggggactgcgccaaggcgattgccatactatgagctcgtcgaggcgaccaagaacttcgcggtggaggagaagctcgggcaaggcggcttcggttcggtgtaccgaggctacctaagagagcagggcctcgccgtcgccattaaacgcttcgccaaagattcctccaagcaagggaggaaggagtataagtcggagatcaaggtgataagccggctgcgccaccgcaatctcgtgcagctcgtcggctggtgccatggacgcaacgagctcctccttgtctatgagctcgtccccaaccgcagtcttgacgtccatctccatggcaatggcaccttccttacttggccaatgaggatcaagattgttctcgggctcggatcagcactactctacctccaccaagagtgggaacaatgtgtcgtgcaccgtgacatcaaaccaagcaacgtcatgttggatgaatccttcagtgccaagctaggtgacttcgggctcgcgaggctcatcgaccacaccatcggtataaagacaatgaccgccatgtcaggaacaccgggctaccttgaccctgaatgtgtgatcaccggtagagcgagtgccgagtcctacgtttacagtttcggcattgtcctactggaggtggcatgcgggaggagaccgatgagcctactagacagccagaataacggcgtcttccgactggttgagtgggcctgggatttgtatggcaagggagatgttctcatggccgccgacaagcgtctcgacggcgactacgattctgcggagatggagcgtgtcatcgctctcgggctctggtgcgtgcaccctgacccaagtgtgcgaccgtctatcagagacgccatggccatactccagtcgagtggaggccaactgccagtgctatcggccaagatgcccgtgccaatgtacgcgccgccgatggcctcgtttgacgggctagctgtttgcgtcatctacagggatgtcgtcgtcctcaggtgtgacgcagtcgtcgtccacatcgacgacgagcggccatgctattcacacctcgtgttcctcgactactccatcccgatcgtcagcgtgcaccggcaatcgggagagcaggtctccggaacctctgccttcgacgtcctgcaccgggagaaggcggcaataaggcgctgtgattttactatggctggttttgccgatgcactgaggccggataaattcaccggtgtgcactttaagagatggcagatcagggtcgctttgtggctgacagctatgaaatgcttctgggtgagtactggtaaacctgaaggaattcttgctgctgatcagcataagcaattcgagaaagccactactctctttgtgggatgcattcttagcgttcttggcaatcgtctggtcgaggtgtatatgcacatgaccaacgctaaggagttgtgggatgcactgaatactaaattcggtgctactgatgctagcaatgatctgtacatcatggagcagtttcatgactacaggatggctgacaaccgttctgtagtcgaacaggctcatgaggaatactccgttgaggggttgatagtgtctcttgatgttgaggagaaagctcgggaaaaggacgccgcgtctaagggcgacggtgggcagtccagtgccaatgttgtgcacaaggcccagaacaagagcaaggggaaatacaaagctcagcagaccaccaacttcaagaagcagaagaagaacaacaacaatcctaatcaggatgagaggacttgctttgtgtgtagccaacctagtcatctggctaggaagtgtccacagcgcaaggggatgaaggcacctgcagggcagacttctaagtctgctaatgtgaccattggcaacactggagatggaagcgggtatggtcgcacggggttccaccgtcctaatggggaatgggtcacatgcttctgttcatggtgttggcacggtagatctgaagtttacttcgggaaagatcgtgcagctgaagaacgtgcagcatgtctcttctatcgacagaaatcttgttagtggctcccgtctgactagagacggatttaagttgttttttgagtctaataaagtagtcgtgtctaaacatggatattttattggtaaaggttatgagtgcggaggcctgttccgcttttcctttctgatttctgcaataagtctgtgaaccatatttgtggcagtgtggatgatgaggctaatgtttagcactcacgtttatgtcatattaattttggcttgatgtctcggctttccagcatgtgtttaattcctaagttttccattgtcaaaggttctaagtgccatagttgtgtgcaatcgaagtaacctcgcaagcctcacaaggctgccgaggaaagaaacttggcaccactagaactcctacattcagatctttgtgaaatgaatggggtgttgacaaagggtggaaaacgatatttcatgactttgattgatgatgctactagattttgctatgtgtacttgttgaaaacgaaagacgacgctctagactattttaaaatttataaggcagaagttgaaaatcaacttgacagaaagataaaaagacttaggtctgatcgtggtggagagtttttctcaaacgagtttgacttattctgtgaggaacatggcatcatacatgagaggatgcctccctattctcccgagtctaatgggattgctgaaagaaagaaccgcacactgactgacttggtgaatgccatgttggacactgcgggactacctaaggcatggtggggggaggcattgttgaccttgaatcatgtgttaaacagagttcctaacagaaataaggacaaaacaccatatgagatatggattgggagaaaaccatcactttcttacttgcgcacatggggtgcttggcgaaagtcaatgtaccaataacgaagaagcgcaaacttggacctaagactatggactgtgtcattctgggatatgcttatcacagcattgcctatagatttttaatagttaaatctgaggaacctgacatgcatgttggtacaattatggagtctcgtgatgctaccttctttgaaagctttttcccaatgaaggatacacatagtagttcgagccaatcatctgaaataattcccagttcaatcacaccaccagaacaaactgaacatacacatgaacatgtcactgaggaggatgacagtgcagctccacgaaggagtaagagacaaaggacggctaagtcttttggtaaggattttactttgtacctcgtggatgacactcctaagtcaatttcagaagcatatgcatctcctgatgctgactactggaaggagactgtccgtagtgaaatggattccattatcgctaacgggacttgggaggtgacagagcgaccctatgggtgtaaacctatgggatgcaagtgggtgttcaaaaagaagcttaggcctgacggtactattgaaaagtacaaggctcggcttattgctaagggctatactcagaaagaaggcggagatttctttgacacttactcacctgttgctagattgaccacaattcgtgtgctactttccctagcagcctcacatggtcttctcgttcatcaaatggacgttaagacaacttttctgaatggagagctggatgaggagatctatatggatcagcctgatgggtttgtagttgaaggtcaagaaggcaaggtgtgcaaattgttgaagtctttgtatggtctgaaacaagcttctaagcaatggcatgagaaatttgacaaaacattgacatctgcaggcttcgcagtcaatgaggcagataaatgtgtgtactatcgccatggtgggggtgagggagttattttatgcttgtatgttgatgacatactgatatttgagacaaatcttgaggtgataaatgaggttaaatcattcttgtctcaaaattttgatatgaaggatttgggagtagctgatattatcttaaacattaagctaattagaggtgagaatgggattacactcttgcagtcccattatgtggagaagatcttgaatcgctttggctatattgatagtaagccttctccaacacctgatgatcctagcttgttgcttcgcaagaacaagagaattgctaggaatcaactggaatactcccaaatcattatctcgttgatgtacctggctagtgcaactaggcctgatatctcctttgctgtgagcaagttgaaccgatttacctctaatccgggagatgatcactggcgtgtgcttgagcgagtaatgcgctatctgaaaggtactgtggaattggggcttcactatactgggtatcctgcggtactggagggttatagtgattctaactggatctctgatgtggatgagatcaaagccactagtggatatgtcttcacactgggtggcggtgctgtttaatggaggtcttgcaaacagaccattttgacgaggtcaaccatggaagcagagctgatggcactggatactgctactgttgaggcagaatggctgcatgatctattaatggatctgcctattgttgaaaaatcgacatgtgaaaagacgattgaagtctgtcaggaaattaagaaactctagagttataacgttggattacatccaaacagctagaaacctggcagatcctttcacgaagggactatcacgaaatgtgatagacaatgcatcgaaggagatgggtttgagacccatagtattcttcaaagaactcacctttgtgagcttgattgttggtcgcagtctatggagattttgggtgaatcttctaggaagcttactatagacctaggagta

SEQ ID NO: 18334 - DNA, 3597 bp, Oryza sativa
  Clone ID: PAT_MRT4530_23902C.1
atggctggttttgccgatgcactgaggccggataaattcaccggtgtgcattttaagagatggcagatcagggtcactctgtggctgacagctatgaaatgcttctgggtgagtactggcaaacctgaaggagttcttactgctgaacagcagaagcaattcgaggaagccactactctctttgtgggatgcattcttagcgttcttggcgatcgtctggtcgagtttcatgactacaagatggctgacaaccgttctgtagtcgaacaggctcatgagatacaaaccatggctaaggaactcgaactccttaaatgtgtcttacccgacaaatttgtggccgggtgcattattgcaaaactacctccatcttggagaagtttcggtactgcactcaaacacaagagacaggaatactccgttgaggggttgatagcgtctcttgatgttgaggagaaagctcgggaaaaagatgccgcgtctaagggcgatggtgggcagtccagtgccaatgttgtgcacaaggcccagaacaagagcaaggggaaatacaaagctcagcagaccaccaacttcaagaagcagaagaagaacaacaacaatcctaatcaggatgagaggacttgctttgtgtgtggccaagttggtcatctggataggaagtgtccacagcgcaaggggatgaaggcacctgcagggcagacttctaagtctgctaatgtgaccattggcaacactggagatggaagcgggtatggtaatttacctactgttttttcagttaatcaatctactaattggtgggttgatactggggccaatgtagcacggggttccaccgtcctaatggggaatgggtcacatgcttctgttcatggtgttagcacggtagatctgaagtttacttcgggaaagatcgtgcagctgaagaacgtgcagcatgtcccttctatcgacaggaatcttgttagtggctcccgtctgactagagacggatttaagttggtttttgagtctaataaagtagtcgtgtctaaacatggatattttattggtaaaggttctaagtgccatagttgtgtgcaatcaaagcaacctcgcaagcctcacaaggctgtcgaggagagaaacttggcaccactagaactcctacattcagatctttgtgaaatgaatggggtgttgacgaagggtggaaaacgatatttcatgacattcattgatgatgctactagattttgctatgtgtacttgttgaaaacgaaagacgaggctctagactattttaaaatttataaggcagaagttgaaaatcaacttgacagaaagataaaaaggcttaggtctgatcgtggtggagagtttttctcgaacgagtttgacttattctgtgaggaacatggcatcatacatgagaggacgcctccctattctcccgagtctaatgggattgctgaaaggaagaatcgcacactgactgacttggtgaatgccatgttggacaccgcgggactgcctaaggcatggtggggggaggcattgttgacctcaaatcatgtgttaaacagagttcctaacagaaataaggacaaaacaccatatgagatatggattggtagaaaaccatcactttcttatttgcgcacatgggggtgcttggcgaaagtcaatgtaccaataacgaagaagcgcaaacttggacctaagactgtggactgtgtttttctgggatatgcttatcatagcattgcctatagatttttaatagttaaatccgaggtaccggacatgaatgttggtacaattatggagtctcgtgatgctatcttctttgagagctttttcccaatgaaggatacacatagtggttcgaaccaaccatctgaaataattcccagttcaatcacaccaccagaacaaactgaacatacacatgaacttgtctctgaggaggatgtcagtgaagctcctcgaaggagtaagagacaaaggacggctaagtcttttggtgatgatttcactgtgtacctcgtggatgatactcctaagtcaatttcagaagcatatgcatctcctgatgcagactactggaaggaggctgtccgtagtgaaatggattccattatcgctaacgggacttgggaggtgacagagcgaccctatgggtgtaaacctgtggggtgcaagtgggtgttcaagaagaagcttaggcctgacggtactattgaaaagtacaaggctcggcttgttgctaagggctatactcagaaagaaggcgaagatttctttgacacttactcacctgttgctagattgaccataattcgtgtgctactttccctagcagcctcacatggtcttctcgttcatcaaatggacgttaagacagcttttcttaatggagagctggatgaggagatctatatggatcaacctgatgggtttgtagttgaaggtcaagaaggcaaagtgtgcaaattgttgaagtctttgtatggtctgaaacaagctcctaagcaatggcatgagaaatttgacaaaacattgacatctgcaggctttgcagtcaatgaggcagataaatgtgtgtactatcgccatggtgggggtgagggagttattttgtgcttgtatgttgacgacatactgatatttgggacaaaccttgaggtgataaatgaggttaaatcattcttgtctcaaaattttgatatgaaggatttgggagtagctgatgttatcttaaacattaagctaattagaggtgagaatgggattacactcttgcagtcccattatgtggagaagatcttgaatcgctttggctacattgatagtaagccttctccaacaccttatgatcctagcttgttgcttcgcaagaacaagagaattgctaggaatcaactggaatactcccaaatcattggctcgttgatgtacctggctagtgcaactaggcctgatatctcctttgctgtgagcaagttgagccgatttacctctaatccgggagatgatcactggcgtgcgcttgagcgagtaatgcgctatctgaaaggtactgtggaattggggcttcactatactgggtatcctgcggtactggagggttatagtgattctaactggatctctgatgtggatgagatcaaagccactagtgcatatgttttcacactgggtggtggtgctgtttcatggaggtcttgcaaacagaccattttgacgaggtcaaccatggaagcagagttgacggcactagatactgctactgtttaggcagaatggctgcgtgatctattaatggatctgcctattgttgaaaaaccgacatgtgaaaagacaattgaagtctgtcaggaatttgagaaactccggagttataacgttggattacatccaaatagctagaaacctggcatatcccttcacgaagggactatcacgaaatgtgatagacaatgcatcgaaggagatgggtttgagacccatagcattcttgaaagaactcacctttgtgagcttgactgttggtcgcagtctgtagagattttgggtgaatcttctaggaagcttactaaagacctaggagta

SEQ ID NO: 18335 - DNA, 657 bp, Oryza sativa
  Clone ID: PAT_MRT4530_23903C.1
atgcgggacccaccggtcagcgacccgggagagagaaaggggtggcggctcgcgggcccactggtcagtggcacggggaggagagagggcgccgacacgcgggacccacaggtcagtggcgcgggagagggaaaggaaggggcggcggcactcggcgcgacccggctcaagaccggccgaccggccgcggcgacggcgacggcgcgcgcgcgaacgggttgccggcgacggcacccggcggcggaggcgacgcaaaagcggcggcagcggacggtggcaacgacccaaagcgacggcgagcgcgggtggcggcgacgcacggggaaacggggaaggagaggagaggagatgcctcaccgagggtggccggcgcggaggaagacgatggcgaacggcgacggcaggccacgggaggcgacggcgacggcggacgagcttcggcgtgccctaaggaaggagaagagagggattagagagagggagatagatcccggcgatcggaaaccatggccgaaggcggcggtggagatggagctcacccgtgcgcgtggggatgagggctccggcgacgaacctcgacggaggaggggtggacgaggtggacctcggccgcgcgaagctaacggcgacgacggcgcaagacggcggcgagcctag

SEQ ID NO: 18336 - DNA, 3515 bp, Oryza sativa
  Clone ID: PAT_MRT4530_23904C.1
atggctgacaaccgttttgtagtcgaacaggctcatgagatacaaaccatagctaaggaactcgaactccttaagtgtgtcttacccgacaaatttgtggccgggtgcattattgcgaaactacctccatcatggagaagtttcggtactgcattcaaacacaagagacaggaatactccattgaggggttgatagcatctcttgatgttgaggagaaagctcgggaaaaagacgccgcgtctaaggatgatgctcaacagaccaccaacttcaagaggcagaagaagaacaacaacaatcctaaccaggatgagaggatttgctttgtgtgtgggcaacctggtcatctggctaggaagtatccacagcgcaaggggatgaaggcacctgcagggcagacttctaagtctgctaatgtgaccattggcaacactggagatggaagcgggtatggtaatttacctactgttttttcagttaatcagtctactaattggtgggttgatactggggccaatgtcgcacggggttccaccttcctaatggcgaatgggtcacatgcttctgttcatggtgttggcacggtagatgtgaagtttacttcgggaaagatcgtgcagctgaggaacgtgcagcatgtcccttctatcaacaggaatcttgttagtggctcccgtctaactagagatggatttaagttggtttttgagtctaataaagtagtcgtgtctaaacatggatattttattagtaaaggttatgagtgcggaggcctgttccgcttttccctttctgatttctgcaataagtctgtgaacaatatttgtggaagtgtggatgatgaggctaatgtttggcactcacgtttatgtcatattaattttggcttgatgtctcggctttccagcatgtgtttaatttctaagttttccattgtcaaaggttctaagtgccatagttgtgtgcaatcgaagcaacctcgcaagcctcacaaggctgccgaggagagaaacttggcaccactagaactcctacattcagatctttgtgaaatgaatgaggtgttgacgaagggtggaaaacaatatttcatgacgttaattgatgatgctactagattttgctatgtgtacttgttgaaaacgaaagacgaggctctagactattttaaaatttataaggcagaagttgaaaatcaacttgacagaaagataaaaaggcttaggtctgatcgtggtggagagtttttctcgaacgagtttgacttattctgtgacgaacatgacatcatacatgagaggactcctccctattctcccgagtctaatgggattgctgaaaggaagaaccgcacactgactgacttggtgaatgccatgttggacaccgcgggacaacctaaggcatggtggggggaggcattgttgaccacgaatcatgtgttaaacagagttcctaacagaaataagaacaaaacaccatatgagatatggattgggagaaaaccatcactttcttatttgcgcacatgggggtgcttggcgaaagtcaatgtaccaataacgaagaagcgcaaacttggacctaagactgtggactgtgtctttctaggatatgctcattacaacattgcctatagatttttaatagttaaattcgaggtacctgacatgcatgttggtacaattatggagtctcgtgatgctacctttttcgagagctttttcccaatgaagatacacatagtggttcgagccaaccctctgaaataattcccagttcaatcacaccaccataacaaactgaacatacacatgaacatgtcactgaggaggatgtcagtgaagctcttcgaaggagtaagagacaaaggacggctaaatcctttggtgatgatttcactgtgtacctcgtggatgacactcctaagtcaatttcagaagcataggcatctcctgatgcagactactggaaggaggctgtccgtagtgaaatggattccattatcgctaactggacttgggaggtgacagagcgaccctatggatgtaaacctgtggggtgcaagtgggtgttcaagaagaagcttaggcctgacggtactattaaaaagtacaaggctcggcttgttgctaagggctatactcagaaagaaggcgaagatttctttgacacttactcacctgttgctagattgaccacaattcgcgtgctactttccctagcagcctcacttggtcttctcgttcatcaaatggacgttaagacagcttttcttaatggagagctagatgagtagatctatatggatcaacctgatgggtttgtagttgaaggtcaagaaggcaaagtgtgcaaattgttgaagtctttgtatggtctgaaacaagatcctaagcaatggcatgagaaatttgacaaaacattgacatctgtaggctttgcagtcaatgaggcagataaatgtgtgtactatcgccatggtgggggtgagggagttattctgtgcttctatgttgacgacatactgatatttgggacaaaccttgaggtgataaatgagattaaatcattcttgtctcaaaattttgatatgaaggatttgggagtagctgatgttatcttaagcattaagctaattagaggtgataatgggattacactcttgcagtcccattatgtggagaagatcttgaatcgctttggctacattgatagtaagccttctccaacaccttatgatcctagcttgttgcttcgcaagaacaagagaattgctaggaattaactggaatactcccaaatcattggctcgctgatgtacctggctagtgcaactaggcctgatatctcctttgctgtgagcaagttgagccggtttacctctaatccgggagatgatcactggcgtgcgcttgagcgagtaatgcattatctgaaaggtactatggaattggggcttcactattctgggtatcctgcggtactggagggatatagtgattctaactggatctctgatgtggatgagatcaaagccactagtggatatgtcttcacactgggtggtggtgctgtttcgtggaggtcttgcaaacataccattttgacgaggtcaaccatggaagcagagctgacggcactggatactgctactgttgaggcaaaatggctgcgtgatctattaatggatctgcctattgttgaaaaaccggtgccggctatccttatgaactgtgacaatcaaacgacatgtgaaaagacgattgaagtctgtcaggaaattgagaaactccggagttataacgttggattacatccaaacagctagaaacctggcagaacccttcacaaagggactatcacgaaatgtgatagacaatgcatcgaaggagatgggtttgagacccattgcattcttgaaagaactcacctttgtaagcttgactgttggtcgcagtctatggagattttgggtgaatcttctaggaagcttactaaagacctaggagta

SEQ ID NO: 18337 - DNA, 382 bp, Oryza sativa
  unsure (1)..(382): unsure at all n locations
  Clone ID: PAT_MRT4530_23905C.1
ggacgtcatgccagccggtggcatagttctcgtgaagcccggacgagtactagcgtatccgctgagtacagattatcgagacgtcgcctcgcagctgatcagttctttatgggtgatactttggttcctggtgcctcctagtcccagtgaaggatcaggggtgtctgtagaactgtagtacaagattacttggcctttttattttctttctggacagctactagattttttttattgatcccatgaagcacatgtttggtgtctgtatatactatgagagaagaggattggagatcaggcatatatgtatgctgaggttttagtggcaaatataggatggaaaagatggtaaatattaagaggaaaaaaaaaannnnaanaa

SEQ ID NO: 18338 - DNA, 4199 bp, Oryza sativa
  Clone ID: PAT_MRT4530_23906C.1
ctagaagagagcatgcggcgtcatgatgtagtcgtcggtatacacagcgcgctcctcgaatgacattggctcgccgtggagcttcacccaggttgtgacatcgttcggccgttgtcgagcatgtaggtttcgtgtagtcccctgtggagaggaggagaccatggtgatatgacctgtggtgcatggtccaagcgacatgatgtggcagctcaaaaggttgcggtaagggtgaccatgtctcgccaatgccagcccggtgaacactttccctgagctggtgtcagtgatgtcgctctcaacattgttggcgccgttggattttccggtgatgccgatgatcttcgaaccaaccttgatgaagtccatgccaataaggtgagcgatagggggtttggtgagctcttcaccaatgttgaagatgctatgtcaatgcagtgtgcacgacatagccgaagtggtcattgtggccatcttgcaagatcagctagaggcgtaaaaaggcttcttggtcctctaatgatggtagagccgctgatcctcatgcatcggtgttaccatctgccacaaaccagagtcgccaaagtttgttgtctagcattgaaccccaaacaacggtgggactctggctcagggaacatcaaggagatcaaaattcgtggcgagctcggactcagagatgaacaatcatcgtcagacgctgcactcacgtggcaatcgacgcggacactgagaaaacatcttctcatacgacgtggtgaatgttggtcggagtactcctccatcgtcaacaccgacgacgaagcaaaggcgacctgcaactcattttgtgagacatgttggaagattctacggtttcgctccaaccagacattccaccagctgaacccgttcctcaatctccgaaacagatgtaatcgggttaagcatggcaatccaatggttgtcttgcagttccacctggagattatttccctttcttttggcaagcttgaaaatagagggcgcaatgtgttgagggggagactgaggtatttgcaggggaaagatttcaggcttcctgtgaaagaagggagaaggccttcaacatcaataccagagcatgatattgggaagatttcagttttgattaaatcattatatgcctataatctcaacaatccaaaaacttattataggcactgtgattttactatggctggttttgccgatgcactgaggccggataaatttaccggtgtgcattttaagagatggcagatcagggtcactctgtggctgacagctatgaaatgcttctgggtgagtactggcaaacctgaaggagttcttactgctgaacagcagaagcaattcgaggaagccactactctctgtgtaggatgcattcttagcgttcttggcgatcgtctggtcgaggtgtatatgcatatgaccgacgcaaaggagttgtgggatgcactgaatactaaattcggtgctactgatgctagcaatgatctgtatatcatggagcagtttcatgactacaagatggctgacaaccgttctgtagtcgaacaggctcatgagatacaaaccatggctaaggaacttgaactccttaagtgtgttttacccgacaaatttgtggccaggtgcattattgcgaaactacctccatcttggagaagtttcggtactgcactcaaacacaagagacaggaatactccgttgaggggttgatagcgtctcttgatgttgaggagaaagctcgggaaaaagatgccgcgtctaagggcgatggtgggcagtccagtgccaatgttgtgcacaaggcccagaacaagagcaaggggaaatacaaagctcagcagaccaccaacttcaagaagcagaagaagaacaacaacaatcctaatcaggatgagaggacttgctttgtgtgtggccaacttggtcatctggctaggaagtgtccacagcgcaaggggatgaaggcacctacagggcagacttctaagtctgctaatgtgaccattagcaacactggagatggaagcgggtatggtaatttacctgctattttttcagttaatcagtctactaattggtgggttgatactaggtccaatgtcgcacggggttccaccgtcctaatggggaatgggtcacatgtttctgttcatggtgttggcacggtagatctgaagtttacttcgggaaagatcgtgcagctgaagaacgtgcagcatgtcccttctatcgacaggaatcttgttagtggctcccgtctgactagagctggatttaagttggtttttgagtctaataaagtagtcgtgtccaaacatggatattttattggtaaaggttatgagtgcggaggcctgttccgcttttccctttctgatttctgcaataagtctgtgaaccatatttgtggcagtgtggatgatgaggctaatgtttggcactcacgtttatgtcatattaattttggcttgatgtctcggctttccagcatgtgtttaattcctaagttttccattgtcaaaggttctaagtgccatagttgtgtgcaatcgaagcaacctcgcaagcctcacaaggttgccgaggaaagaaacttggcaccactagaactcttacattcagatctttgtgaaatgaatggggtgttgacaaagggtggaaaacgatatttcatgactttgattgatgatgctactagattttgctatgtgtacttgttgaaaacgaaagacgaagctctagactattttaaaatttataaggcagaagttgaaaatcaacttgacagaaagataaaaagacttatgtctgatcgtagtggagagtttttctcaaacgagtttgacttattctgtgaggaacaggacatcatacatgagaggacgcccccctattctcccgagtctaatgggattgctaaaaggaagaaccgcacactgactgacttggtgaatgccatgttggacactgcgggactacctaaggcatggtggggggaggcattgttgacctcaaattatgtgttaaacagagttcctaacagaaataaggacaaaacaccatatgagatatggatcgggagaaaaccatcactttcttacttgcgcacatgggggtgcttggcgcaagtcaatgtaccaataacgaataagcacaaacttggacctaagactgtagactgtgtctttctgggatatgcttatcacaacattgcctatagatttttaatagttaaatctgaggtacctgacatgcatgttggtcaattatgaagtctcgtgatgctaccttttttgagagcttttttccaatgaaggatacacatagtagttcgagccaaccctctgaagtaattcctagttcaatcacaccaccagaacaaactgaacatacacatgaatatgtcactgaggaggatgtcagtgaagctcctcgaaggagtaagagacaaaggacagctaagtcctttggtgatgatttcattgtgtacctcgtggatgacactcctaagtcaatttcagaagcatatgcatctcctgatgcagactactagaaggaggttgtctgtagtgaaatggattccattatcgctaacgggacttgggaggtgacagagcgaccctatgggtgtaaacctgttgggtgcaaatgagtgttcaagaagaagcttaggcctgatggtactattgaaaagtacaaggttcggcttgttactaagggctatactcagaaagaaggcgaatatttctttgatacttactcacctgttgctagattgaccacaattcgtgtgctactttccctagcagcctcacatagtcttctcgttcatcaaatggacgttaagacagcttttcttaatggagagctggatgaggagatctatatggatcaacctgatgggtttgtagttgaaggtcaagaaggcaaaatgtgcaaattgttgaagtctttgtatggtttgaaacatgctcctaagcaatggcatgagaaatttgacaaaacattgacatctacaggctttgcagtcaatgaggcagataaatgtgtgtactatagccatggtgggggtgagggagttattctgtgcttgtatgttgatgacatactgatatttgggacaaaccttgaggtgataaatgaggttacatcaaccctctctcttcatcgacctgtgtcggaggcg

SEQ ID NO: 18339 - DNA, 1752 bp, Oryza sativa
  Clone ID: PAT_MRT4530_23907C.1
ctggatttaccttctgcctcagctccggcgagggaggctgccggcggcgaggcatttgtaccgtctctcatcctcacccgctctctccccccgttgcatcgtcccttgcgttgtggacgtttcttgctctgcgaacgcgacgcccgccacctgttcgacggaatgcgtccaggggagacggggaaaagggttaagggatccccatctcgaagcggcggcgccgacgaggatcggattggatgccttccggatggggtcctccaccacatcctcgggttcctgccggcgccggacgccgtgcggacgtgcctgctcgcacggcgctggcgccacctctggaagtccgccacgggcctgcgcatctccgaaggctacggtgtggaaaagctccatgatttcgtgcaccacctgctgctcctccgcgggggcgcgcccctcgacacgtttgagctaggttccatcgatttggccgagggagacaaccgcagcatgaacctctggttccggcatgccctgctgtgccaagtccgggtgctccggctgaatgtcttcggcctcgagctacacgacctgcctttcgtctcccggcacttggtgaagctagagcttcgttttgtgatattgatgcacagtttccttgatttctctagctgtccggtgctagaaaatttagagattgtctcctccgagttgtcagatgccaagaggatctcttcccagtccctgaaacacctcaaccttactcattgcactttcagcgaaaatgtccgaattcgtattgatgtgccgaatctactttccctgtggctacaagattatcgctgccggactcctgtgtttgaggttatgccgctattagtgaaagcatttgtcagtgtaaccggtgactctggggattggttaacttgtacaagtggtaatgctgactccgaggaatgccctcatgacgattgtggaaaatgggaaatgtccagtggttgtttcttgccctgcggccgcgacgcccgccacctgttcgacggaatgtctcctccaggggaggcggggaggaggggcaagggagccgcgcgcccgagcgacgatcggatagggcacctgccggacgaagtactgcatgacatcatcgggctcctgccggcgccggacgccgtgcggacgtgcgtgctggcgcggcggtggcgccacctctggaagtccgccacgggcctgcgcatcgccgacgacgacggggtggggctggtgcccatggaggagctccgcgatttcgtggaccatctgctgctcctccgcgggcgcgcgccgctggacacctgcgagctcagcttcgccgggctgtcgtccgacggcggcggcggcgacgcccgcctcgtggatctctggttccggcatgccgtgctgtgcgaggtccaagctctccggttgaatgcccctcgaagtgcctcacgcctcgtgctagatggcctgcctcttgtgtccgggcgcttggcgaagctagagcttgctcatctgaatttggtgcacaatttcctcgatttctcgagctgtccggtgctggaacatctggagattgtcctctgcagcttgtcagatgccgagaggatctcttcccaatccctgaaacgcctcaacatcactgcatgcgatttcagcgaaatcttccgcactcgtattgatgtccccaatctcctttcgctgcgcctggataattatataatcaccggactcctgtgttcgagggcatgccgttattag

SEQ ID NO: 18340 - DNA, 4631 bp, Oryza sativa
  Clone ID: PAT_MRT4530_23908C.1
atttgaagcatgtgtggtggagagaagaggggaaacacacacgcgctcgtctcgcctagcagggcgggcggcgtgcgtgcacgacgtacgtgtcgaatggtccgcaaaattggctcctcacccttgcgcagatgcagactccttttgcagttttgttttgctacgggaaattcggatttgttttgttttggaaacattccaaaaaatccggtacgtgaaaacggcatggagtccggataggttacgcgtgacttatccggttcggtcgaaatcaatctagggtttgcctcctactctgtactgcgccgtcgctcgtagactactccatcccgctcgccggcgtgcaccggcgatcgggagagcaggtctctggaacctctgccttcgacgtcctgcaccgggagaaggcggcaataagattaaatcattatatgtctataatctcaacaatccaaaaaccttattataggcactgtgattttactatggctggttttgccgatgcactgaggccggataaattcaccggtgtgcattttaagagatggcagatcagggtcactctgtggctgacagctatgaaatgcttctgggtgagtactggcaaacctgaaggagttcttactgctgaacagcagaagcaattcgaggaagccactactctctttgtgggatgcattcttagcgttcttggcgatcgtctggtcgaggtgtatatgcatatgaccgacgctaaggagttgtgggatgcactgaatactaaattcggtgctactgatgctagcaatgatctgtatatcatggagcagtttcatgactacaagatggctgacaaccgttctgtagtcgaacaggctcatgagatacaaaccatggctaaggaactcgaactccttaagtgtgtcttacccgacaaatttgtggccgggtgtattattgcaaaactacctccatcttggagaagtttcggtactgcactcaaacacaagagacaggaatactccgttgaggggttgatagcgtctcttgatgttgaggagaaagctcgggaaaaagatgccgcgtctaagggcgatggtgggcagtccagtgccaatgttgtgcacaaggcccagaacaagagcaaggggaaatacaaagctcagcagaccaccaacttcaagaagcagaagaagaacaacatcaatcctaatcaggatgagaggacttgctttgtgtgtggccaagttggtcatctggctaggaagtgtctacagtgcaaggggatgaaggcacctgcagggcagacttctaagtctgctaatgtgaccattggcaacactggagatggaagcgggtatggtaatttacctactgttttttcagttaatcaatctactaattggtgggttgatactggggccaatgtacatgtttgtgctgacatctcattgttttcttcttatcaggtcgcacggggttccaccgtcctaatggggaatgggtcacatgcttctgttcatggtgttggcacggtagatctgaagtttacttcgggaaagatcgtgcagctgaagaacgtgcagcatgtcccttctatcgataggaatcttgttagtggctcccgtctgactagagacggatttaagttggtttttgagtctaataaagtagtcgtgtctaaacatggatattttattggtaaaggttatgagtgcggaggcctgttccgcttttccctttctgatttctgcaataagtctgtgaaccatatttgtggcagtgtggatgatgaggctaatgtttggcattcacgtttatgtcatattaattttggcttgatgtctcggctttccagcatgtgtttaattcctaagttttccattgtcaaaggttctaagtgccatagttgtgtgcaatcgaagcaacctcgcaagcctcacaaggctgccgaggagagaaacttggcaccactagaactcctacattcagatctttgtgaaatgaatggggtgttgacgaagggtggaaaacgatatttcatgacattgattgatgatgctactagattttgctatgtgtacttgttgaaaacgaaagacgaggctctagactattttaaaatttataaggcagaagttgaaaatcaacttgacagaaagataaaaaggcttaggtctgatcgtggtggagagtttttctcgaacgagtttgacttattctgtgaggaacatggcatcatacatgagaggacgcctccctattctcccgagtctaatgggattgctgaaaggaagaaccgcacactgactgacttggtgaatgccatgttggacaccgcgggactgcctaagacatggtggggggaggcattgttgacctcaaatcatgtgttaaacagagttcctaacagaaataaggacaaaacaccatatgagatatggattggtagaaaaccatcactttcttatttacgcacatgggggtgcttggcgaaagtcaatgtaccaataacgaagaagcgcaaacttggacctaagactgtggactgtgtttttctgggatatgctcatcatagcattgcctatagatttttaatagttaaatccgaggtaccggacatgcatgttggtacaattatggagtctcgtgatgctaccttctttgagagctttttcccaatgaaggatacacatagtggttcgaaccaaccctctgaaataattcccaattcaatcacaccaccagaacaaactgaacatacacatgaacttgtctctgaggaggatgtcagtgaagctcctcgaaggagtaagagacaaaggacggctaagtcttttggtggtgatttcactgtgtacctcgtggatgacactcctaagtcaatttcagaagcatatgcatctcctgatgcagactactggaaggaggctgtccgtagtgaaatggattccattatcgctaacgggacttgggaggtgacagagcgaccctatgggtgtaaacctgtggggtgcaagtgggtgttcaagaagaagcttaggcctgacggtactattgaaaaatacaaggctcggcttgttgctaagggctatactcagaaagaaggcgaagatttctttgacacttactcacctgttgctagattgaccacaattcgtgtgctactttccctagcagcctcacatggtcttctcgttcatcaaatggacgttaagacagcttttcttaatggagagctggatgaggagatctatatgtatcaacctgatgggtttgtagttgaaggtcaagaaggcaaagtgtgcaaattgttgaagtctttgtatggtctgaaacaagctattaagcaatggcatgagaaatttgacaaaacattgacatctgcaggctttgcagtcaatgaggcagataaatgtgtgtactatcgctatggtgggggtgagggagttattttgtgcttgtatgttgacgacatactgatatttgggacaaaccttgaggtgataaatgaggttaaatcattcttgtctcaaaattttgatatgaaggatttgggagtagctgatgttatcttaaacattaagctaattagaggtgagaatgggattacactcttgcagtcccattatgtggagaagatcttgaatcgttttggctacattgatagtaagccttctccaacaccttatgatcctagcttgttgcttcgcaagaacaagagaattgctaggaatcaactggaatactcccaaatcattggctcgttgatgtacctggctagtgcaactaggcctgatatctcctttgctgtgagcaagttgagccgatttacctctaatccgggagatgatcactggcgtgcgcttgagcgagtaatgcgctatctgaaaggtactgtggaattggggcttcactatactgggtatcctgcggtactggagggttatagtgattctaactggatctctgatgtggatgagatcaaagccactagtggatatgttttcacactgggtggtggtgctgtttcatggaggtcttgcaaacagaccattttgacgaggtcaaccatggaagcagagctaacggtactggatactgctactgttgaggcagaatggctgcgtgatctattaatggatctgcctgttgttgaaaaaccggtgccggctattcttatgaactgtgacaatcaaacgacatgtgaaaagacgattgaagtctgtcaggaaattaagaaactccggagttataacgttggattacatccaaacagcgagaaacctggcagatcccttcacgaagggactatcacgaaatgtgatagacaatgcatcgaaggagatgggtttgagacccatattaaatcattatatgtctataatctcaacaccctctcctcatcgtcctccttctccggcaccggcggcccgccgcgcatcgacgatatcgtcgccgccgccacgatgacgacgccacgcgatcataagcttaaggtggtgaccaagcctggcggcggcgcgcagcgcgttgcggccatggagacgctgccgcgggagacgttctcgccgcgcttccgttgcggcggcggcgccgccgccgccgtggcgtcggccattgttggtagaagctaccttggtggtaaatga

SEQ ID NO: 18341 - DNA, 165 bp, Oryza sativa
  unsure (1)..(165): unsure at all n locations
  Clone ID: PAT_MRT4530_23909C.1
ccttctgctgcatctcccacctccctctgaattgtgggcctgaggcgatggnggcgctcgccccgtccaagatgctcggcacccgggntcaacttcgccgggctcctcccgctacgccaccgcgggnaccgaccaccgggagcgcagaagatcgtctccctcttc

SEQ ID NO: 18342 - DNA, 416 bp, Oryza sativa
  Clone ID: PAT_MRT4530_2390C.1
tggtgacggagcgtggggctcctcaccgggagaccgcgcaggcccccctttgccagcctgggcctcctttttatctagtcaggggtcaccacatgggcctctagctgcctaagaaaggaaacacactttttacaaagagggctagtctacagccggaagtgacctctgacaagcacagcgcacatcttctgctccgctcatcagctctctcggtggacgcccgtttcaactttcattcaatggccagcgacttccttgccatgcttgcgccgaagtctggaatggatctgaccgggactgacataccaactccaggagttagcacgccggctccggctagggacgagagccaggaagctctcatcattccgacgggacggggcgaggcgtgcgacaggccgcctgttgccacctaa

SEQ ID NO: 18343 - DNA, 564 bp, Oryza sativa
  Clone ID: PAT_MRT4530_23910C.1
gcttccgctacccagctaaaggctatactcaaaaagaaggcgaagatttctttgacacttactcacctgttgctagattgaccacaattcgtgtgctactttccctagcagcctcacatggtcttctcgttcatcaaatggacttctcgttcatcaaatggacgttaagacagcttttcttaatggagagctggatgaggagatctatatggatcaatctgatgggtttgtagttgaaggtcaagaaagcaaagtgtgcaaattgttgaagtctttgtatggtctgaaacaagctcctaagcaatggcatgagaaatttgacaaaacattgacatctgcaagctttgcagtcaatgaagcagataaatgtgtgtactatcgccatggtgggggtgagggagttaatttgtgcttgtatgttgacgacatcctgatatttggaacaaaccctgaggtgaaaaatgaggctaaatcatccttgcctcaaaatttgaaattaaaggattgggcatagctgatgttatcttaaacattaactaacttgaggggagaatgggattacac

SEQ ID NO: 18344 - DNA, 944 bp, Oryza sativa
  Clone ID: PAT_MRT4530_23911C.1
ctaacccttgaagactgaccaaacaactttcacctgcatcttgtaaagatcgcaattgatcacctcctcatctgcccctctagcaagtggagtgaacctcaaagtgcgactggatacgttatcattctgatgaatattatgggcatgaatattcagtatcaatatctcatttgctgatactgctacaacacgtcgcagcagttgcataactctgtcatccccaactgaggttgcaccacaaacattgctatcatacagtacaatataattcgaaacatctgttgtgcaagcactaatttttccatgaaaaactttaggtcctgacagaatcgtgatctcaacagtgccctccagggcttccttaacacaagcagatactagttccacctcactgagcctactctcaaaggtttcactcacaatcttagacttacgagtgtgaaacttcatctcaagcaaccctttactaaattccttgtcattgcactcttcatattccttaatcttcaaatttatctcaaaaaagatatcatggaaaacaattcctctagttgggcccgtgagaattatattttcattctctgactggataacttggcaattgttcctattgcgccggaagatgaagttgcagttaaaatctaatccatctctgactatcacagtcccatatagattgatagggtaaccaacatctgacgatttcaccttcagcgaaagtacatttaacgagccagtcaacctgtggtcttctctgataattgaatctgtaaagcgcattggaccatattgcgtatcaagggcaagatggtgaaattgtgccaccgaaccaaattccttcttctcagtcaccatcgcagtttgatgctgcatgggaggtgaggaaggaattgggacagacgaccatttcataccagaagtggcaaatagtcaactgccttcaa

SEQ ID NO: 18345 - DNA, 135 bp, Oryza sativa
  Clone ID: PAT_MRT4530_23912C.1
atggtgggcagggtgatcatggaggaagtatgccagatgctggggtgggatgagaaagaaggagagatcgccgggcttaaagggatggccgtgagaggtagcggctcgataggccagagcgaagcgagtggttag

SEQ ID NO: 18346 - DNA, 573 bp, Oryza sativa
  Clone ID: PAT_MRT4530_23913C.1
atgtcaccctcactcccctcttcttccacctctcaacctttttgtcggtggggagccgacgcggtgactgggcatcggcggcgcgccggaacacaaggcaacgacggcgtggaggagggtggtgccgttggcgcggcaagggaggtgctggtgacgatgggggcggtgggagaggaggagagcgtcggcaacgcgggaaagggcgacgaacggcgcggcaagggaggagttgagcgggcggcgggagagaagctgggcggctaccgccgccgccgaggagggcgtcgcaacgggcggcagagagatgggcggctgccggctgccgtcagggagaaggtgcagttccccgcttcttaccattgccgctccggctaccaccgctccgcgtgccccgctctgctccgcccgcggcccgccgccgccgtgctccgctccagccgccccactccaccggcccgctccggctgccgccgctccgcctgccccgctccgctccgcccgcggacctgctccgctccggccgccccgtccttcgcccgctctagtcgtcgccgccccgctccaccgaaataa

SEQ ID NO: 18347 - DNA, 4384 bp, Oryza sativa
  Clone ID: PAT_MRT4530_23914C.1
ggaaatcaaccagaattatcctgaattaaaaaaacagaaactggattcatcagggggaataaacaaacagtgaaaaggggacaggggtttactaatttagggtttattttatgcgtcgtgatgatggtccacgattttttttttttgaggataaacctgtaatctgcctcatttgtatttagctacatgggtactgtcaacggtaccttccaaattacccctgctactatgtaaagatgacaaaagacagtttcatgctaaagcaccgtatagatacacaaaaatgtcaaaaaaaaaaagaggtaaagacatatcgatgtaattaaacaccatcttgtgatacattaagcagcagattcacaattgcaccagcaaaaaagaaatcaaggttacttactcattttagcccagaactaatagcgtccccatctcaccttgtgagggcacacttgatacattccttgtcacagaaactacttgccaactctgcgcagattcatccaatattttgtcagggtttctctgctcccccaaatgctctgcccccatccatccacacttcttttctgggaggggttcatccttacaattatatactctcccgttcttatcaaagttccaaggaaattcaaacagtcaaaagttgtctggtttcaaaccttctggctgttgcaaggtatttccttgataacaccacaaaacgattacaatacagcaccctctgcagattatatcgtaccaaaatccagcctctcccatttgaaggatctaccagaattaaaccgcagcaaagctcgcatgaatacacaaacacaaacacagactgctgctatcgcaagcatggaatggatataggggcgagcgagcaatccccgtgaatgcataggacgtcttagcaagccagcatccaaaatagcgcactggttgcaagatcttatttgcaatgcttgaattgcagatttatttttctcaccaacattccctgattgatccatatgaatttcctctttgccaaccattatagtaacttggttgttcttcctgtccaccaatttctgtgctacaagctcattgtacgcattgttgttcctcaacttggcataagtttcaggggactgaccatcatcatctagcgctgagtgccaacagctcaaaccaatctgttgaggatcatctgtcaaagcatcaacaatatccactgcatcctcaatggatgcagccaggtgcaatggagtcaaaccacctgggccagctacatttggaaggaaggggtacaatttggaatcatcagggcacacgacaacaaactgtacaagcaagcgcgccatgtggctacttttccttttcactgccctgttcaggagatggatctctgagagcatttccagagtttcctgtgatagttcatcactggccaaactcctcttggcaaggatttccagaagagttttagtaagagagcaccagtcccgctcacttgaaaacagcagaaggtatctgaagcgtgcagttgagaagtacatcaaatccaaaccagaagaatcagatttttcagcagatgtactggcagctgccttctggaagagccatccaagttcgtttagaaagtgcaaaacttcatcctttggctttagccgcctagcatcatgagcctgatcatctgaagagccgtcaacaaactgtgaaccctcaagctcagcttcaaggcttctcaactcctgacaaacacttgaattggcaatgataacaggaaagctgttccctctgaacctattctcgacctcaatgaagtaacgtccaagaataagatgtggttctccaggtaagtcaaaagtctcaacacctgaatcgtcatatattgttcctggatatgcagagcacagtacttcttttgatatgtacttccccgtactggtacagtggatttgggtgccaggaattgtcagattacggcccttaagaatgagggaggtctttctcccaccaacaacagcaattggtgagacaaaggtcaactctggggtattccatgttctccatgattttgataagcgggttgctccatctttgtatgacaccaactgggcatcagttcgaactaaaaaccttccttttctccagaagtccaaatcggaaccttggactaatgtgtttactcgctggagaagattttcttcaagttcatcccatgcaatagcaggcattgaaagatacattgatagtacaaggcaacctggccgaatgtatccctccatttcgttggggctgtgtttgagccaatttacaatctctccacgaaggttcccagggattgtgcttggctccttgccaaatagtttaaatatgattctaccagtacggtcctgtccatctgaatttgaagttgatggcgaatgatctgaacaagaggttgaggtataacaggattgatatgcaggatttggtggtgaaccattttcaattggccgttctgaatccttaaacagctcaagtggtggtgcacgccaagcccgacttgtgctaacctcaactgtcgcaatatcttccccgtagtctgcaatacgagcatcttcgtctaccgaacggatggggaaaaacttatgtgttacaggcggagatgatgatggagatctctcatccagaggattgctactctcggaagataagtacttatttgcagtgtccatcttacaaggaacatcctcctcggtgctaccaaagagccgtagtgacaagtatggcggggtttcttggtctggttgcttgtacatttcaggtgaccgttcaagagcatcattcttgcgagtggcagaaaatacccggatagatttctcgtgggaatttacaacattagctggctctgttgactgactcttgctcttgttattaccactgctgtcactgctcccttgggactgagacgtattgctatcagggtttgatgtcgcgagggcagttgataaaactgctagcaagtccatggttgatggcacagcttgcttgtcgaatccgtcagcttgcttgtcaaatccattcgtttgtttgtccaatccattggtttgcttctcgaatccattagttgtcctttgaacagaatcttgttgttggctatgtgacgcattcaaatcaacagcttctgatggaggagactttgaagcagagttcccgttatttatagagtttattttacttataatctggaccagattgtctttatctggtatcggagggatgctgggcagtttaccaacattactgccttgcaagcgtgcaataaccgtgatcagatttacaatatcctgtgtcctatttgctgcattttcctggtttccaggtagcagcagctgcgaagcaacatctgttggctgggtttttcttcgccgcctgttgtgaccggcgagcctacgtctgcagctcctcttaccctcatcaaactcagagagcgggtgaaatctactgcactgctgacagaagcgctgcatctggttgccaaccagcgccttcgtggtcttgccgtggatctcgcagactttgtgtctccggtgataatccttggcgttggtcagatccgccctgcagtcatccacctggcacatcgggtagcttccgccaccaccgcctgagtttccaccgcctccgcctccacctcctcctccactggcacttccaggcgatccagaccgaaccctcttgctcggcctaacaactggctcctgcgccggcgccgacgacgcaggcggagaaggcgaagaagacacggtagtagccgccgggctcacatccatcggcgtcgccgcgtcctcccgcaggccgagctgaaggttcagcccaccgctacccccgccgccctgccgcagcgcctcagcagccttagccgccgccggcggcgactgttgctgctgctgctggtggtggctcagcccccgcgttgacgcgcagcgcatcggaggacggcttggcggtgagggcgcggctatcccagtcccacatcctggggttccagttccctcctcccttagcctccgccgccgccaccgcggcggccggccacgggttcccgcgcttcttcgccgccgtggcatggggaggcagcggctggatctggtgtaggaacatcggaggggccacctgcggccccacttccctctgcatctctcaacaccgccgccgccgccgccactcgccgccggccaaaacccgatccacccctctccggatcttttcacgcacggcacctcacgcagcctctcttcaactcctcttcacgtcaacctcatcggaatcgagaaatggaagaatcggcggcgagaagtggatgaaggaagcaaccaaccaaccagggggatcgcgcggtcggcgtgagctggggaagagagaaggggag

SEQ ID NO: 18348 - DNA, 296 bp, Oryza sativa
  Clone ID: PAT_MRT4530_23915C.1
atggaccgtcgcctcctttcccccttccctcccctctctcggccgctgctccgccgcgccggtggtcgccggcggcggccatcggggcgcgggcgcgccgtctcccgccgaccgtgccggcacggccaccctcgggcgcgccgagtggctgccgcgtggggcccggccgtcagccgcccgcgcccttgggtgcggctgacgcgtgggacccacggcgccggccggtgtgagcccgggtgcacccggtccaccgtggaccgtgaggctgccgcgtgggccccactctcgtggacccg

SEQ ID NO: 18349 - DNA, 1134 bp, Oryza sativa
  Clone ID: PAT_MRT4530_23916C.1
atggaggacttaagtgatcttgagggctatcaccacctttacacccacctcaaacctattatattgacggcgagaattttgtacttaacagccgtcaacagagttcaacctgagttcatggatcagaggtccatctgcgagatcccccacatggcgcgcgcggccgccgggcggccggggggcggcgagcggcggctgtgggaaccgcccttcgacgcgtccttgccggcgccgcccatctcctaccccatcaccacactcgcggtgctcgcatcccgcgcctacctctccgaggacggcaacttccacctccccttcaaccgcgcctccgtgccggccctcgcctcctcgcgccgggccgcgccgctcccgccccggcgccacatcctcgcgtgccacgacttccggggcgggtaccgtgacgacgcggcgccgcaggggggcgacgacccgggcgcctacgcgctctggcactggcacctcatcgacgtcttcgtctacttctcgcactacctctgtcacgctcccgctgccgtgctggagtgggataaagtggtagaaatctgcgaggagatgcttgctacagaggcttctacccaaatgtatgctgaaaggctaacagagctggctggtaattactttcttgatggggagtgggacatccggcaggccagtgcggcgggcgcaactgccgccgtcgctccgccctcctcctcgcgcctcggcccgatgacctcctcccgcgtggtcgccgccgtgtcgttgccaccgagggaggccggcgagcttcgtggtgggatttttcgtcgggacaccttctcccgcgtcgcctctgccgtccccatccgctcccgccgctccttctatggtgcccgcgacggtgccagttccaggaggttgtcgccgatggcggcggtggcggcaacgacggagacgcacggacgcactacagccgccgccgcagccgacggagccgctcctgggcagacgagctacggccgccgccgccgtcgcgcggacgcgctaccgccgccgccgtcgacggagccgaacgactcatctgggtccgccatgtcagacaaaaccggggtcaaaaccaccaagggacctaaagtgaacggttttgttagttga

SEQ ID NO: 18350 - DNA, 5003 bp, Oryza sativa
  Clone ID: PAT_MRT4530_23917C.1
ggtgtagaagtatactgcatgttgaaatttgcaagaaattgaacaagggcaagaacgtacggtttgcttccagtacattatatatctctatgtactgtgcatgagaaattgagaatatccaaaaactggtcagtatctattgctatttactcttatcttcctttggcctgacgccagctataacttatgttctgaatgaatttgtgatcaaccctaagcaaaatctattcgtcttctgcttcctcatcagaatcctggacaatgctgttcgtcttagctcttttccgtctcgctaagactctttccccctcttcatcagattcagaatcttcaactgtgttatcactgcgtgcactggcctgtggatcttcatcaccatttgtttcaagaggagcatctggaccttccgcgtcctcctcaggcatattttcagatgacgcagctctggctgcagtagagttcctttccagttcgtccttcgattgaatcttaaagtctcttgccacgctgcgcttggcatgcctcaagaggttcacctttgtaagcttgctcagctggattaaatacttctcgtaatcttcgatctggaaaataagatctgggatgcatttgctctctcttttgatcctagccaggattcctctttttgacgcttgctgattctcttgaactaaagcgacgaagacgtaaagtggagcagtcagcatcctgcaagttacttctgccaatttctgaaacttgagacctggcatgacttgtttgtatcccttaggtgcaatctgagacttggccatgcgagccaatagcttgtacaacttggcagtcagtttcagaaactgttctgcctgagaatccttaaggcttgtatgtgcaaaagacgaaaggacatgaactacggatgttgatcttgagtacagtgcttcctctaaatatagcctttgcgtcctttcatcagcaggttgatcatcctcatcaatattagcagaatcatatgctaatgcaagcattaccttaagcttaccaattacccaatccagctcagtaagagatgattcaaccatttgaagaaacacagcagcaagtgaattctttgttttacaatttataacaggaaatgtctctgacgaatctctcgagtcctcttctccagtggttatcaacttcaactctgcagtcatttcatgcacgagaaccagatcatctggagctatcataagatggatagcaagttttaccatctcctgtgcaatgcttggattctggagaatagttttttgacacaaacttgcagcccaatgtccaacaaggtgactttgttcatgatgtagctttcttgatatgccgagaatcagttcagttacagcctcagattcacgtggtagtgactgggaaagaactcgaacatataacatctttaatatattcagaaaaacatggacacttcctgtatttggatcagtgtcattcctgccaagaagctggctgcaatgcaccatatcttctatatttggcggagctgatgataccaggacatcaataatatcaccaggatgatcttctggaacacttagcttagacatttctgttaggcatgtcaatgctagatacagttggtcctttttgctatccatgtgtttcttcccttgggtcaagttcctcttggttccaccattttcttgctttgaatctagcattatccaccatataagctgcatcattggccccactaacttttttacatcttcatacagcacagctcttacatttccagtagtcgctccacttcccttggctgcaagtgatttgaacattctataacaggctttcagaacaaaagataatagactgtggcattggttcaatttagattgggtaggacgctgactgcatttttcaaggttatcagcatcacactgcttgacacacacccttacaagttcatataaactggaatccataaaggtctccctcctttcatttaatttctgcagtgttgcactgtaatactccttgggtccattcatctgctttgcagtagaatcacttgaattccctgctctttgcgcaaccttctccttattcttgcttttttttctctcaaagctactatgtgcatcaataaggtccagtatttctttttctaacatttccttttgctcatcagctactttctctagttttgaagcagtaaaaccgataaaaacctcaatgattccaatcatagcaaaattatggcaatgagccgtgtccaaatgtgaagaaagagaacaggtttcttgggtctgccctcgttgatcttctgcaagacatttcctcaagtacttctgggtgtttgataaagctttcacgaataagtcacttgatgataatcttccaacctggcagtagctcattatcctgcgaaggagcaaacccgaagcacttccaatatgcatctcgtggttgttcacatttactattttgttgaatttggcattctcgattttaaaacacgagtcaattttaaggggacattctgcatgctctgtgtaatagtttaggaagtgcggccaaaggaaatcaaggacattctcagcaatagacggatctgaggtaacaatttgtatgagtccattgtacaagacctctttgactctagcctgctgcatgaaacatctgcgaagtaatccactcagttcttgaaagagacccccaccaatctctaaatgtgtttcaggttgctggctagagcttggttgactagatgagtcttgaaaaggatttgcttcggttctcttatgcttgttctctgcaataatcagttcaacaatagcatttgtggcagcaatccgcacagcatcctcccgcttgaacatggccttccttataaccaatattatgtaatcctttagatcacggctaaacttcgtgagtggcaggatacagttgatcagaccaattgatatcttgtcattcaagaatgcaaaatagtccagcaattctttaaggtgcgaaatgtattcaagcatttgaaatggatgagtacgaactaaacctccaagcagtctaatgactggtaaactttgagaaggcttcacggagagaatccggaacttgcactgctcgattatctcagttcgtgccattccatggatatcaaacaatgacttgagcatattaacacctacttcttcagtgctcataaccccttcattgaagccaacttcctcctttctgtcactatctgaggcctccaacaggagaaaacccacttgaacaatgcttggcacaacatgctcccttccaccaatgctctcgccaacagctttcagtaatgccttctccacgcagttagcagcccgggcgcactcccctttcaggcattccggcaaccatttgcagcgcctcgatatccgataatcccggcgagacgtgatgacggcgtcccggagcacgcccaccgcggcgtcgttgaacctccgcacgcgggccacggacagcagcaccgccacggcgaacccgctgagcgtccccgccgcgtcggccttgacggcggccacgacctccctcgccagcgcggggtcctgcttgaccgcgaaggcgacgtgcatcagcacggtcccctccacctgccgcgcgatggacggcggcgcgcgcaggcgggcgcccctgtggccgccgaagaagcggaggaggcccgagaggacggctcgcgggtggagcggcttggaggcgaggaggaggagctggtaggcgagcgcggggaggtcctgggcgtcagcggcggggaggagggagaggaccttcgcgacgaaagccgggacgcggtggcggtaggccgcggggaggtcgcggaggagggaggcgacggcgagcagggtcggggatggccagctgggcgcggagaggagcgcggagagcgcggcgccccccgcggtgggggagggggagagggcgagcaccgcggggaggagggcgaggtggttcggcggcgaggcgggggagagcgaggagaggacgtcgtcgaggccgtcgggcgggagcgcctggaggaggggcgccgccgcggaggggtcgcgggaggcgacgcggaggacggattccgcggtggggggagggggttgctgcgacgggggcgtgccgtaggcggcggcggcggcggcggcggacgccgacatcgccggagttgcggtggtggccggcggggaatctgggggttcgggcgggaacgggggtggggttttcccctccaggaggccgcctcgcttttccgaaggaaaaagtacaccggaggtcccacgctcgcggggctcgcatcccgtggctacctctccgaggacgggaacttccacctccccttcaaccgcgcctccgtgccggccctcgcctcctcgccccgggccgcgccgctcctgccccggcgccacatcctcgcgtgccacgacttccggggcggggaccgcgacgacgcagcgccgcaggggggcgacgacccgggcgcctacgtgctctggcactggcacctcatcgacgtcttcgtctacttctcgcactacctctgtcacgctcccgcctccgtgctgggtcaacgccgccctcctccacggcgtcaaggtgtcccccccctcccccaaaacaaaatctccagcttcatgggagttcttgcttcgattgagtggatcgggataggttcttgcatccgctcgattgacgtttgcttctgcttggcgtgcctcggcccggcgacctcctcccgcgtggttgccaccgtgtcgttgccaccgagggaggccggcgagcttcgtggtgggatttttcgtcgggacgccttctcccgcgtcgccgccgccgtcctcatccgctcccgctgctcctttgatggtgcccgcgacggtgccggttccaggaggttgtcgccgatggcggcggcggcggcaacgacggagacgcacggacgcgctacagccgccgccgcagccgacggagccgctcctgggcagacgcgctacggccaccgccgccat

SEQ ID NO: 18351 - DNA, 296 bp, Oryza sativa
  Clone ID: PAT_MRT4530_23918C.1
acctattatatcgaatctatatgaaccactgcatctactattgagaatagagttctatatattccatgtaagatgtgccctcatggcttccctaactgaatgcagcaatttaaggagtgaaactattctgaggtgttgactttgaaggaccggtgtcgggagaacgataccatccacaaagatatatgagagcaatcatctgggtcgatgaacaacgccactggacgccttgaagctagcttcatacatgttggacggatattccaactgtagactgactgttgcaaggagctcac

SEQ ID NO: 18352 - DNA, 334 bp, Oryza sativa
  Clone ID: PAT_MRT4530_23919C.1
tttatttatcgaccgcgaacccactcagagctagagctatgtgcgggggcgcgatcctcgccgacctcataccgccgtcgtgctccgggggacacaccagaaagaacaagcggcggaggatcagcgactactaggacttccaggtcgacttggaggagttagacgacagagacgacgactccgacttcgacttcgaggccgaggcggtagacgagtacgacaaaggcgctgtcgacgaccacagcggggacggcgcggtggatcttgcgacgactgcgacgatcgcgtcggagattccacatgagcgtcatggcgcgaggcggttccgttgagt

SEQ ID NO: 18353 - DNA, 780 bp, Oryza sativa
  Clone ID: PAT_MRT4530_2391C.1
ctaatctctaggccagtacagaagtgcggtcaaggtggccaagtcgtcccactggtcccaatccggatcaacggcgccaccttgatccatcagctccagttgctgcatggaacttcctgatccgtcgttttcctcgggtgacgccgccgcggcagccatggatggccccgggttctcatcaccaccacccgctagcggccgccgatcgaattgccggatgcctcccgatctggtgtacagtcgacacaggctgaactcgctcctcagctgcggaggaagatggtttggtggcgcggcggcgccggcgctggaggcggaggcggaggaggcgtcggggtagtggaatgctctgtactcgttcatcttccacgcggtcttggttcccgacggcgcgcggccgcggtagaacaccatggtcttcttcatcccgatgggccggcggtcggcggagtagacgacccccggcgtgcccgccgccttccaggaccccgacggcgtggtccggctcggccgccgccgccccgcgcctcccgctcctgccgcgggcagaagtagaaccacggctccccctcctcgccgccgcctgcccagcatctcgtggtgaatctctgagagctgcaacgggtcgacggagtagacgtcgaagacggggatgacgcgctcgatgtcgtcgcggaggccgtcgagcttgttgcggaggtagaagcatatcagctcctcctccgcctccatcgggtagaagcggaacccgggagcccggcggccgccgccgtcggccat

SEQ ID NO: 18354 - DNA, 860 bp, Oryza sativa
  Clone ID: PAT_MRT4530_23920C.1
gctaaattttgccgagatcgagcagttcagtagaaagaagagaatattggaagaagaattaaataatagtactaacaatttgcagcaattctctggctctgcttctttgttgttgctgcagacaactcacatctgcaggttggttcctttgtgtccaaaccaaggaaaggaaaggcacagtcatctctctctctccctactcctcatctccagccacatctgctgcttcgtctccttctcctgagatctctcgatcttcaagaggaggaaacctaggtgaccttgctctctggtggccacgccatgggagccgtcaagaggtctagctttctcctcgtcgtcgtcgtcttcgctttgctcctcctgacctccatggcagcaggagggaggaagatgttgatcaacaagcatcaagtgcaatcaatggagacgtctgatgatgaatccatgcatcaagggcaggaagacgacgaaatgctggcgatggtccacgagagaattctgaggcaggtgaagacgaacgactacgggacctacgaccctaccccaaccatggctaagcctcacgccaaggaaatacctaactaactatatatatatagctgcatgcatgcatctcatatccataatccatgcatgcaaatatgtgatcaatatatatgtcttgcatatatatatgtggtcattaaattgcctcttcatcgagatatatttcgatatgttaattagtttgctacatataatatactactttgggccggccatatatatacatatgttttgtcgaataaacttcatggtttgtcatggaatgttattattcatatgtgtaaaaaaaaaaaaaaaaaaaaaaaaaaaaa

SEQ ID NO: 18355 - DNA, 1661 bp, Oryza sativa
  Clone ID: PAT_MRT4530_23921C.1
ccccgggctgcaggcgaggttatctccaccctctccaatcccctcctcctcgccgcgcggcgcgccgcagcgcccccggcgcccggaggcgtgagatcccgccatggcagcggcagcggaggccgtgaccgaggtggatgccacgaacgaggagggggaggaggaggagcaggtggtgaacccgtgggaggtgtcggcggggaaaggcgggatcgactacgacaagctcgtcgaccagttcggctgccagcgcctcgacgacgcgctcgtcgcccgcgtcgcccgcctcaccgcccgcccccctcaccgcttcctccgccgcggcctcttcttcgcccaccgggatttgaacgagatactggatttgtacgagaagggggagaagttctacctctacacggggagggggccctcgtcggaggcgctgcacctcggccatctcatccccttcatgttcaccaaatatctgcaggatgctttcaaggtgcccctagtaatacagctaactgatgatgagaagttcttatggaagaatttgactgttgaggaaactaaaaggcttgcccgtgaaaatgcaaaagatatcattgcttgtggatttgatgtcgaaaggactttcattttctctgattttaattatgttggaggtgctttttatgaaaacatggttaaagttgccagatgtgtgacatataataaggttgttggaatatttggattcaccccagaggatcatataggaaaagtcagctttcctcctgtgcaagcggttccatcattcccttcttcatttccacatctcttctctgggaatgaccaactacggtgcttaatcccatgtgcaatagaccaggatccttatttcaggatgacccgggacgttgctccaagaattggttaccagaaaccatcattaattgaatcgagatttttccctgctcttcagggggagaacacaaaaatgtcggccagtgatccaaattctgcaatatatgtgacagatagtgctaaagaaataaagacaaaggtgaacaaatatgcgttctcaggtggccgggactcaattgagctccatagaaaacttggagctaaccttgatgtggatgttccaatcaagtacctgaacttcttccttgaagatgacaatgagctcgagcacataaagaaggagtacaaggaaggaaggatgctgacgggtgaagtgaagcagcgccttgttgcagttctatccgaactggttgcgagacatcaaagagctagagcactagtgaccgaggagatggtcgatgtatttatggcggcgagacctcttcccaatatgtttggctgagtctgatgtcaaaaactgcctggagatatttgctactagctggataagatgtccgaagtgatctctagaatttggaagcagcattcgtgtgtttcatgacttatatttgtaggctggccactcgtaatatttggtggcacgcttgattttgcaaatcagttgaggataaatttatttatcttaaagcctgctccatcaatatagaaccaacgtctttttgtattgaatcagaaatgttacaacagttttgagcttaatcagaacaatcaagaaacaaaaaaaaaaaaaaaaaaaaaaaaaaacgccccgctagttctctctctctctctcc

SEQ ID NO: 18356 - DNA, 150 bp, Oryza sativa
  unsure (1)..(150): unsure at all n locations
  Clone ID: PAT_MRT4530_23922C.1
ttccgggttggccccttcgttcggtgtttatttctgtncgtntttttggctggggtctcttgcctgcctcgctggtacctggttgttgtgtgtttgatcctctcttcctggggacgatgtttgggctggtggctggggttggggtagtgt

SEQ ID NO: 18357 - DNA, 264 bp, Oryza sativa
  Clone ID: PAT_MRT4530_23923C.1
aaggaacttgggcggctgagcctggctaccaggagcagcccattaggccggaagaaaaaccctagggaatgggcgtcaaccagcgtgtcgcttctcatcctctccctgtctcgtgactctcgtatagctctccgccgcctctacctccgccgaccgccgaccgcccatcgtcgcaaccacttgtcctcgccgccacgccgccgcttgctagtcctagccgtcgcatcctcgcgcctcactgtgtcccttgccggagaagcatga

SEQ ID NO: 18358 - DNA, 632 bp, Oryza sativa
  Clone ID: PAT_MRT4530_23924C.1
cctctgctattgcatcttttgaaaagatgggttcaagaaacgtacaagcgaatttatttggtgaacaaattcaattaagtttaatttttgctcattataaaaccggtgaatattataaagcactaagcctggctgaacgttttgtacgtgcttatccaaacagtaataatatggattatgtacattatttagtcgggttaagtaatgttcgcttaggagataactttattcaggatttcttccatgtaaatcgttcttcgcgcacaattgagagcattcgtaatgcttacggaaatttccaaatgattgtgagaatttatccacaaagccaatatgtaaatgatgctcaacagtggatggtttatttattgaatcgtatggcagagcatgaattatctattgtaaaattttatgataaacgtgatgcatctgttgcggtcgtaaatcgtgttgaagaaatgcttcgtttttatcctgcaagcaagtcaacctttgatgcattgccttatatgcaaaaagcatatcagagaatgggattaaaagattcagaggcaaaagtcgcagagttgattgaaatgaataaagcaaaagtattccctaaaattactaagccagaatatagtaaacaattc

SEQ ID NO: 18359 - DNA, 3245 bp, Oryza sativa
  Clone ID: PAT_MRT4530_23925C.1
cacgaggcttgctctagctcagctagctcttgctgctagtagcttcagctttgctactgctactaccactactactactactactttcacctccaagaaagtatagattgcaagaacaatttctgctgctgttgttctttcttgctgttctttctccttgtgtagttgtgtggtgtggttgagctgaggtgtagttaggacagtggctggctttgcttgcttgattggtcacctgggaaggtcgctgtctctgccttttgttttctttgccatctctttctttctgggctgctttcaccttttgctttccaacctcttcttgccatcaataatgatggaggagtaagatgagggcttgttcttgaagtctctccaatctaatctcatttcatcttcatcatctccacccggtccaaatccacctactactgtttttcttttgtcccttctcttttttttcttcctctgatcttttcttttttcaggtgttttgtttttggcagtaggtgcttgctatcttttcattaggctttggattttcctctcgtgttctttagtctcagcctattagaggtttgaggaaagttttccatttcttagctctttttgcttccagcttcttgggattgctctgtttcttgctgagaattggctcgatttgggaggcctcatcttgtgttagctttcaggttttcttgcctgaaattgaaccgattgggtaggtttttaggtgcttcagtttcagttgctagctcgtcaggcttgttcttgggctcctgccttgaattggggtcaaattgggatgcttctgggcccacgcgtgatggaggagaggaggggattgatggggagggagagggatcaattccccgtcggcatgcgggtcctcgccgtcgacgatgacccggtgtgcctcaaggttcttgagaccctcctccggcgctgccaataccatgtaacatcaaccaaccaggctattactgcgttgaagctgctcagggagaacagggacatgtttgatcttgtcatcagtgatgtccacatgcccgacatggacggatttaagctccttgagcttgtggggcttgaaatggatctcccagtcatcatgttatcagtaaatggagagacaaagactgtgatgaaggggataactcatggtgcctgtgactatcttctaaaaccggtccgaatcgaagaactaaggaacatatggcagcatgttgttaggaggaagttcggtaatcgtgagcgaaacaatcttgatttctccaaagaatgcaataagccgcaaagcgcggatactgatcatggaccataccaacctacctgtggttcttctgatcaaaatgggaggtccagcaggaaaaggaaagaactacacggcgaggacgacgatgaaggcgatgataatgattatcaagaaaatgatgagccctcagctgcaaagaagcccagagttgtatggtcagttgagctgcaccgaaaatttgttgccgctgtcaaccagcttggaattgacaaagctgtaccaaaaagaattcttgagcttatgaatgtggagaaactcaccagggaaaatgttgcaagtcatctacagaagtacaggctttacctcaagagactaggtgctgtagcatcacaacaagccagcattgttgctgcctttggaggcagagatccctccttcttgcatattggagcatttgaaggactccagagctatcaaccttttgcaccttctgctgctcttccatctttcaatccacatggcctgctaacccgaactagcgccgccgcggctttcggacttcaggagcttgctgccccctccagcacaattcagacttctacaggaaatgtcacagttggccattgcttggaagaaaaccagcaggcaaatctagcacaaggcttgaccgcggcgatcgggcaacctcagcttcaacagaactggattcatcaagaaggtaatggtctgtctgatgttttttctgggagttctctgaccaacactttgtccagcacactccaaagagttccaagcagttcattgccaccacaagaactcttggagtgcaaacaagccaaagttagcatgccgccatcgatacggataccgccttctagttcagcacttcttgagaggactcttggggtttccaccaatttgggagattctagtatatcccagcagggtgctcttccaatagatggtggattttctgctgacaggttaccattgcacagttcatttgatggcgctgttgcaacaaagctagatactagtttggcagcttcacagagagagattggccagcaggggaaattttcagttagcatgcttgtctccccttctgacaatcttgcattagccaaaaatgccaaaactggagctagttcttctggcagtactataattctccctcttgatactgcaagacattcagactacttgcagttcggaggtgcaagcaattctttgcagaaaatggatggacagaaacaagatcatatacagagctcaaacattatatggagttcaatgccaagcactcaactgccaagtgatacccaaattcataatactcaaaaccaaagattggacagcggaagttttaaccataatattggtgcccatttggctgaccaaacaaatgcaagtgcgtcaatacttccgcaaatgaagtttgacacaagaatatcagaagagaaaatgaagcagaagaatacatatgacttgggtagttcaaagctgcagggtggatttaattctagtggctgcaattttgatggccttctcaattccataatcaaagtggagaaggatgatctcccattcatggacaatgaattgggctgtgacctttttccacttggtgcctgcatatgaatccatcatttcggacaccaaagattttgcataatctaaaagagtcagctgtgctgcctgatctgtgctacttcatccaggctttgtgtatactaggatctagggacagtagtggcttgtaatcttgctttatctcttctctagggttggctatggaagtatggttagatcaagataagaagaaaatataatgctgtaatgtcagcgccttttctagtcaaaatctgtgtttgtttctaaccaagcaaccacatctagtgtttgctgcaccttctcagactgaaaaaatatggaaactcaccatggcatagataaatcaaaagggaagtctttaaccaaaaaaaaaaaaaaa

SEQ ID NO: 18360 - DNA, 355 bp, Oryza sativa
  unsure (1)..(355): unsure at all n locations
  Clone ID: PAT_MRT4530_23926C.1
aaacaacaacaaaccttaactataaggaataagttaaccggggttccctcaacttaacagggagattttttaagattccttaacaacaaaatcagaaatgggtacccctaaacttacacaaaacgttcaaatgaggtcccatggcagtatatgggaggggtttcgctgacggggcatcctagtcagaaaaaaataaaaaggtccatggggcccacatgtcagttgcacattttctttcttttcttttcttttccttctcttctttttaatcgggnaaatgggcgggcagcgtgcgagcatggcagttgagcgacggggggcggaaacagttgagcgcggcctgggggcgagcggc

SEQ ID NO: 18361 - DNA, 683 bp, Oryza sativa
  unsure (1)..(683): unsure at all n locations
  Clone ID: PAT_MRT4530_23927C.1
gatggccgggcctcatcccgataaagtgtttgcgcaacctccctgcgagattaatgctcatggtggactagccaaaggtgatgttatggctaggatcgcaaaggagggagcgagaactattcccggcagacctgagcatggaggaaactgtgacattaacaatatttcccggggatcaaagacgtatctccccgttcatgttcctggagccaagttttctgttggagaccttcattttagccagggtgatggtgagattagtttctgcggtgctatcgaaatggctggtatcatcactatcaaattcgacctcatcaagggtggagtcaagtcgagaggtctcaagagtccagtttatcgaccaggtgatatgggtcctacctttagtccgtcgcgatatctcacatttgagggattctctgtcgacgagcaaggaaagcaacattttatggatgccacaattgcttaccgacaatcttgtctccgtgcgatagaatatctcaaacaatttggctactccggcgaacaaatctatctcctcctgtcctgtgcaccaatcagaggagctattgctggcatagtcgacattcccaacgcttgtaccacgctgggcatacccatggatatctttgactntgacatttccatcgaaagtgagcctgttgttaggaatctgggagctt

SEQ ID NO: 18362 - DNA, 1364 bp, Oryza sativa
  Clone ID: PAT_MRT4530_23928C.1
tcacacgaacggacggccgagatctaaccgatccaagatggacggccgagatcgatcgggtccacggcggttcacggcggacggccttgatgacgccagcaatgacgtcaccgacggcggcggcggctcggcgaggcagacggctcgggcggcgcacgcttgccggcgaacggcggcgcgagaacgcaaacggaaggcaccgggacgaagcgggcggcacggcgaactcaccgacgaccaaaagagcgacggagaagcaacggacggcgacggcgacgaggaggaagcggcgggaaccttcgggttgacgacggcgatgaagctccggcggtctccggcggctgcgaaggggcggacgaggacggcgacgaccttgcgaacccgacggcggtcttcccgagcgacggcgacggctgaaacgacggcggcgcacggctggagcggcggcggcgacggcgaagctagggcacacggcgctagagctcttccgacgacgagaggcgaaggcgagggtggcgacgggtagaggagagctcgggggtcgttgagaaaaacccagcaatcttgaagggtgtgtttcttggttttgtggataggacaccaagacctggtggcttcggaagtcatctttgtcagcccgtgatttatgtcagaaggataaggcttggccgcatcagaatccttcccgagcttgggtgtagtcggtaatccgttctccatttcgacgggtggatttttcgacatggagttgccttggttcgtagccactgcattctcatttccagtcattggaggaccggttgagatcggcatcgtggtgtaaaccgggaagacaatttcgccgacatgagtccataccagcattgttgaagtagggagtgcttggctgaagctggtgttgacgttgttgtcgacgaagctggatggcatagtagtagaaccttgagtaccagatgcctctacctggcgcgccactgtcgacgagtgatactcgtagaccggatatagagggtattggggtacgctggtacaaggataagatagtagtcgaagcatttgacgagatctctcggcgacttggctccgcattctccggctttgcaaactgtggtgggtgtgttggcgatgagattcgatgcctttcacccctcttccgggggttccttttataccgtggatcatcttgatctccaagtaaaactccgagtaggactttggaaatcacttgactcatggagatatttttcatagtttgtaacaaatccctataacgcatacgaaaacaaccgtgtacgtgaagatataccatactcgtatattccataagtcataggataggaggtatgctttatccgtaaccatga

SEQ ID NO: 18363 - DNA, 197 bp, Oryza sativa
  Clone ID: PAT_MRT4530_23929C.1
gtacgacccacgcctacgcttacgtgtaaagtccggatgctgaaagccacccactagatgaaggtgcctatacattagctggaccaacagtgcaaaagttcccaccaactcgtcacacccgtactgtaccacttggattgacgacaggacgcagctgtgctacaactgacagtcgagcaaggacgccgcggcggcga

SEQ ID NO: 18364 - DNA, 585 bp, Oryza sativa
  Clone ID: PAT_MRT4530_2392C.1
atggcggacgaacggcgggtaacggccgccgctcgccgcgccctccgcctcgacgacgtggagccggcggcggcagcgccagaggcctcggtggcagaggaccgcccgccggcgcctaggcgctgctgcgccgtcatgaccaacctggagcgcgccctagggcgtgccgccatcgccgtagacgaggcggcgacgcgccccgtctcgccgccctcccccgtcgcccgcgggcggcgaagtcgcggatcctccgacctccccgagcgcctccccccgcccaagatttcggcgagagggggacggtggggtgcgagcccgatgccggaaatgacctctgacaagcagagcatacgcctcctgccccgctcgcccgcttttccggtggacgcccatttcaaccttcatttaatggccagcgacttccttgccatacttgcactgaagcctggaatggatctgaccgggactgacataccaactcctggagttggcatgccggctccggctagggacgagagccaggaagctttcatcattccgacgggacggggcgaggcgtgtgacaggccgcctattgccacctaa

SEQ ID NO: 18365 - DNA, 1525 bp, Oryza sativa
  Clone ID: PAT_MRT4530_23930C.1
ccgcgcgcccgccctcctctcagctgggccggcccaagccggggggctgcccgttgcctgctggggacgggtattatctgatttttgtcaccaagcgccgccaaattggttgcatttgtgggcatcctatttactgtatagatgagagccagatgataaccattccacactcatctgtgcagacacgtcctgcaacctctaagaatgagctaaggtacaagaaacttctggctagtgttgatctcaccaaggatttcttctatagctacacataccccattatgcagagcctgcagcagaatgttacttctgcagggatgaaggaaatgccttatgaaaatttatttgtctggaatactttcctgacacagccgattcggtcaaggtgccgcaatactctctggacagtagcgctggtccatgggcatttcaagcaggtcaagctgtcaatatttggcagggagctaaatgttgttctcatttctagaagatcacggcattttgcagggacacggtatttgaaaagaggcgtgaatgaccatggaaaagttgctaacgatgttgaaactgagcaaatagtctttgaggaggaagctggttcctggaagggaagaatgagtgcagtagtacagatgcggggatcgatccctctcttttggtggcaggaggctggccgacttagtcctaagcctgatattattgtgcagagatatgatcctacatatgaagcaactaagttacattttgatgatgtcgctcagcgctatgggcatcctatcataatacttaatttaacaaagatttttgagaaaaggccccgagagatgatgctcaggcgtgaatattttaacgcagttggatatcttaatcaaaatgtcccagaggagaagaaattgagattcatccactgggatttccataaatttgcaaaaagtaagtctgcaaatgttctgggtgttttaggaggaggtgctagtgaagcactggatctcactggattttactacaatggaaagccaaaagttcaaaagaaaaggtcaacacagcttacccatatttcttttcacagggatggttccattgatacaagagctagttctggagaccttccaaggctttcgagtaatgcagattcacttggtcccactgcttctcaagatataagaaaagatgacagcaaacaagaacttcttggtgatggtccttgttatcaaactggagttcttcgtacgaattgcatggattgcctggatcgtacaaacgttgctcagtatgcttacggccttgctgctttgggaaggcagcttcatgcaatgggagcgactaatgtttcaaaaatccacccagatagcagcattgcttcagctttaatggatttgtaccagagcatgggtgatgcacttgtaggatcccctggcggcgcggccttccatcatggcgtggcgcccgggcggagaggcggccttcgaccgcggcgtggtggccggctgttcattgcttcagtgaagaggctctacattgctca

SEQ ID NO: 18366 - DNA, 1507 bp, Oryza sativa
  Clone ID: PAT_MRT4530_23931C.1
tttttttttttttttttggttttactcaaaacttcaaagaaatcagggtcattaagatgagaaatttaatggaccatacaggtttttgtagagccagaaacaaagaggctactacgtaacatcaagcaaaacgattgatattcctataaaatttggagaatggagctcttgtaaatctagtaaggccaatatgtgcataaaaacaatcttaaggccaatggtaaggggaacaaagtaacacagaccgaacaaaactttttgacctcgtaaaaaatctttgaaaggttccggatggttgaagcgcatgctatctgcgcaagaaacccatggcttggtatacgttgttgagggtgatgtctgctatctcagcagcttttcctgatccttctaagagaacaccatccaaataaccaggatcagacattatctcctcgtagcggacctggataggttgcagatgatcaatcaatgcatctgtaagagttgttttgaacgacccccagttcatattttcgcattctctgataacttcctctttagttttccctgtaataatctggtagatcgagagaagattgttgcattcaggcctctctgggttgtcaaattccaagcctgggaacgagtcagttttgcagcgcttaatcttattcatgataacatcttttggatcaagaaggttaatacgagactgatctgaaggagcagacttcgacatcttggagagaccgtcggttaaggacataacacgagcccctgctggaggtataagggcttcaggaaccttaaatagtgaaccacctctccctcccattttcttccatttccttccaccgtatagattatttacacgctcagcgatttcgcgagttaattccaaatgttgtgtctgatcttcaccaacaggcaccagatcggactggtacaggagaatgtcagaagccattaaaacaggataagtcaaaagtgccactccaacattttcatcacccgccttgcgtgacttctctttgaattggatcattctgttgagccaaccaataggagtagaagaactcagaagccacatcaactcaacatgagcacggacatgagactgtacaaatatagaagcctttgaactgtcaatgccacaagccagatatattgcagcagtgcttcttgttgcttttgacaactgtggtgcttcatatggtaacgtaatcgcatgcaagtccacaatgaaaaataatgtctcgtatagatcctgaagtgaaacccaattcttaatagcaccaagataatttccaaggtgtaccaatcctgttggctgtacaccagaaactactcttttcttcctagccggaggagcaggcgcctcgtcgccggaggcagtcgcttcagccacgctgcagttgagtcggagagtgcggaggcgggacgggagcgctcctcctcgcccaccacccctcgacgcgaggagcggcggcgggcggtggaggatgtgggagaggagcgtgcggctcat

SEQ ID NO: 18367 - DNA, 957 bp, Oryza sativa
  Clone ID: PAT_MRT4530_23932C.1
atggcagtggaaaaaggaaagcgagttcacgtcgtcgaagcagaaactgacgtactctcgcccgacaacgaactcgtcttcctagagttcgaccttcatgtcacacacatcttcggcggctctacaacatactcctcaaagagggaatacaagaaggtagagcacggaatctgttctacatcacaaggagttcctcctgagatgaagtggttcgaacagaagatcgagttctctgaagaggaccacccgacgactacaactatcctagggagatatccgatagtggttgaacccactattcagaacattaatgtcgcaccagttctcatcgacggtagcagctcaatcaaccttctctttgttggcaccttggacgcaatgggaatcccacgaatcgacaactttcgaacagagcagatcacatttgatatcagtgccatcttagggagggctgcactcgcgaagttcatggcggcatcccactacgcgtaccaattgctcaagatgccagggccaaaagggacaatcactattcagggaaatgcgaagttggcagtacagtacgacaagcggagcctcgacatggtcgagcatactcccacatcactcaccacaactgagccacctaagaaagtgagcaagcccaacaaggcgccaagacctgatgacgcgatcaaaattgtcccgctgaccagcaccaaccctgataagactatcagcatggctgcagaggacgaggagaagacaacattcatcacgcctttttgtgttttctgctacaccaagatgcccttcgggttgatcagcgcaggcaacacgtatctgcgggagatccaaggagttctcggtgaccaaatcggacggaacgtcgaggcctacgtcgacgacgttgtcgtcaagacaaagatgggcgacacagtgatcgatttccttagggaaacattcaacaacctctga

SEQ ID NO: 18368 - DNA, 1065 bp, Oryza sativa
  Clone ID: PAT_MRT4530_23933C.1
atggcgttcttcctccctctcgcgttctccctcttcctcgccgtcatctccgcctacgtcctccagctcctcgccgacgctcgccgccggctgccgccaggcccgtggccgctgccgctgatcggcaacctccaccagctcgaccacctgccgcaccgctccctcgcgcgcctcgccgcgcgccacgggccgctcatgtcgctccgcctcggcaccgtgcgcgccgtcgtcgcgtcgtcgccggagatggcgcgggaggtcctgcagcggcacaacgccgacatcgccgccaggtccttcggcgactccatgcgcgccggcggccactgcgagaactccgtggtttgcctgcccccgcgccgcaggtggcgcgccctgcggcggctcagcaccgtcgggctcttctcgccgcgccggctcgacgccatgagggctctcctggaggagaaggtggccgagcttgtccgccgcgtgtccggccacgccgcgcgcggcgaggccgtggacgtgggccacgccgcgcacgtcgccgcgctgggcgtcctgtcgcgcaccatgttctccgtcgacctcgaccccgaggcggcgcgcgaggtgagcgacatcgtggacgaggcgtcggtgctgggcaccgggccgaacgtctccgacttcttcccggcgatcgcgccggccgacctccagggagttcgccggaggatggcgaggctggtgaagaggatgtacgccatcattgacgagcagatcgagcggaggatgcatggccgcaccgccggcgagccacgcaagaacgacctgctcgacgtgatgctggaggagggggagagtaaagaagatagcaacgaaattaaccgtgatgccatccgtggactttttacagatttgttcactggtggagagacgacttctcacacaatggagtgtgcaatggcagaactattgcagtgtccaaactcgatgagaagggtgcacgaactcaagagtgtgataggcagcaaacaacaaatggatgaacatgatattaccaaactgccctaccaccatacgaggccgaagccacgatag

SEQ ID NO: 18369 - DNA, 678 bp, Oryza sativa
  Clone ID: PAT_MRT4530_23934C.1
atgggcgccgccgacaagggcaccggcgtgcagttcgaggacttcctgccgtcgatggcgaggaagctgggcgtggaggggctgatcgaggagctctgcaaggggttcgagctgctcatggaccccggcgccggcaagatcaccttccggagcctgaagaggaacgcggcgatgctagggctcggcgagctccgggacgacgagctgtcggagatgatgagggaaggggacctcgacggggacggcgcgctggaccagatggagttctgcgtcctcatgggagctagataccacaagaacggaaaatcgcacctgtggtccgcagcggacgagccaggcgcatcaccggcggacagagacaccggacgagtcgacgagagggccctcgaagataggaacagcccccacggccccaaccccgaaccccgcgtcgcggtggcggcggtggcgtcagaagtcgatgtggaggcttccaggaagggagaggacgagacgaggacgggagcgcgagacctcaaccgccttgccgccgtgaggccgaggacgagcttccgcgacgccatcgccgccggcgcgccgtcgaagtggggaggaggatgcgttaacccggtccggtcgaggatgcggcgaggtcgggtcgggacggcaagggacctaaatgtaaattttccagcataa

SEQ ID NO: 18370 - DNA, 459 bp, Oryza sativa
  unsure (1)..(459): unsure at all n locations
  Clone ID: PAT_MRT4530_23935C.1
tttcctactgcaaggcgctggagcggctcagcctcagggtgaggccccgcatggctgcgagcttcctcgtcggcggctgtggcttctgcttgggtctcctcgaccctgtctccaacatcgtcgccaacaccctcttctcctacgggcgcgcggtgggcgagacccggagcgagtgtgacgagctcgtctacatccccgaagaaaagctcagggacctggagcaccggtcgctggacggcatggtgaccttcctcacccgcttcttcccctacctcgccgacgccgaggccgtgcgcttccttctctacgccgaagccgacctgctcgtcgccgcccgcatcgtcgcgttcgacatcggcatgaggcgattcgggtcctccgggccagacatcgtcaacgaggccctcgagaatggcctcaagtgcgccgncctcgccgncaagcacccaaaccccgatc

SEQ ID NO: 18371 - DNA, 822 bp, Oryza sativa
  unsure (1)..(822): unsure at all n locations
  Clone ID: PAT_MRT4530_23936C.1
cggacgcgtggggcagcctttcctgagtatggatcgcctgaagagagttactggcatggctaagggattatcagctgttccggctcagaaaaacgaagacgagagcttggttctctttggtgagctgtacaggcatgagaaggagaaggatgtgaacctccttgaaccaatgtactcagtggagttcgaagcaattcaaggaaccagtcgtatgttcaagttaccatcaggcaagaaagattacctcctaccagatggtggaaagcacgattacgactggctcaagactcctccagctactccactgttcccttccctcgagatggaagctaattcctctcaaatggtttttcagagagaattgcctatccttcagccagttaaaacttcaaggttctcaatcaagcctgaaccaacaagcacatcaacaagaactgaatcgcctacctccagctcctcaaagtctgctactccgacggcaagatccagtagctcttcatcaaagaaaaacttcaccaaaggagatcctgctctctctgaagtgaccacagcttacaaaatggacaagagatcaagctacactcctctgaagaacatacaacaacttgcagctccaacaactaanagtacagcagccagcaaagcagccaagaaaacctcagccagcaagaagcctgaattcccaggcagcacaaatgcagtaaacaaaatggccaaactaggaatccccgacaagccgctgaagaaaaccacagcgactgcaccgaaagctcggtccaaagatcccgccattggtatgaaggatctgaaaatggatgctgg

SEQ ID NO: 18372 - DNA, 1250 bp, Oryza sativa
  Clone ID: PAT_MRT4530_23937C.1
atggccgggggaggcggtagcctggcggtgggcggcggattgaacgggtggcgaggcgtcagcggcagcgtcggagctgcggggctagaggagggtagtgggccggcttggtggcgggggcatctaaccgccaacggctcgaggatgaagaagggggggggttctcgccggcacgctattccaactggcgaggcggttggaggaggtggtgccgtggtggggattgatggtgaggccgccgtgctgcgacaaggacggcgtcaagaagggcccgtggacgccggaggaggacctcgtcctcgtctcctacgtccaggagcacggccccggcaactggcgcgccgtcccgaccagaacagggctgatgcggtgcagcaagagctgtaggctccggtggaccaactacctgaggcccgggatcaagcggggaaacttcaccgaccaggaggagaagctcatcgtccacctccaggcgctcctcggcaaccgctgggcggccatcgcgtcgtacctccccgagcgcacggacaacgacatcaagaactactggaacacccacctcaagcgcaagctcaagaagatgagcgccaccggcggcggcggcgacgacggcgagggaggtggcgccggcgaggtgaagaccagggcggctgcgccgaaggggcagtgggagcggcgcctgcagacggacatccacaccgcgcgccaggcgctccgcgacgcgctctcgctggacccctcgccgccggccaagccgctggactcgtcgtcgggcgccacggcgccgccgtcgtcgcaggcggcgacgtcgtacgcatccagcgccgagaacatcgcgcggctcctggagggctggatgcgccccggcggcggcggcggcaagacgacgacgacgccgtcctccgggtcgaggtcgtcggcggcgtcggtgctgtccggggaggccagccacagcggcggcgccacggcgccgacgcccgacggctcgacggtcaccagcaagacgaaggacgaggagaccgccggcgcgccgccgccgccgccgccgccggcgttctccatgctggagagctggctgctcgacgacggcatgggccacggcgaggtggggctcatggacgtggtggtgccattgggggacccgagtgagttcttttagagtggcagcttgctcgacgcggccatggattacaccttctaatccacaccaccaccaaaccatgcaagaatcgtagcgtaagcgagagtga

SEQ ID NO: 18373 - DNA, 306 bp, Oryza sativa
  Clone ID: PAT_MRT4530_23938C.1
atgtcgatcatgctcttcctcgagcgactctacatggcgctcgtcgtcgccgccctgtggctgattcgccgccgccgccgccgcagcaacaggagggagcaggacgacgatggcgctgaaaacgaccagctgctgcaggacccggaggcggccaacagccccatggtcctggtgcagatccccatgttcaatgagaaacagtacattgttagttcgcgcaaatgcatggtcagtgggtgcgttcatgctgaacttgctctccgtgcttccactacatgcctgtccacgtcgtctaatgtaaagtaa

SEQ ID NO: 18374 - DNA, 222 bp, Oryza sativa
  Clone ID: PAT_MRT4530_23939C.1
atggacatcggcgttggccgccagggtttatggacaagtcaccagatacgtgccgtagcggagacaagggggagcggctgcgagacaggagctggtgagaaccgtggtcttgcgatgccgtgcgtgacctatagaggttccggtggtctcatcgcgtctcagctcaggaacaacgacgccacgacctggaaccacgcgttggatgagtccggagagaaatga

SEQ ID NO: 18375 - DNA, 1475 bp, Oryza sativa
  Clone ID: PAT_MRT4530_2393C.1
ttttttttttttttttttttttaggagaaagtattttacatggacccttcggggttccggacaaatttttttttttttttttttttttttttttacaagaaccgtgttttcagttttccccatgagcaaaacagcaacgtggtgacagcgtatcatacattcgtgctgctacagatcgaaaggcagcacataccctcgacagcgtttttacagtttccggtacacaatacagattacaccatacagacacacgaggtcgtaggggacactcgggacattcaggaatcaggactattcacctgaacctaattaaattctctggacctgaatcttgctgctttcacaactagcagtttactgattcgatccgtagatgtataagagaaatcctttaggagattggtatgacacgtgatttcggtcgttccccgttccgtctttgatcacggccttgctctcttccaggaagagcccaaccccaagcggattgcctgccacgtccactggtgccacggttacctggttcattattattagatgtaccagcattttggttcaagccagccaagtgatgcctagcattccccttccatgattcctcgaacccagctagttcatcttcatggagattgtgcaatatctgtgtagtgtccacattgccatccgatttcagcttccttgttagtgaatgtcccttgtcatgaattcctcgagagattctatgagtagcctctttagtcgttgtatcagcttccttgctttcttccacagttattccatcacttcctgtccttcgagtttttgaagcagtgtagtaagctccattgacaccaccataagtcacggaagagctctgatatgtgaatgtacgagcttgtggctgcccttcatttgccctgttgaaatccctccgtggctggagttggcccccttgcatctcatcatctggttcttgaacatacggctcacgatttgcttggcgttgcctccctgagttctctccttcctcctcatcaagctcagtaataataagcttcctgccattacctctgggaggagcttgctcaaggaatccatcattccttatgtctccaaatggtcctcccattggcccaaaaaggctaggaccgtgcatcccgcttccaaatggctgattaaagaacggatcatcgaaaggatccctgcctccaaagacaccagagatcaagctcctctggcgaccaaagccaccgaatccggcaaacgggtccctcccaccaaagaagtcatctcttccatttcgccctctatccatttctaagtgattacgtaggctctgaatctcctcgaggccggagcgcacgcaggatgggtgggggggggggggaattgcgcgcgcgctggtggagggagacgggtggggatcagccgccgaggacggggaggaggaggatttgtcctggtttggtggtggtggggagcggcctttatccgag

SEQ ID NO: 18376 - DNA, 670 bp, Oryza sativa
  Clone ID: PAT_MRT4530_23940C.1
ccactcatttctctccggactcatccaacgcgtggttccaggtcgtggcgtcgttgttcctgagctgagacgcgatgagaccaccggaacctctataggtcacgcacggcatcgcaagaccacggttctcactgtcacgagcacacgaatccgacgtgaaggtctaagaccacactccacggtggagcgttgtacaaggcctagtcctccgcccgttgtggccaccacccagctcctgtctcgcagccgctcccccttgtctccgctacggcacgtatctggtgacttgtccataaaccctggcggccaacgccgatgtccattttttttaacggaattaaaccagcttcactcgcttcacggcttcaagttagtcggcaactgctcggtgctgtcactgacgccgcaagcagatcggtcatcggcgcggcgcatgggtcgtaagcccatagccgatggattgaaagtggactttttccataattggatgtggatgcacgctcgacgccaccgcggcatcgcacaccggaacaggccgagcagtcggcagaaggcccaatcgggcacgcggtttcttctctctctctctctctctctctcgttctcgattgttgatcacgcatgtcttttctttttggatttagcaagagcacacgcatatgctcttgga

SEQ ID NO: 18377 - DNA, 511 bp, Oryza sativa
  Clone ID: PAT_MRT4530_23941C.1
ggcacgaggttatcatcctattgcacaagggaaaaaaaaactccgtttttgtttgtttacagcacgcagtgggcatgaattctctgaaccaccaactatttaggtccggataaccaaacttatcatgtgttttcaaccttgcagtctaggtaatactatattctcaggccattccacacaatggctgagatgcttgtcctgtgagtaaaggcattgttagctgttatgaggtccttttcaaattcctatgtttgccgacaaggccatgcctgtagagttgctcatgataatggcatgctttttgttcttttgtggattccagaatgagtctaagagaagttacatttgccctttttacctctggtagtgctaagtatacttgctgcatcctggtcatctatagctacatatagcagttgtatgtttaaatatttaaccgtatatgcgcgaattaggttattgaacttttgtcataatttttcagggtgtgcctcgcccctctgttccaagg

SEQ ID NO: 18378 - DNA, 440 bp, Oryza sativa
  Clone ID: PAT_MRT4530_23942C.1
ggaggcgaaaattttcaagctcgaagagagaagaatcaactaacattgaatttttgcccacacacacatgactgtaggtagaaaggatccttcatagtatcattataaaaacgacacagttaatttctgctagtctcattggagaagcgacctctaactactgtacatagctcaaacacatcgttttcacaatgcccatggcatcacttgccaactgtacctgactgacacctcgtatgcaccactgttcctcttaacacggaccttgtctaacttccttccattaaagcgcacatatggatctataggtgatgagcggcacaccatgagcccaaccaaagagcctgacggcctcacggtcattcttggaaccccccaatacgaccgtgttctccccaatcggagcacggagagcaagcaggtcaaaagtgatgcactct

SEQ ID NO: 18379 - DNA, 468 bp, Oryza sativa
  Clone ID: PAT_MRT4530_23943C.1
atggcgacgacagaggagaagattgcatctacacgactcatgcggcagcaggcgcaggtggagttcggccgcgcgcgatcacttcgtctccacgccgtgctcatgcgacgtcgtgctcaagtggagcttggccgtgtccgagtgctccgcgacgccgccgtccgcatgcggcaggaggcgcagatggatatcgctcatgctcgtacgctccgtgtgcatgcccttcgcatgcggctgcgagcgcaagcagagctcgttcgctgttgcaacaccgacgacggcaagggtgacaacggagagaaggcaggggacgccggaatccgagagggcagcgtggtcgactcactggccggcgccgatcgtttcactgactccgacaacattgggtacgttgttgactcactggccaacaacacatttgttgcagattcactagaggtgactgacgccgaggaaaaaaacaactga

SEQ ID NO: 18380 - DNA, 4157 bp, Oryza sativa
  Clone ID: PAT_MRT4530_23944C.1
atggcgaccattcttcttcttcttcttgggttgcttgtcggcctccccctcctccgcgcccatggcgtcaccggctccgcggccccgacgccgccgcctctgccggtcctccccgtcccctcctacgcgcagctccagtggcagctctccgagatggccctcttcctccacttcggccccaacaccttcacggattccgagtggggctccggccgcgccgacccggccgtgttcgcgccctccgcgctcgacgcgggccagtgggcgcgcgcggcggcggcgggagggttcgggcgcgtcgtgctcacggccaagcaccacgacggcttctgcctctggccctcggccctgacgaactactcggtggccgcctcgccgtggaagggcggcgccggcgacgtcgtcggcgagctcgccgccgccgcgcgcgccgaaggtatcgggctggggctgtacctctcgccgtgggaccggcacgagccggtgtacggcgacaccgtcgcgtacaacgagcactacttgggccagatgacggaattgctcaccaggtatggagatgtggaggaagtttggcttgatggtgcaaagggagagggcaaggacatggattacatgtttgatgcctggtttgcacttatccatcagctccagcaaagggttgtcatcttctcagatgctggaccagatacaagatgggtaggagatgaggcaggggtcgcaggttatacttgctggtctcctttcaataagagcacggtgacgattgggcacatcattcctgaatattcacgctgtggtgatccttttgggcaagactgggttcctgcagaatgtgatgtttctatcaggcctgatatgcaagtccttcaggaatttactgagattcggcagacaattttctctcagaattttgctgcaaatgccactgtcacagcaagcaccgtgcgcggtggccttggcaatcagcagtttgcaccctccaatgttcttcaggaaagcatatactcttactgggctccagaggaagggcagagctcctgggaaatgctctttgatctcggacaatctgcttcattcaatgtgatccagcttcaggagcctatccagatgggacaacgtgtaatcaagttccgtgtggaaatcttggtggatgaattgtggcaaacaattgttgaaggcacaacaattggttacaagaggctgtttcaatttccagttgtcgaaggcgcgccggctttgcctccgccgccggcgaccatgtctgaccaaccacctccctacacccccctccccctcctctcctcctttcccccgaacccctaccccgaccaaacccccgatcccgcgtccacccccacccttgtcctccccaaccccgccttccccaacaagcgcaagcgcaccggcttccgccgcaagctcccctccggctcccccgccgcgcccgtcgccgtcgctgcgtctccttccgcccagccgccgccccgcgcctccgccgccgacgacatcatcgtgatcaaccgggagccgacagcggaggcggtcaccgcactcaccgcgggcttcccggcggactccctcaccgacgaggagatcgaggcgggcgtggtctccgacgtgggcggcatcgagcaggtgaactacatcctcatccgcaaccacctcctcaccaggtggcgcgagaccttcaactcgtggctcgccaaggagtccttcgcgacgctcatcccgccacactgcgaccacctcctcaacgccgcctactccttcctcgtctcccatggccacatcaacttcggcgtggcgcccgccatcaaggagcgcatccccaaggagcccacgaggcacaacaccgtcatcgttgtcggcgccggccttgctgggctcgccgcggcacggcagctggtggcgttcggatttaaagtggtggtgttggagggccgcaagcggtgcggtggccgtgtgtacaccaagaagatggaaggaggtggacgctcagctgctggtgaccttggcggcagtgtgcttaccggcacattcgggaacccgctgggcattgtggcgaaacagctcggcttgccgatgcacaagatcagggacaagtgcccactttacaggcctgatgggtcaccagttgatccagaggtagataagaaagtggagggtacatttaacaagcttcttgataagtctagtcttctacgggcatcaatgggggatgtggcgatggatgtctcgcttggcgctgcacttgagacgttacggcagacggatggcgatctctctactgaccaggagatgaacttgttcaattggcacttagcaaatctggagtatgctaatgcagggttgctgtcaaagctgagccttgcattctgggaccaggacgatccgtatgacatgggcggggatcactgtttcttgcctggcggcaatggtaggcttgtgcaggccctggcagagaatgtcccgattgtttacgagaggacagtgcacactatacgttatggaggggatggggttcaggtggttgtcaatggtgggcaggtgtatgaaggcgacatggcgctgtgcactgttccacttggggttctgaaaaatggtggcgtcaagtttgtacctgagctgccacagagaaaacttgatagtattaaaagactaggctttgggttgttgaacaaggttgcaatgttgtttcctcatgttttctggagcactgaccttgatacctttggacacctgactgaagacccaagtcatcgtggagagttctttctgttctatagttatgcaacagtggccggtggtccattgctgatggcactggttgctggtgaagctgcccacaactttgaaaccacaccccctactgatgctgtcagttctgttctcaagatactgagaggtatctatgaacctcaaggtattgaggtcccagatcctctgcagagtgtttgtactagatggggcacagactccttcagtctaggttcgtattctcatgttgctgttggagcatctggagatgactatgacatactagctgaaagtgttggagatgggcggttgtttttcgctggagaggccaccacgagacgttatccagcaacaatgcatggtgctttcatcagtggtctgcgggaggctgcaaatatcactctccatgccaatgcccgagcagcaaagagcaaagttgaaaaaggtccatcaacaaatacacaggcctgtgctgctctactcatggacttgtttaggcaaccagatttggaatttggcagcttctctgtcatttttggtggacaagcttctgatccaaagtccccagccattctgaaggtggaactaggtggccctagaaagaaaggtgcaactgaagggggaaaggcggaccagcaccactcaaataaattgttgtttcagcaactccaatcacatttcaaccagcaacaacaactttatgtctacacattactatcacgacagcaggctatggagctaagagaggttagaggaggtgatgaaatgaggctgcattacctctgtgaaaagcttggtgtgaaattagttggcaggaaaggtcttggtccgggggctgatgctgtgattgcatccattaaggcagagcggaacagcagtagaactaaaactaggccctcaaaattaaaaattggaatccctaaatctaaatcttgagttcctgaattagctgcattatgatctagagttactgatactttgatttagaagcttgaccgcatgatttttctttatcctgtcaatcgtgtttctacctggtaatcatgctgtttgttcgcatgaagcttctgctgagcgctggctttgtcccagaacattctgatatcacatttttggtgattgttagatgatacaatggtactagttagatttttgagatttcccagatttatatggcacctgcatctgaagggtatgcgaaggtagcaaaacctgcttgtatcggcagtcaaactatttacttattactgaagaatcttatagtgaagattaccggattcacaaattgtagtaggagtagttaagctgatgtaaatgatttggtgattgaatgaaacatatttgcaccttcgtttccaaaaaaaaaaaaaaaaaactcgagactagttctctctctctcc

SEQ ID NO: 18381 - DNA, 1152 bp, Oryza sativa
  Clone ID: PAT_MRT4530_23945C.1
atgatgaggctgaaagtgacgatactggtggtagcatttgttctcagcgccggcgtgcatatctcggcggcggcggcggccgccggccagagggaggaggtgcacctggtgccggcggtgtacgtgttcggcgactcgacggtggacgtcgggaacaaccagtacctgccggggaactcgccgctgcagctcccctacggcatcgacttcccgcactcgaggcccaccggaaggttcagcaatggctacaacgtcgccgacttcatcgcgaaactggtgggattcaagaggagcccgccggcttacctgtcgctgacgccgcagacgagccgtcagctcatgcgaggctaccgcggcgccaattacgcttctggaggatccggcattctcgataccactgggacaaccgtcgtcacgctgacaaagcaaatcgtgtacttcgcggccaccaagtcaaagatgatgtcgaacggcggcggcgatggcaacagctcgtcggcgtcggcgtcggcgatcgacgatctgctgtccaagtctctcttcctcatcagcgacggcggcaacgacctgttcgcgttcctgaggcagagcaaccggacggcgagccaggtgccgtccttctacgccgacctgctgtccaactacacgcggcacgtccaggcgctgtacagcctgggcgccaggcggttcggcatcatcgacgtgccgcccatcgggtgcgtgccgtcggtgcgggtcacctcgcaggcgggcgccaccaggtgcgtcgacgccgccaacgacctcgccagggggttcaactccgggctcaggtcggcgatggccaggctcgccggctccggtgctctcccggggatgaggtactccgtcggcagctcgtacaacgtggtgtcctacctcacggcgaacccggccgccgcggggttcaaggtggtgaacagcgcgtgctgcggcggcggccggctcaacgcgcaggtcgggtgcggggcgcccaactccacctactgcggcaaccgcaacgggtacctgttctgggacggggtgcacgggacgcaggccacctccaggaagggcgccgccgccatctactccgcgccgccgcagatgggcttcgcctcgcccattaacttcaagcagcttgtttcttcttga

SEQ ID NO: 18382 - DNA, 411 bp, Oryza sativa
  Clone ID: PAT_MRT4530_23946C.1
atggcggcggcggcggagggtgaaaagaagatgataacgctgaagagctcggatggagaggaattcgaggtggaggcggtgggcatggagtctcagaccatccggcacatgatcgaggataaatgcgccgacaatgggatccccctccccaacgtgaattccaagatcctctccaaggttatcgagtactgcaacaagcacgttcacgcctccgccgacgactcaacctcctccgctgacctcaagaactggacgccgacttcgtcaagcgcagagttcgtccagatctatctagacatgatcaagggcaagactccggaggaaatccgcaagaccttcaacatcaagaaggacttggcccctgaggaggaagaggagatccgcagggagaaccagtgggcgtttgagtag

SEQ ID NO: 18383 - DNA, 540 bp, Oryza sativa
  Clone ID: PAT_MRT4530_23947C.1
atgacggcgaactggccgcgtgcagcggggagtgggtggcggagcagatcggcgtcggcggcgacgtggcgacggagggcttccggtggcggggaggtgtgggagaacgggtctagccgcacgacggcgaactggccgcgtgcagtggggagcggggagtgggtggcggggcagatcggcgtcggcagcgacctggcgacggagggcttccggcggcggggaggtgtgggagcacgggtcacggcgcgtgacggcgaactggtcgcgtgcagcggggagtgggtggtggagcagatcagcgtcggcggcgacctggcgacggagggcttccggcggcggggagggacacggtttggggaagcgatggaggggagcaacggggagaaggagaggcggcagccaacagctcggcacaaggaccatcggcggcgacggatgcgcgacgtgaggatggaggaggaggaggaggaggagaaggaggatgctgttggtgcgaaggcggcatggtgcgaggaggaggcggcgtcacttggcgtgtga

SEQ ID NO: 18384 - DNA, 656 bp, Oryza sativa
  unsure (1)..(656): unsure at all n locations
  Clone ID: PAT_MRT4530_23948C.1
cgggctgcaggaattcggcacgaggaaatctgccaccgcccgatttctccgcccagcattcgccgtcgagcggcgacccccgcctccccaccgccgccgccgccgtacctccacaggaatggccgatgtcatcgacgagcccatggtcgaggcgttcgcccgactcgccctgaaggcttccctcgctcacccgagggtgacatgggggagggcaccccgcaagtattttgggaggaatcgactctggcctcgcccccagaatccgcctggagctcgtagactgagacccttctcccgctaccccttcacttacatacccgctatatttgggatttattgattttcagtgccagaggtgacgggatgcttaaagctggatgctctcaataaactcttttatcgcaaattaaatgagatcggaatgttgagaaaaatcatttatatgcgcaaggcatatattcctaaaccagctaagaaagaagcattcctcagacgcactgcggagatgtgggatcggcatggtcatctcttgaccaatgccaagaagttgcttgaatgcctacactgtttctggcttcagggtgccggagatgctagtcagtttgacgnacagttctgatatgtccgttgtgctcccggcttatactcatcttccg

SEQ ID NO: 18385 - DNA, 443 bp, Oryza sativa
  Clone ID: PAT_MRT4530_23949C.1
attgacggtcgttatcgatcagtttcgaccgtcaatattactaaaacaggagagaactagtgatgctttcaatgcatatatttgttagaataataatattccactagtgttaggtttactaaccttttgcagagaatgatcataaagtggaggagaatcgacatcaacaccaacgataaatcaataagagatgtcgagaaccaggcttatgcatgaatgggccaagaactcagaattgacacgacaaactgggccaaaattcacaagtctgcaaagagaagcaacagaggaggccgccagccgaaattggattggatcgggccggccccaggttcggccgaaccctccttagcgccatctgatccagggctttgcctagacggtgtggattagcccccaatgacggttggagggcattttcgaccattccaaccgccacaacc

SEQ ID NO: 18386 - DNA, 366 bp, Oryza sativa
  Clone ID: PAT_MRT4530_2394C.1
atgacggagcttggggctcctcaccgggagaccgcgcagggccccctttgccggttcggccgggggcgctatgtgaggttcttcgccctcgatctaaggaatccggaagtgacccctgacaagcacagcacacgccttctgctccgctcgtcagctctcccggtggacgcccgtttcaaccttcattcaatggccagcgactttcttgccatgcttgcgctgaagcctagaatggatctgaccgggactgacataccaactccaggagtcagcacgccagctccggctagagacgagagccaggaagctctcatcattccgacgggacggggcgaggcgtgcgacaggccgcctgttgccacctaa

SEQ ID NO: 18387 - DNA, 906 bp, Oryza sativa
  Clone ID: PAT_MRT4530_23950C.1
atgggcaagtacatgcgcaaggccaaggtggtggtctccggcgaggtggtggccgccgccgtcatggagctcgccgcggcgccgctcggggtgcgcacccgcgcccgctccctcgcgctgcagaagaggcagggcggggagtacctcgagctcaggagccgcaggctcgagaagctccctcctcccccgccgccgccgccgaggaggagggcgacggctgcggctgcgactgctgatgcgacggcggcggagagcgcggaggcggaggtgtcgttcgggggggagaacgtcctcgagctggaggccatggaaaggaataccagggagacgacaccttgcagcttgatcagggaccccgatacgattagcacccctggatctaccacaaggcgcagccactcgagttctcattgcaaggtgcaaacacccgtgcgccacaacattattccagcatcagcagagctggaagcgttcttcgctgccgaagagcaacggcaacgacaggctttcatcgacaagtataactttgatcctgtgaatgactgccctcttcccggccggtttgaatgggtcaagctagactgatagattttcaggaaaagaagggcacccatggacctctctgctccctccacagtagtagcgtgcagaggcgcttaccgtcaagttagctttgatcctgttgtaaaaatttagggttagcctgtagactcaatggtcaatgtgaacatacagaactgatgctgagttacaaccctaatccctcaatacaatgtaacccttaacagctcattctgtaaggaaccacctcctcctctagggcctagctagccttatcatctgttattaccagttgctggattaatgaagttagatctagatattgtgtcaaaaaaaaaaaaaaaa

SEQ ID NO: 18388 - DNA, 571 bp, Oryza sativa
  Clone ID: PAT_MRT4530_23951C.1
gctctcccgggcagccgcggcgaacgcctgtgggtcggcacgttcgacaccatcgaggaagacgcgcacgcgcacgacgctgccatgctcgccctgtgcggtgcctccgccagcctcaacttctccaactccgcctggctgctccacatcccgcgcgcccccgccccccgtcgtctccggccattagctgcccgacatgcagcgcgccgccagcgaggccgtcgccgagttccagcgccggggaagtaccgccacctccggcgacgctgcatcgaccgcccctccgccgacacccgttctccaaaccaaacaatgcgacttcatctctgtttcttcactagattgttggatgttaatgtcaaagcatatcagtagtagcatagcgaaaggatcgttgtgcctgcaaaaaaatcccatttcattttgcatggttacaaattcttacccttctcttttgctcgaatacattatattgcagatgaattccttcgtgttgtgtatttctagattacagagataaaccttatcaatactaactaacacaacaaactcaatccatacctatagttac

SEQ ID NO: 18389 - DNA, 183 bp, Oryza sativa
  Clone ID: PAT_MRT4530_23952C.1
atgaagatcgatggactagcagtgctgctcctgtatggcgaacctggatttgacctaaaaagaggcaaaccatcttcgcgcgacaatgggttctcacctcctgggcaagggagcatgaggagcagcacaaccactggaagcaatctgtggcttctgcactgcggcagcagaagttgttcgcag

SEQ ID NO: 18390 - DNA, 1915 bp, Oryza sativa
  Clone ID: PAT_MRT4530_23953C.1
gttctatcagaatggtctccaatggtaatgaagatcttaaagcggatgttgaactagtagagtcgacaacagtggacaatgatactggagccccaggtgccagtactcttcctactcaaggtgttccacgacaagggaagcagcggaatgggtttctgaatttctgtaatcgcttttccagtggtgacaggtttaagaagttgggtccttcgccttcattcaagtttcgacagcttgcacttgagcgagatgagttctcacgttccatccactctgacagccatgataatcatgagcacttccagtttatcaggaaaattaattggggccatctgtgggtaatgtgcaaggattggataaaagagcctcttaatatggccctttttgcttggattgcttgtgttactgtatctggtgcaatactattccttgtcatgactggaatgctcaatcgtgcattgcctagcaaatcacaaagagatgcctggtttgaagtaaacaaccagattttgaatgcattattcacactcatgtgcctttatcaacacccaaagcggatatattactttgtgctgttgtgtcgatgggagcaaaaggatgttttggtccttagaaaaacatattgcaaaaatggaacatacaagcccaatgaatggatgcacatgatggtggttgtggtcctccttaatttgaactgctttgctcagtatgccttatgtggtctcaacctaggataccgcagatctgaacgacctcctatcggtgttggcctgaccatttccgttgctatcggggcagcggcatttgctggattgtataacattatcagtcctcttgggaaggattatgacacagaactgactgaagttgaccaagaagcacaaactgaactcaccaggccagcaacctcacgaacatcacttgaaaagagatactctttcattcaaagtgaagagcgccgttttgtggagagtaggcctgagtgggttggtggactaatggatttctgggacaatatatctcttgcctacctgtcaattttctgcagttgctgtgtgtttggatggaatatgcagaggcttggatttggtaacatgtatgtccatattgctacatttatgctcttttgccttgctccgtttttcatcttcaacctggctgctgtcaatattaacaatgaaaaccttcgagaagcattagggcttaccggtctcgcactttgctttttcggcttactgtatggtggcttttggagaatacagatgaggaagagatttaacctacctgcgaacaacttctgctgccgcagtgcagaagccacagattgcttccagtggttgtgctgctcctcatgctcccttgcccaggaggtgagaactgctgattattatgatattgctgaagataggtcatatacagagcagattactgcgagaagccagcatgtaatgaccccattgtcgcgcgaagatggtttgcctctttttaggtcaaatccaggttcgccatacaggagcagcactgctagtccatcgatcttcattatggagagtccatcagctccacggagatcacctggacctagccctctggggggttcgccgacaatgggcgacaggacaatgaaggcgcctactccatctgttctccacagagacggtgagcccgaattgtagtaccgggaaatgcaatgaagcattagttatcctgagtctattttgtatatttgatgtaaagaaaactaccatacaccttttttttttcatctgcagcttccatgcaactgccattgcttatgaaatgtatagactagaccatcatttcagttcagttctgtactactctgtaagatttctttttgaggtgaagtgaatggtaagcgagagttgtcaatttactatccaaaaaaaaaaaa

SEQ ID NO: 18391 - DNA, 1584 bp, Oryza sativa
  Clone ID: PAT_MRT4530_23954C.1
accctcttgttgttcatcatcttctgcatcttctcttcttgttacatccccagtcctgccatagcttctgatcatgatccttcttccaaaggtttcatccattgcctcaccaagaaatccattcctccatggctcatacacaaaaggagctcctcttcctatacacccatcctcaagtcctccatcagaaaccctaaattcttgaacaccaccgcgtcgacgacgccgctgtgcatcgtcatggcgaagaagacctcccacatccaggccgccgtcgtctgcggccgccggcatcgtgtccgcgtccgcgcgcgcagcggcgggcacgactacgaggggctctcgtaccgcgccgagggtcgcctcgagcggttcgccgtcgtcgacctgtcggggatgcggtcggtgcgcgtcgacgcagcgcgcggcacggcgtgggtgcagtccggcgcgacgctcggcgagctgtaccacgccatctggagcagcgcgccgcggctcggcttcgccgcgggggtctgcccgaccgtcggcgtcggcggccacttcagcggcggcggcttcggcatgctgcagcgcaagtacggcctcgccgtcgaccacgtcgtgaacgccacgctggtcgacgcgaggggcgacctcctcggcagggacgccatgggcgaggacctcttctgggcgatccgcggcggcggcggcgggagcttcggcatcgtggtctcctggcacatcaagctcgtccccgtcccgcccaccgtcacggtgttcgacgtcgtcaggacgccggagcgcggcgccatcgacgtcctcacgaaatggcaggagatcgcgccccgattgcccgacgacatcatggtcagggtcatcgccgagccacgccgcgtcaccttcgaggccatgtacctcggcacctgcgacgagctcctgccattgatgcaccaccgattccccgacctcgccatgacaagggcggactgcaacgagatgacatggatcgagtccatcccctacatccacctcggcagcaacgcgacggtggccgacatcctgaaccggagctccatctccagggtgaacaccaaaaaccgatccgactacgtcaggcaccccatcccaaagtccatttggaagaagatcttcgccaagctacaacagctaaccaacttcggtgaggttcagctgttcatagacccctacggtgccaagatcagccgcatccatgaatccgcgacaccgttcccgcaccgggaaggcgtcctgtacaacatccagtacatcacgtactggaacggtgatgcaaatggcacactggctctgaagtggagcagggacctgtacaagttcatggagccctacgtgagcaagaaccccagggaggcgtatgccaactacagggaccttgatcttgggaggaacaaggtggtgaacggcatcagcagctatcaccatggcaaggtttggggggagaagtatttcagggccaatttcgaaaggcttgccaaagtgaaggccacggtggatcctgatgattacttcaggaatgagcagagcattcctcccttaccgggccggccgcctgcgtcg

SEQ ID NO: 18392 - DNA, 746 bp, Oryza sativa
  Clone ID: PAT_MRT4530_23955C.1
gtgacgtcagcgatgacgtcagcaccggcggcggcttggcggctcggcagctcgggcggcgcatgctcgccggcgaacgacggcacgacgacgcaaacggaaggcaccaacgggtagaaggcgacgcgacgaactcaccggtgaccaaaaccacggcggaaaagcaacggacggcgccggcgacgaggaagaagcggcggcgacttcggcgacggcgaaggggtggacggggacggcggcgacttggcgaccacgatggcgacctccccgagcgacgacgacgaccggaacggcggcggcgcacggctggagcggcggcgacgacggcggcggtaggtcacacggcgctagggcgcttccgacggcgagagacgaaggcgagggaggcggcgggtagaggagacaccgggggtccttttaaaggggttggaaggcggcggcaaaggcccacggcgaccggcggcgggatggaaagcgattaagacgatgattccaaaagagaaaaggaagaggagatcgagaagatcatttcccctcaaaagatttcaccggagaaggaaagaatcgaccggatttggaaggagacggcggcggctcggacgcggctcggctagggtttcgggcggcggcggctggaggttgacgacaaccctgacaggtggggcccacctgtcagcgacatcgagagagagagaggagagcggcgggaattgagctctgaaaaatccgagaaaatctcagagagt

SEQ ID NO: 18393 - DNA, 920 bp, Oryza sativa
  Clone ID: PAT_MRT4530_23956C.1
ttatttttgaaaaggaaaagaggattattgcgtcagcgggctcgggttcacggtggaccgggtgcacggctgcggttcacggaaacggacggccgagatcgatcctatccaaaacggacggccgagatcgatcggatccaccgcggctcacggacggacgacgacgatgacgtcagcgacgacgtcagcgatgacgtcagcaccggcggcggctcggcaactcgggcggcgcatgctcgccggcgaacgacggcacgacgacgcaaacggaaggcaccaacgggtagagggcgacgcggcgaactcaccggtgaccaaagaagaagcggcggcgaagatcgggtcgacggcggcgacggtgctctggcggtcttcggcgacggcgaaggggtggacggggacggcggcgacttggcgaccacgatggcgacctccccgagcgacgacgacgaccggaacggcggcggcgcacggctggagcggcggcgacgacggcggcgctaggtcacacggcgctagggcgcttccgacggcgagagacgaaggcgagggaggcggcgggggttggaaggcggcggcaaaggcccacggcgaccggcggcgggatggaaagctcggggttcggaggaaagaaaccgatccgaatcgacctcgaatccacgaacttccaaagcgattgagacgatgattccaaaagagaaaaggaagaggagatcgagaagatcatttcccctctaaagatttcaccggatcgggaaaggatcggtggggcccacctgtcagcgacagcgagagagagaggagagcggcggctcgggctggctgggccgactgggccggtggagagagagaaagagaggggttttgggccgactttcggcccaaagccaaaagaagacttttaaaaacctttttcaatt

SEQ ID NO: 18394 - DNA, 378 bp, Oryza sativa
  Clone ID: PAT_MRT4530_23957C.1
ggggggggggggtttttttttttttttttttttggaaaaaaaaagctagctactagctagcagctgggcgcatagtaggaccatgcattattcggaccaggattacatacacacaaacgtatacggccgggcttaattagcaggagaggagaggagaggagacggttctagcacgcatgggcatatgcctgaaggcggggcagggcgcgattaccccgggcggcccaccaccctgggccgctgctgatgcgcgacgcggccggcgtcggaaaagagggccacgggccccgaccctgcgaacttcctgcagccggcctcaacttcttccccccccggacagacccggcgagcccgggtcgaagagaccgacggggctgg

SEQ ID NO: 18395 - DNA, 594 bp, Oryza sativa
  Clone ID: PAT_MRT4530_23958C.1
cccgggctgcagggtttttttttttttaacgattcaaagtagtggtaatttggaattgccgctaactatttagtttaaggattaataattacaataaataaaaaactctgggcggacgaagaggtcgtcgacgtcaggggaccgagcagcactgtgaggaaccaggcatgggtagtcccgtaccagtttatccatcgtgcagagcttttgatccaataagaacccataggcactaaaatgcaaagcattctccgaacatatctaactccaatagagttttcacctatgggtaaactgacaaacaggtaccattgccatccctaatagcaaccagttacgaatccagaagtctgcccttcaggctactcacggagaaaaacacatcatgttatcatccttgtggtgtcaaccttctgaataatcaaaaggtggtgcatcaatcatcttcatcttcgtcatcctcttcttcctcttcctcctcctctccataaaagtcgtcatcatcatcttcctcatcctcttggtcattgtcatcactgtcatcttcttcagaaatcttgacttgctcaaaactgaaaagtatgttaaatgtag

SEQ ID NO: 18396 - DNA, 762 bp, Oryza sativa
  Clone ID: PAT_MRT4530_23959C.1
atgcccgctgccgctgctgcgccgcccgccgctcggccgctcggccctccacccgccggagcgccgaccgctgccgcgaggccggccggccctctgcccgccggcgcgccaccgcaaggccgccggccgcccggccctccgcgctgcagatcaagaagtggggaggatgggggagggaaaggaggagaggcgccgccgggcctctgcactgcagatcaagaagtggggaggattggggagggaaaggaggagatgaagagatatcaagaacaaccctcgctccgtgtcgccgttggagagctcgttgaccccttccggtatgcacccccgagctccatctccggtgctcgagccgcccacctcatcggagcttgcctcgaccaccggcgttgcagccctcgttggcacgagagaccgccagatctgtgcggcaccaccggggagagagcggagaggcgatggcggcagtggggaggggagaggtcggagacgagcctgaggacaccgtcattcgctgcttcgcttggcgcttggcgctcggctcgtgcccgaggacatcgtcgccgctctaccgggggagctccgctcgacgctagtcgccgcgccgccaggggagctccactcgacgctcatcgccgcgtgccgcttacgagcccccgtgttgccgagcttgctgcaccgttgtcggggaagctcgattcaccggcgagggagaaccaccgagctccggaggaggaagagcgccgatggagaagacttctc

SEQ ID NO: 18397 - DNA, 1733 bp, Oryza sativa
  unsure (1)..(1733): unsure at all n locations
  Clone ID: PAT_MRT4530_2395C.1
tacgcctggcagggtactcggtnccggnaattcccggngtcgacccacgcgtccgcttatatcgcaagaaaggaaaaaaaaaaaaaaagaaaaaaagagagaaaaaactcactgcatcgcctccgcctctcgccgccatcgccgcgatgaagctggacgtctccgccatggagaacaacttcgccgcccacgccgccggcggcgaggacgacggcggcctcttcggcgccggcgccgacctgcccgccatggagctccccacctgccccgccgacttcgacgggttccagaaggagaccaaggagatgctgaagcacaagaagggaacgaccacgctcgcgttcatcttcgacaagggcgtcatcgtcgccgccgactcccgcgccagcatgggcggatacatatcttcgcaaactgtgaggaaaattattgaaataaatccgtacatgcttggaacaatggcaggaggtgctgctgattgtcaattttggcataggaacttgggcatcaagtgccgactccatgagctcgcgaacaagcggaggatctctattgctggtgcttcaaagcttttggccaacatcctgtactcctaccgtgggatgggactgtcaattggtacaatgattgctggatgggatgagaagggtcctggcttgtactatgttgatagtgagggcgcaaggctcatgggaagccgattctctgttggatcaggttctctgtatgcctatggtatcttggacgagggttaccgctatgtgatgccagttgaggaagctgctgagttagcaaggcgggctatttaccaagctacattccgtgatggggcaagtggtggttgtgttagcgtttaccatgttggcccgaacggctggacgaagctttctggagatgatgttggggagctgcactacaagtactacccggttgaggccactcctgtcgagcaggaaatggccgatgccccagctgcttaaacctccctctgcccaatctggcgcatggtatccagggctgtgaactgtagaagcgcccttgtctatgaacttgtttggacatgtttctctcgtcgatgttgagagatctcttttgagatcagctgatgtttctcattaactttacgctactgctaccgcaaatgtgattgtagactcgtatagatgctttttattcatgtttcctttacattggtaaaaaaaaaaaaaaaaaaaaaaaaaaagtactgcgttcacctatgtttctcgatatcacgccttttcgttgctgaatacacataataaatatcactaatttttatgtaaaaaaaaaaaaaaaaaaaaaaattgttccccgttatttccatttttgagtgcgttttattcccccccctcttgtcttttatttaccacgcactgggggggggaaaatcctgctgctacacaagtttattcattagcggacaaaaccattatttagaattgtatataaagaaaaggctactctcttgccttttctctatttccgctctggttgtgcttagagcccgccctatgaaagtattagcatgttggggtgattctccctcgtactttttgaagttcgccctaccgcattgtatttttttatattttttttaccccaatatttttctctaaaatcagtattgctcttatcattaaggagatgactaactcaaagtatgttgtccgtagatatttagcaacgtggggagcctcaccagtaatgtaagg

SEQ ID NO: 18398 - DNA, 593 bp, Oryza sativa
  unsure (1)..(593): unsure at all n locations
  Clone ID: PAT_MRT4530_23960C.1
agcccgaaaacgtggggttcagtctcgttaatgaaaggtttcaagtggttaagtttctcgacgaaaaatgaccattcagttaagataaaccatacacactctaaccagctactctcatttgcttttgcctgcacacaatatctttgggtacaaaccggagaagcaaaggttatactatgaggcatacatcaggaagcaagttgctccagccaaccgaaattgcaaccatctttttagccatggacaacagggcgagctcaacaaaaatctttccagccagcaaccgaggattttccgattgctgtagctcacctgacctgggccagtgcagcacccatcaacacatgcctcttcttggcttttgctgcaacttttgagcaccaacaaatgtattgtcaattagctaagcagcaaccaccaccatcaaaagcttgatattttcagctgacttgcatatcattaaatcccccaaatcattctgcccccgccactaatcaaggtggcgagtggctgtaacacacanatggatccgggattcgaaggaattagtagcttgtaatttcagcaagctgtaaaattctagatacttctaa

SEQ ID NO: 18399 - DNA, 352 bp, Oryza sativa
  Clone ID: PAT_MRT4530_23961C.1
ggccaaaacaaaagggccaaacagggggttaaaaatggaaaaacccttttccccaaaattttttttaaattgggggaaaccccttattacaacaaacaaggggaatccccaaggcccacccctaaaaaggggcaagggggggcccgtttttcccatggggggggggggtttttgttgggcggactaaatttgaagggggggggtggttgcccggaacacggacggaactttgaatttaaaaatttttaaaaaggggggggctgggctttgcaagactagggggtcctagacccccaccaaggggggggcggggacaaaggggggcggggtgttaaaaaaactggggaagggc

SEQ ID NO: 18400 - DNA, 330 bp, Oryza sativa
  Clone ID: PAT_MRT4530_23962C.1
tcgcacggttctgcaggtgctccatacaatcctagtcctatcggagagggcgagaaatggttacgctgacagaaggtcacggctgaggactgtgacttgctgcacgcacaaccagtcaagcagtgtccatgagtcagggctaacatgctgtttatggccggctagatgcactgtcatacatgcctagtgcgttcataggaacgtttttgacggcttggcttgcttaagcatgaacctctaggctggagaacatgagatatgtagggccgaagctgaaaaagctccgtatgaacgcactcgacccagatgataaagctggtgtcatgcata

SEQ ID NO: 18401 - DNA, 492 bp, Oryza sativa
  Clone ID: PAT_MRT4530_23963C.1
atgagcgcctcctccgcttcgactctgcccccggtcgggaaatccgggttcaccaagctgtgcaagggcctcgccgtcgtcttgttcctcggccacatcgtgatccggctgttcccttcagctgtcacctacctcgcgcttattccctccaggacaatcccatttgcttggaacctcgtaacttcaggctatattgagcaaacaattccaggggtgattgtcagcatagttggtcttcttgttttgggaaaagtgttggagcctttgtggggtgctaaggaattactaaagttcatttttcttgtcaatctctcaacttcggcttgtgtctttgtaacagctattattttgtactacataacacagcaggagatctacctttacacgcctctttctgggttctatggagttctttcaggatttctggtgggtatcaagcaaattttacctgatcaagagattactcttttcctgctgaatattaaagcaaag

SEQ ID NO: 18402 - DNA, 1065 bp, Oryza sativa
  Clone ID: PAT_MRT4530_23964C.1
atggctgacgagccatggaggctgccaaacatagtgcaagaactggccgccggcgtgcaggagccaccgagccggtacctgcaagacctcgccggcggtgaccagctcgccggcgccgagataccggagcccatcccgaccatcgatctcggccggctgtcaggatcggacggtgccgacgaggctgccaagctgcggtcggctctgcagaactggggcctcttcctggtttctaaccatggcgttgagacctcactgatcgatgctgtgatcgaggctgcgagggaattttttcggcagccagttgaagagaagaagaaactgagcaacctgattgatggcaagcgttttcagatagaagggtatggaaatgatcctgtgcaaaccaaagatcagatcctggattggtctgatcggctgcatctcaaggttgagccagagtgtgacagaaatctagccttttggcccacacatcccaaatcttttagggatattctacatgagtacacactgaagatcaagacggtcaaaaacgatatcctcctcgcattggccaagctcttggagcttgatgaggattgcctcctcaaccagttcagcgacagggccatcactactgccagattcaactactactctccttgtccaagacctgatcttgtgttaggcctgaagcctcactctgacctctgtgctctcaccgttcttctcactgacaaagaagtcggtggcctgcaagttcttagagatggaacatggtacagtgttccagctgtgcgagattactctcttctgattaacattggtgttacactggagataatgaccaatgggaccttcagggctccattgcatagggtggtgacaaatgcagagagggagagaatgtcggtggccatgttctacgctgtggatggcgagaaggagatagagccggtggctgagctgctggggctgaagcaacaatcagcacggtacaggggaatcaagggcaaggacttgttgattggacactatgaacatttctctcgtggtggtagagttgtcgattcattgaagatctaa

SEQ ID NO: 18403 - DNA, 276 bp, Oryza sativa
  Clone ID: PAT_MRT4530_23965C.1
atggaggtgaatatggtcttcgagaagtggagtcaagaggaagaagttacgggaatagtgaactctcttgttatggtgagtttggtggagggcttgtcggagcggctcggcgtgagcggcggaagaaccaactcaagtcctagtacatggaggttcgagcaactaacatattcaagtttgcgtggcatattcgccaaggacaaaacctctttaccagatgagctagttcacactcctaccgagcacctgaccgacatgaaaaacacgaaggcctag

SEQ ID NO: 18404 - DNA, 2492 bp, Oryza sativa
  Clone ID: PAT_MRT4530_23966C.1
gcacgagcgccgcgccgcctccgcagcagcagagcctctcgaaattttgggcctcgccgcggagcgcgaagagagatcgagggcggcggagctgcgcgtgggtagcaagcggcggcggaggcggaggcggcggagatgacggacggccatctcttcaacaacatcctcctcggcggccgcgccggctcgaatcctggccagtttaaagtgtattctggaggtcttgcatggaagagacagggtggaggaaagaccattgagattgagaaatctgatttaacgtcggtgacatggatgaaagtccccagggcctatcagcttggagtcaggaccaaagatggcctgttttacaagtttattggcttccgtgaacaggatgtaagcagtctgaccaatttcatgcaaaagaatatgggcctctcaccagatgaaaaacagctttctgttagtggtcaaaactggggagggattgatataaatgtcacactctccattgtaggaaatatgcttaccttcatggttggttcaaagcaagcatttgaagtgtcgctggcagatgtctcacaaacccaaatgcaaggcaaaacagatgttctcttagagtttcatgttgatgatactactgggggcaatgagaaagattcgcttatggatttaagctttcatgtacctacttcaaatactcagtttcttggagatgagaatcgcactgcagcccaggtcctatgggaaacaataatgggtgttgctgatgttgattcttctgaagaggcagttgtcacctttgaaggaattgctattcttacaccaagaggacgttatagtgttgagcttcatctgtcatttttgcgtctccaaggacaagctaatgattttaaaatccaatatagcagcattgttcgcctttttcttttgccaaagtcaaacaaccctcatacatttgtggttgtcactcttgatccaccaatccgtaaaggacaaacactgtatcctcacattgtcattcagtttgagacagaggcagtagttgaaagaaatctggcattaactaaagaggttctggctgaaaaatacaaggacaggctggaggaatcttacaagggtctgatacatgaggtattcaccaaagttcttcgtggtctatctggtgctaaagttacaaggccaggttctttcagaagttgccaagatgggtatgcagttaaatcgtctctcaaagctgaagatggactgttgtatccacttgaaaagggcttcttctttctgccaaagcctcccaccctcattctacatgaagagattgagtttgttgaatttgaacgtcatggtgctgggggtgccagtatttcatcacactatttcgacctcctagtcaagctgaaaaatgatcaagaacatctcttcagaaatattcaaaggagtgaataccataacctcttcaactttatcaatggaaaacacttgaaaataatgaaccttggagatggtcaaggcgcaactggtggggttacagctgttctacgagacactgatgatgatgctgttgatccacatctagaacgaattaaaaatcaggctggggatgaggaaagtgatgaagaggatgaagattttgttgcggataaggatgatagtggatcacctactgatgattctggtggggaggattcagatgctagtgaaagtgggggtgaaaaagagaaattatccaaaaaggaagctagtagttcaaagccacctgtgaagaggaagcctaagggaagggatgaagaaggttcagagaaaagaaagccgaagaagaaaaaggatcctaatgcccccaaaagagcaatgacaccattcatgtacttctcaatggctgagcgaggaaatatgaagaataacaatcctgatttgcctacaaccgagattgcaaagaagctcggggagatgtggcaaaagatgacaggcgaagagaagcaaccttacatccaacagtctcaagtcgacaagaaacgatacgagaaggaatctgctgtctaccgtggcgcagccgccatggacgtggactctggctccggcggcaacgagtctgactagagccacacactgacactttggcggttggcgtaatgaagaaatttgttaatccctggaaccactgatgcagtttgggcactgaaatcttctcagctattaaccttgcattgcgctggatgatccgatccatgtgtttgcgtacgatggtatcggctgttctcgccgtggggtgactcgatcacaaaccgttactgtctgtgtacgccgacacgagcgatatccctcggaagcatcgtgctgttaagaagtgcttaatttggcgtagcatctatctcgaatgcaagactctgttagcctatgagcttttgtaaaacaggaagaatgatttgtataacaaaaatttaccatggattggttatgttataacatagtgatttaagaactaaaaaaaaaaaaaaaaaaaaaaatattct

SEQ ID NO: 18405 - DNA, 2067 bp, Oryza sativa
  Clone ID: PAT_MRT4530_23967C.1
atgggttacggatgggcgctcgccgccgtgctggcgacgtggtgcctgctcgacgcgctgtcgcgcctcgtgtggcggccgcgcgccgtggccgcggcgctgcggcggcagggcgtgcgcggccccgggtacaggctgctcgtcgggagcctcggcgacatcaacaagctccgcgcggacgccgccggcgccggcggcgccgcggcgctcgacgtcgcctcccacgacttcatccccttcgtccagcctcagttccgccaatggatccctctctacgggcgagtgttcttgtactggtttggatggacgccggacatgtgcgtggccgacgtcgaggtggcgaagcaggtgctctcggacaggacagggctgttccccaagaacgtgacgacaccgatgctgctcaagctgttcggcagggggctcgtcctggccaacggcgacgagtggcagcgacacaagaaggtcgtccaccccgccttcaacacggacaagctcaagatgatgacggcgacaatggccggcgtcgcacggtcgatggtgtcgaggtgggaggagaaggtggcgagccatggcgggaaggtggtgatcgagctgagcagccagttcgaggagctgactgcggacgtgatctctcacacggcgttcgggagcagctacgcggaggggaagcaggttttcatggcgatcaaggagctccagttcatcgccttctcaagccttctcagcgtccaaatcccaggctccaggaaggtgaggagtacgctgatgcagataatcagcaacagactcgccgccgccgcgaaggagaaggccggcggcggtggcggtggctacggcgaggacctgctcgggctgatgctggaggccagcgcgccaccggagctgggcacgaagcgtcgtcagccgccggtgctgagcatggacgagatcatcgacgagtgcaagaccttcttctttgccgggcaggagaccacctcgcacctcctctcctggaccatgtttcttctcagcacgcacccggactggcaggacaagctccgggaagaagccgtgagagagtgcgccggcgccggcgccggggacgacgacgaccagctccccacctacgacatgctcggcaagctgaagctgctaaatcagttcttactggagacgctgcggctgtacagcccggtgccggcgatccggaggcggacggcggcggcggtggagatgggcggcgtgacggtgccgggaggcacgatgctgacgttcccgatcgcgacgatgcaccgcgacgaggaggtgtggggcgccgacgccggggtgttcgacccgatgaggttcgacggcggcggcggcgccatggccaagctgctgtccttctccacggggccgagggcgtgcgtcgggcagagcttcgccatggtcgaggcgaaggccgtcgtcgccgcgatactcaggcggttcaggctggagctctcgccggagtacgtccacgcgcccaccgacgtcatcacgctccgccccaagcacggcctccccatgtcgtgcccggatttccaggaggcacggaggcttcacgcggcggtcctcgtcggcggccacggccacggcaccgtcctcgtcgcacagttggtgcgcgcgtacgcgaagctcggggatgtcgcgcacgcgctgcgggtgttcgacggaatgccgaggaggaactccttcgcgtggaacgccgtgatcaagggccttgtcgacgctggtagattctcggaggcgctggagatgttttgggggatggtgaacgatggctcggtagcggtggatggtttcacgtatccgcctgtcatcaaggcgtgtgctgcgcttggagctgttgcgcaggggaggaaggtatgggagatggtggagactgacattgccagcggtaatgcgaggcccaacgtgtttgtgcagtgcgcgcttgtggatatgtttgcaaagtgtgggtgcttggatgaagcaaggaatgtttttgagagcatgcaagtgagggatttggctgcgtggactgcgatgattggaggaactgtgcattcagggaactggcttgag

SEQ ID NO: 18406 - DNA, 654 bp, Oryza sativa
  Clone ID: PAT_MRT4530_23968C.1
atgaagtatgtggactggatattcatgaggcacaagaacaatgcagtctttaatgaagtaatcaaagtgtgtcaggcaaagaatcttggggagatccttgctcttgagtatgattggaatgaggagattattgggtggtccttgcttccaaaggttggggatgccacaactgttcctaccaagcatgctcacctcctttgctctatgcgctaccagtgccctgccttcagtgttatgaagctcatttggtttgagattcttgagaccatctatgatcctaagagaggtttagcttcagccgctccttcagttgctcctcagcgctcgagctcttcttctaccatcaagaaggcacttcaagctatcttttgtatgggcaccaagatagcaaagaaagtcaagaagattgagaggcatcagaaggaagattggaaggctgcaggcaaggatgtgtcagatgtttctgaggatgaagcttttgaggacccatttgctgcatatgaggctgctagggatgtggctgccggtgagggtccctctcactccttctgtgagaactccacgtctagtgatgatgatgatgatggggatgaggtgccaaatgttgagtcagaggggactgatcctgaggctgctgtggatgctgctgtatag

SEQ ID NO: 18407 - DNA, 227 bp, Oryza sativa
  unsure (1)..(227): unsure at all n locations
  Clone ID: PAT_MRT4530_23969C.1
aacagcaccaagacagctgcagggtccattagtgcaggggcacacacaggcaacaatcccagctcattccatctatggttggcnagcacacagcacacattcagggcgcaagcacacaagttccaacttgtatccgccgccttccccggagggtccatcaatccacaactgttttcaggcatcgtggccagtcaaattccaccctctaatgcgcaacatcaaatcct

SEQ ID NO: 18408 - DNA, 713 bp, Oryza sativa
  Clone ID: PAT_MRT4530_2396C.1
ctactgggcaagcaacgccgactgcgagcgcggctgggcgagcgaggaggaggcatgcatggtgctcggccgcgccgagaggatcgtgtatgttgtgagcatggcggcgtgctcggcggccttggccccgcacgcccacacggcctccaagcacgccctagtgtagctcaccaagaacgccgcctgcgagctcggggagcacggcatccgcgtcatctgcatctcccccttcggcgtggcgacgccgatgctggtgaacgcgtggcggcaggggcagggaggagatcacgcggatgaggatcaggcggcggcgagcgaggaggaggaggtggagaagatggaggagatggtgcggaggctggcgacgctcaaggggccgacgctgcgggcaggcgacatcgcggaggcggcggtgttcctggccagcgacgagtccaggtacgtgtccggccacaacctcgtcgtcgacggcggcgtcaccacctccagaaacgtcatcggcctctgaattgaatctctctctctctctcttagctaattactatttcagttatatatatatatatatatatataagtccgtgaccgtcctcatcgatcatatgatgatcgatggatgtactcccgcatgctcgactgtgctgtctgaaatctgatgactgaattccagcacttgcgcattgttgattattatgccaatattagtgtgcatcc

SEQ ID NO: 18409 - DNA, 300 bp, Oryza sativa
  Clone ID: PAT_MRT4530_23970C.1
atgaagttgacgctgaagtctcctgacgtggcgattttgtgccaccttggacaatatcttaacaccaaaaaccttggcgctgagacgttatatctcagcgccaaacgccaaacccgcctcgggcatggccatgttctgggcctcgggcttgccctaacccttgcagtttttatggtcctcggcaagaggggcatggcaacatgcaagtcgggcctcgtcgggcccaccatgcaccacatggtgagcgtattggtggaggcccaactgtctcgaatggagctcgggagcccggggctgtga

SEQ ID NO: 18410 - DNA, 523 bp, Oryza sativa
  Clone ID: PAT_MRT4530_23971C.1
tcattgctgtacctcgcgccggtaccacctggggcttggcttggccgcaattccggataagcaatcagtgacatgccctgcccggctggcgtacgataggccacttaacctgccggccgcggcggcctttcccgccggctccccgtgctccggcctcggtagcacaagcttgtgcgccttgaccaccggcaggaggtgcacgggcgcggcctgggaaccgtcgcttgctgctgcgagcacgtacacacccgtgtacatgccagcatctgcgtgggtggctcgcctccccgggcccggcatagcacgtgcgcgtgtgtgcgtgagagagcacccgcgccaccgccgggtccggcttttggtggacatggagggtgacgagacggcgatgcgcggccttgccccgcccggcaggcaagaaccccggccgcgcgcggccatctgcgctaggcacgcacgcatgcatcaccacctgcagcttcttgatttactcgcgtcggtcgatctgcttcgaggcgctgctgcc

SEQ ID NO: 18411 - DNA, 175 bp, Oryza sativa
  Clone ID: PAT_MRT4530_23972C.1
gcgccaacgtgttcatcaacgcgtacgaccacgcgttcgattcttttgattagctcagatgagtcattattttagtgggtgaaaactcatatgtacaccatggtagttatgaccatgaactcttcctaacaaaagagagattcttattgacaatctgctatttatcaatcactga

SEQ ID NO: 18412 - DNA, 1095 bp, Oryza sativa
  Clone ID: PAT_MRT4530_23973C.1
atgtcgggttttgaaggcttcacaaacccatttcccaagttttcgacaaacaatggtgtatgtgggatatttggtatacgtgctcagagaacacgaataccgaggtaccacaagggtggagcgacaaggaatcaggacttctttgggcggctcgggtacggcccaagggataagcacggcgcggccgagccaatgggccgggcgcgggcgcggggaggcggcccatggccgggcaaggcgcggcccaagcgggcggggcgcgcgggaggagagagggggatgggtccgggtggaccgtatccaccttgcggggtcccgggtggggcccgcttgtcagtggcgcggctctccgtgggagcggcgcatgagggcagcgctagggtttcgggggtgggagcatatccggggttcaaggaatccgttttcggcgccggatgggacagaggagcaccgaggacagctggcgacgagcggcggcctccgggagcggacggcattggcggcgaggccatgccgggcggcggcggggctcgaggcagcgtcctcgcgcatttgggaaggcgggatcacctcggtctcgggccgagggagagagggcggccggagtccgcgtcatctcctcgtgcgcacgccggcttcaccagcacgcgcgacggcggagggaggcgaggacggcggcagcatggcggggatggtggttcggcggcaatggcgctgtgggaggaaacgaccaaggcggcggcaggtgatgacgccggcggtgtcgggcaaaagggaaaagaagggggaaaggggcttggtcccttgccaaaacgagaaaagaaggaaggagagggagagcagctgcttctcccactcttggacgggtgcggcgttttcgtgggctgcgcgaaacgtggcgacggcgaggatgcgaaggggcggtggaggcggtggatcgtgcggcgggaattgaatcacgggcgcgggagcatcggcgtggcgcggtcaaggtgggggcacaggcgcggcaggacgttgtcggcgtcctctgcctccgcgcgcaagaagacaagggcgagaggagagaggccgggtttagaagggaaaaagtga

SEQ ID NO: 18413 - DNA, 1949 bp, Oryza sativa
  unsure (1)..(1949): unsure at all n locations
  Clone ID: PAT_MRT4530_23974C.1
gtcttaagcaaaaggggggatgtatgcgaacttagtgggggataacccatgctataaagtacaaaaggctgcatgacataatgttacaggagaccgtttcacagcattagagcaagaatcttcaacaatcaggttttgtttggggccnctngctcgggaacttcnttgagtactgctgcggggacataaatgttgccgtaatcatctttcccgcaaaccacctcccatgaagtgctttctgtgcnctcatggtngctgtttttctgtcaaatcgttggttctccnngcccgaagtattagtgcgactactgggtaggtccgtcggtttggcacgcaaaccgaggccaagcaagttaagtacggcgcggccgagccaatgggccgggcgcgggcgcgaggaggcggcccatggccggacaaggcgcggccggggatgggtccgggtggaccgtatccaccttgcggggtcccgggtggggcccgcttgtcagtggcgcggctcacagtgggagcggcgcatgagggcggcgctagggtttcgggtgagcgcggttcacgcgcgtgcaccggatggaccagggatgcggcgggcccacgcgcagccggttggtgcaccgtggaccgcgcgcgagaggggggaggaaggaggcggctgaccggctcggctcggtcaaagccgaggtggcgccgacgtggcgcctacgtggcagccacgcgggccggcgggaggaggaagaaggggcggccgagatggacggcggacggcggccgagttcaccggagctcgtcgcgacgattcgagagagagggagtacaccggaacgatgggacggacgagaggaagtgagccaccggatcggattcgccggagggaggccggcgatgacgaatcgcggcggcgtacgccggcggcgagaaaagggggaaacttcaccggagcaacgggggttcgattaaaaggggtgggagcatatccggggttcaaggaatccgtttccggcgccggatgggacggaggagcaccgaggacagctggcgacgagcggcggcctccgggagcggacggcattggcggcgaggccatgccgggcggcggcggggctcggggcagcgtccacgcgcggggggaaggaagagtgaggagggagaacggaggctaccgcgtcaggagatcgccgggaagggtgtccgacggcacaggcgggatcacctcggtctcgggccgagggagagagggcgaccggagtccgcgtcagctcctcgtgcgcacgccggcttcaccagcacgcgcgacggcggagggaggcgaggacggcggcagcacggcggggatggtggttcggcggcaatgggggaaaccgacattggcagtcaagggatgcaagggcgacgagctggcggtcgtcgacgcgtgtagccaaggcggcggcaggtgatgacgccggcggtgtcgggcaaaaggaaaaagaagggggaaaggggcttggtcccttgccaaaacgagaaaaggaggagggagagtgaggaggaggaggaggaggagagggagagcagctgcttctcccactcttggacgggtgcggtgtggagtggcgggggccatggatgacgttgacgatgacggcggcggtcggtttggcatggagcggggccgggcggctgcgcggcgcaggcgtggcagggctgacagcggcagcgaccggccggtcggccacctcgcgagcgagcgcacgcgacgcgggggtgcggccggatttcgaacggcgacggcgggagatcggcgccgaggagagggagaaaggaagcagagagagagcgaggaaagagagaggaagaagagaggcgatgcctctctctctcggcgcatgcagcgcacgtacggggaggaggagaagcgggctgagaggagatgggccggggaagagtcggcccaccgagccagagggagg

SEQ ID NO: 18414 - DNA, 333 bp, Oryza sativa
  Clone ID: PAT_MRT4530_23975C.1
gtgccaaaccgacggacctactcagtagtcgcactaatccctgtaggctgtactaccctgattccttgtctctccacccttgtggtaccttggtatccgtgctctctgagcgcgtgtaccaaatatcccgcatacaccgttgattgtcgaaaacttgggaaatgggtttgtgaagccttgaaaaccggacatgtactcgcgatgcgggagccgtgcctacgtggcattgtcccgtattcgcatataagaaccgattcctgtgggaaactcatcgagcataatcaaagtgcaaccacaaggtggaatgggacaccttggctaagtaactagtcg

SEQ ID NO: 18415 - DNA, 642 bp, Oryza sativa
  Clone ID: PAT_MRT4530_23976C.1
cccacgcgtccgcaaaattcagatcaggcgaatcgaaaaagggcaagagaagctcggagatcgcatcaatggcgtcgtcgtctcgtcgattcttcggctacgacccctacgactactactacacctcctccccctacgactacgcctacccgtactacacccccgcccccgccgccaccgaccgccgccgccacgcctcgccgcggttcttcccggcggcggcggccgatgaggagtacaggtacggcgagccggtggagacggtggacgtgctgcgcccgagctcctcgaggaggagcagggcgaggccggtgtccgtgtccgtcccggtgcagtttgctgggtctgagacgaaggcgaaggcgaaggggtgtgagagtgagatgagtccgccgcgatcggtggcgaggattgggagggaggcggcggcggtgagggtgcaggcggcggcgagggggttcctggcgaggaggatggtgcgggaggtgagggcggtggaggcggaggcggagggggtggcgaggaaggtggcggccgaggcggaggcgctgaggcgggccgcgagggggagggtcgccctcggggaggcgctcatgcggctgctgctccggctcgacgcggtccacggcgccagggagtacc

SEQ ID NO: 18416 - DNA, 843 bp, Oryza sativa
  Clone ID: PAT_MRT4530_23977C.1
atggacggcggacggcggccaagttcaccggagctcgtcgtgacgattcgagagagagggagtacaccggaacgatgggacggacaagaggaagtgagccaccgggtcggattcgccggagggaggccagcgacgacgaatcgtggcggcgcacgccggcggcgcgaaaaggggggaaacttcaccggagcaacgggggttcgattcaaaaggatgggagcatctccggggttcaaggagttcatttccggcgttggatggggtagagcgacgccgtggaggtccggcgacgagaggcggcctccgggagcgggcgccgacggcggcaaggccatggcgagcggcagcggggcttggggcggcgcctacgaaccacgcgagttaaaggaggaggagggcgagcgaggaagaggaacggagggctaccgcgtcgggacagggcaccgtgacgagcggcggcggcgcgggagcaagctctccagcctcgggccggggaaggggaaggagaagagtggccggagtccgcgtcagctcctcgtgcgcacgccggcttcaccagcacgcgcgacggcggagggaggcgaggacggcggcagcatggtggggatggtggtccggcggcaatggcgctgtgggaggaaacgagaggaaacgagtgggagggaggaatcaagggagactcaaggaaaggattcgagatgggaatttgatatttttcggaaatggggacagatggcaaatttggcagattactttaatctagggccgcaaattcacaggagtctgtatgatgtcaggatgaatcttgatgttctcaagtgttgttctacagtgctgttcctg

SEQ ID NO: 18417 - DNA, 629 bp, Oryza sativa
  Clone ID: PAT_MRT4530_23978C.1
atccttgcattgcatatttggtgggcactatttatgtgcctggagcgtaactacatcacccaagaacaatgcagatatccaaatatcaagaccaaacaaggagcctgaagagagccatggcttggcataccataaaatggccaaattaggaacatgtattccctccgtcccagaataaattaatctaatacaagatgtgatatatactagtactatgaatttggacaagtactgggatatgtcacatctcgtattagattaacttattatgcggcgaaggtactatttacttgttattgtgcaagaatcccatggctggacaatgctcgtgttcggccggacaaaatacttcctcggtaatgtcgtcttgacatgaaacaaactttcatcaagccttctcgccaagttttagaaaatattggtcatgaaatggaaggccatggaccttgaatgcagcatgatgctcgctgttgttcaccaccttgagattgcaatagcaccgcttatccagctcaaataggaaagtgagatcctcagggtaaatggagatcagcgttccgctgccgcccattgccacacctttcgctttgttcagagtaaaaatccaacctttctttccaagaactgag

SEQ ID NO: 18418 - DNA, 561 bp, Oryza sativa
  Clone ID: PAT_MRT4530_23979C.1
atgcactaccgagccgagacggacgctgtgacgagcggccgacgacgggggagcgagctcttcggcctcgggccggggaaggggaaggagacggcgcctggagtcccgcgtcagcttctcgcgcgcacgccggcttcaccagcacgagcgatggaggagggaggcgaggatggcggtagcaaggtggcaagggcacggtggtggcgagggaatgaacgagaggaagatagggaggctcggtttaatagatggcaatgtcggtttagggaggaagaaccgacattggcggtcaaggagagcgagctggcggtcatcgacgcgtgcagccaaggcggcgacaggacgcgcgtggagcggctcaggcacgcgcgcggggccgtgcggctgcgtggtgcagcacggcagggcagcggggccgggcggcgcaggcgcggcagggccgacgcggcggcgaccgggcgggatgtatcaagggaaactcaaggagaagtcatggaaaagattcaaaaggaatacttgggtatttgttcaagggagcatagggtgaggtcaaggaaatga

SEQ ID NO: 18419 - DNA, 273 bp, Oryza sativa
  Clone ID: PAT_MRT4530_2397C.1
aaattaaccctcctaaaggaataagcttgcggccgctgacgtccatgaaggaaacgttgtgcccattgatccagagaagctcgctcccgaacagaagaaagacttcgatgccatgatgcagcaagcacgagatcaatttttaagttcattcatgcagactcgcaagggcacatttgtccagaagtacaaggtgaaggtggttcctgaggatcttgggatcggttcttctaaagggggagaaaaaaaaaacagacggcccgctcccctcgtgcc

SEQ ID NO: 18420 - DNA, 2084 bp, Oryza sativa
  Clone ID: PAT_MRT4530_23980C.1
atggatctcctccagtcgtcctacacgccggacgacgaggacgacgacgagcagcagcccctctcctcgccggacgcctcgccgctccgcctccccgccaagtcggccgcccccgccgtcgacgacacggcgctcgcgctctccgccgccgccgcgtccacctcccgcccgctcgacccctccctccacctcgtcccctttaaccccaccgccgaccagctctgggcgcccgtcctcgggccccagcacccccacgcccccatctcctccgcctccggcaaccgcaaccacaagctcggccacgtcgaggacgccgccgtcctccccttcctcttcgacgagcagtacaacaccttccaccgcttcggctacgccgccgacccctccggcctccacatcgtcggcgacgcccagccctcggccgagcccgacaccgtctacaacctcgccccctccgagcacaagcgccgccgcctgcagtccaaggacgaggagggcgccaaccaggagcccctaccgccggaggccaagaacccggcgtccgacgagtggatcctccgcaacaagcagagcccctgggccggcaagaaggaggcaccacccgcggagctcactgaagagcagcgtcagtatgcggaggcgcacgctgccaagaaggccgagaaggaggcgcgcggcgaagggaagggcgagaagtctgatatggttgccaagagtactttccatgggaaggaggagagggattaccaaggacggtcatggatcacaccgcccaaggatgccaaggcgagcaacgagcgctgctatattcccaagaggtgtgtgcacgagtgggttgggcacaccaagggggtctcggcgattaggtttttccccaagtatggacaccttttgctgtctgcgagtatggattgtaagattaagatctgggatgtgctcgagtcgaggacatgtatgcggacgtacatggggcactctaaggcggtcagagatatatcgttttctaatgatgggactaagttcttgagtgctgggtatgacaggaatatacagtattgggatactgagaccgggcaggtgatctcgaccttctctactggcaaggtcccttatgtagtgaagctcaacccggatgaggataagcagcatgttctcctcgctgggatgagtgacaagaagattgtgcagtgggatatgaagtcagggcagataacccaagagtacgaccagcacttgggagcagtcaataccatcacttttgtagataataataggaggtttgtgacatcaagcgatgacaagtcgcttcgtgtgtgggagttcggcatcccagtggtgattaagtatatcagtgaaccacacatgcattcaatgccatcaatatcactgcacccgaattccaactggctggcagcacagagcttggacaatcagatattgatatacagtaccaaggagaggtttcaacttaacaagaagaagcggtttgcgggtcacattgtggcaggttacgcttgtcaagtgaacttctcaccagatgggaggttcgtgatgtcaggagatggtgaaggtagttgctggttctgggactggaaaagctgcaggagatttaagacgttgaagtgccacaatggagtttgcattggatgtgagtggcatcccttggagactagcaaggttgcaacatgtggatgggatggcgtaattaagtactgggattgaagttttggaaatgtaatgagagaggtttctcgagaatgtcctggttttgtggacaagttcatggcaatgcaatttacaaggtttgaacttcaggagatgttgaaagcacgcatgtctatccagaaaacttcaatgtcatcaggtgaaaactataccatgtttttaagctaccatgtaagctcgttctgctatcgaaagattgtaatgtactatgctatgtatacatactggaccaatcaattttgaactgtacgttactgcttacctgtttttggtttcagttcgtttattaatgccaacatttgtagcagctcagaacaaggcttgaataccaggttttattaggtagtttatcaatcttt

SEQ ID NO: 18421 - DNA, 2205 bp, Oryza sativa
  Clone ID: PAT_MRT4530_23981C.1
cggtcgccgccgcgtcggccctgccgcgcctgccggggcctgcgccggccgggccccgctgccctggccgcgctgcaccacgcagccgaagggccccgcgcgcatgcccgagccgctccacgcgcgtcctgccaaaacccggaggccgagctctccctctccctccgccagctcgctctccttgaccgccaatgtcggttcttcctctctaaatcgacattgccatctattaaaccaagccgccccatctccctctcgttcattccctcgccaccaccgtgcccttgccgccttgctaccgccgtcctcgcctccctcctccattgcgcgtgctggtgaatccggcgtgtgcgcgaggagctgacgcgggactccaggcgccgtctccttccccttccccggcccgaggccggagaactcgctcccgcgtcggcggccgctcgtcacagcgtccgtctcggctcggtagtgcctctcccgttctccctcctcgctccctctcctctccttagctctcatggcgcagctcgtgaacgccaccagattgaggcagccgagtccggccatcatccagaagaagcgatcaaggtgcccctcgttgaggtcgtcggggatccaccccggccggcctccggtcgccgtcgcccacgacacggcggtcaggacgagcgagctcaggtatacccctgccgcgacggcgaggaaaccaagcgccatgcacaccgtcttcatggcgggcggcgcctggctgtagaagaagtccagctgcccggcggaggcgagcatctcgcccacgcccatcaccgcgtactgcggcacctgccacacgatgctcgtcttctccattcccatccgcgcagcgcgggcgcgcttcgtctcgaccagcgccgcggcggccatggcgagcacggccatggtgagcccggcgccgatcctcagcaggtcgggaatgcccttctccctcccggcgagcctcctcgccgccggcacgaacgcgcggtcgtacagcgggatcagtgccatggaggtgagcaactcgaaggttgccagcgaggccggcgggacgcggagggagccgacgcgggcgtccatcgccatgccctgctcgacggacatcgaattgacctgcgccgtcccggtgtagaagaaggcaatgctcgcccacagaggcagcatcctgacgagaatcttgagctcttcgacctgcgtcaagctgcaaagcctccacggatcgcccgccgcctcctcatccgacgccgtcacgacggcggccttgtcgaagaattggagatcatcggtgtgtttgatcctcttaactctttccatggagcagtcgtcctccggcacctcgtagagaagggcgacgtcggccggcggcgcgacgttgaacttgcggacggcggcgacgacgacctggcagactcttgtgaaagggctcccacggtttcgctgaaacctgtacgccggcgtcgcggcgaccaggaaggacagcccgacggcgagaaccatcgccggaatcgctaagcccagggcccacccgtagtggtcctgcaaccacaccatggcggtggtggatatcacggaggcgcagttcatggtgaataggtaccagttgaagtaggagcccttgctattgcgctccgatgggtcgccggcgtcgaactggtcggcgccgaaggacatcaggcacggccggagcccgcccaccccgaaagcgatcatgtacaggccgagaaacaagacgaattcttgagctgaagccatggccagagtcgaaatgttcttgatcagcagcggcagaagcgctgagagagacgccatgagcaagccagcgacgccgatgcagcagccgaccaccatggtgtggtactttccccagtaggaatcggcgacgatggctccggccaacggcgtgaggaagcaggtggcctgccacgtggacacgttcttggcggcggcgacattgctctgatgcagctcggtggtgaggtaggtgacgaggttgatcgtcatcccgaagtaggccaggcattggcagaactcggtgccaagaatcgagcggcatgctctccatccaccagtgcgatgcttcagcgccgggttgccatcgatgtcaagagacccatccgttgtgtatacttcttcttctgctaccttggggtcaagcagcgccactgcgtgttcttgctgctccgtggaggccat

SEQ ID NO: 18422 - DNA, 1182 bp, Oryza sativa
  Clone ID: PAT_MRT4530_23982C.1
atgtcaaagcttgccattctaggccgcagcagtggcttgccaagatcaaatgagggcatgaggctcctattctcagcagttattggtgttatgctaggttacttgtttgggatttcatttcctactgtcaatgtaaccaagccgcttttgttcagggaaaaaagaactgattgtatcttgcagctccacttcccttccagtattatctcatatattgaagacaaagactctggtatcacaacccaaacattgttgaatcatgcatggacatctgcaaatagtaaaaagaggaacaattctgagtctaactctgacgaaattcctaagatttatgtgccaacaaaccctaaaggtgctgaaggccttgcacctggcattgttgtgcctgaaacagacctttatcttcgaagattgtggggtgaacctagtgaggatcttactagccagccaagataccttattaccttcacagttggatactctcaaaaggcaaatattgatgcagcagtcaaaaagttttcagaaaacttcacaattatgttgttccactatgatggtcggactaatgactgggatgaatttgagtggtcaaaaagggccattcatgtgagtgtcagaaggcagactaaatggtggtatgccaagagatttttacatcctgatattgttgccccgtatgactacatatttatctgggatgaggatctaagtgtacaacatttcaatgcagaggcgtacattaagcttgttaggaagcatgggttggagatctctcagcctggtttggaacctgataaaggtctgacatggcaaatgaccaaacggctaggagatcaagaagttcacaaatttgttgaaattatggcaactgtgttctctagggatgcatggcgctgtgtatggcatatgattcagaatgacttagtccatggatggggcctcgatttcgctcttagaagatgtgttgagccagctcacgagaaaatcggagttgttgattctcagtgggttattcatcaggttattccgtcactggggaaccagggcacggctgagaatggaagaacaccatgggaaggggtgagagctcgctgtagaaaagaatgggggatgttccaaaaaaggttggctgatgctgagaaggcatattacttaggaaaagggatcacaccgccaaattga

SEQ ID NO: 18423 - DNA, 531 bp, Oryza sativa
  Clone ID: PAT_MRT4530_23983C.1
atggcgcggcggcagagggaagtaaaacgggaagaaaagagggggagctcgggcttgggttttataggtgaggaggagaggtcggtttggaggagggaaaccgaccttggcggtcgagcgctcggctggcgctcggcgggcggtcacgagcgggagcagcgttttcgcgggctgcgcgaaacgtggcgacggcgaggatgcgaaggggcggtggaggcggtggatcgtacggcgggaattgaatcgcgggcgcgggagcatcggcgtggcgcggtcaaggtgggggcacaggcgcggcaggacgttgtcggcgtcctctgcctccgcgcgcaagaagacaagggcgagaggagagaggccgggtttagaagggaaaaagtgagggaggacggtggaaagggaagcctctcccttccgttttgggcggcgggcaggcgaggcgcgtgggagcggcgtccttgccggtcggccatgcgcgcgagaatcggcagcgtggctgggattttgggcggcgtcggcgggagtcaatga

SEQ ID NO: 18424 - DNA, 1365 bp, Oryza sativa
  Clone ID: PAT_MRT4530_23984C.1
atgtggacgcagctgtgcacgcgctcgatccgggtgctgggtgcagccgtggacgacgacgagccagctgccgtgccggtgtgggagaagagggacgatgtcctcggtgaccacgtcctcttcctgggatacccgggcagctttttcgtggaggccgcgcggttcaacggcgacgtgcccggcggcagcgcctacttcgtcgtcaggtcggagccgtgccgcgtgtacaggtgcagcttcgtggacagctccggctcgccggcgacgacgacgacgctggtggaaacgctgcccgccggatggaacgacgagaggtgcatgtggttcttgcctgagcccaacattgattggatcaaggtagaagaagaagcagcagcagctccggcaagacggcggcgccgccgccgggagctgaggatatacgccggcgatctgtcgccgcaggtggatagactccggctgcgagagatgtacagcgagcacgggaaggtggtgcaggcgagggtcgtgtacgacaagcgggggagatcgcgagggtttgggttcgtgaccatggcgacgcaggagggtttctacagggccctcggtcgttgcaacgccgtggagaaaccggaaatgatttatcggaattttctggaatacgagaaatggtttatggaattttggaacaaggaattgatttatgggacaaaggaaaaaggatttattaaatccctgaaaaagaaaaggatggagggatatatattagactttttcgagcggcaagggcgcggcccaagggtcgaaggaggctcggccaagccatttgggccggcgcgggcgcgggaaaggcggcccattagggcgcgcggaagggggagggagcggtccggtggaccgggtgcacctcgcggggtcccgggtggggcccacatgtcggcggcaaggttcacggtggggagagcgcacgcgggtgcggtgctagggtttggtgggtgcggtgtgcgggcggtgcgccgggtggatcggatggcagcgggcccacatgcagccggttggcgcaccgtggaccgtgcgcgcgaaggtggggaagggaggaggcggctgacccggtcgcagccgacgtggctccgacgtggctgccacgcgggccaacgggaggaggaagaaggggaggccgggaatgaacggcggacggcggccgagttcaccggagcaaggcacgacctcagtggaaaaagggagcacaccggggaggagggaagggacgagaggaagcgagccgacggcttggattcgccggaaagaggccggaggcggcggattgcggcgacgcacgctggcggcgagaaaaaggggaaacggcggaggggcgacaaggattaa

SEQ ID NO: 18425 - DNA, 1957 bp, Oryza sativa
  unsure (1)..(1957): unsure at all n locations
  Clone ID: PAT_MRT4530_23985C.1
gatgagggacgtgaattagacttcctcaggtggcattggtgcggcccaagggttgaagggggcttggccgagccatttgggccggcgcggtcgcgggaaaggcggcccattagggcgcgcgggagggagagggggcggtccggtggaccgggtgcacctcgcggggtcccgggtggggcccacatgtcggcggcaaggctcacggtggggagagcgcacgcgggtgcggtgctagggtttggtgggtgcggtgtgcgggcggtgcgccgggtggattggatggcagcgggcccacatgcagccggttggcgcaccgtggaccgcgcgcacgggagggggggaggaaggaggcggctgaccggctcggctcggtcaaagccgaggtggcgccgacgtggcgcctacgtggcagccacgcgggccggcgggaggaggaagaaggggcggccgagatggacggtggacggcagccgagttcaccggagctcgtcgcgacgattcgagagagagggagtacaccggaacgatgggacggacgagaggaagtgagccaccggaccggattcgccggaaagaggccagaggcggcggattgcggcgacgcatgctggcggcgagaaaaaggggaaacggcggaggggcgacaaggattaaattcaaggtggtgggagtatctccggggttcaaggagttcatctccggcgtcggatggggcagagcgacgccgtggagatctggcgacgagcggcggcctccgggagcgagcggcgatggcggcaagcctatggcggccgacagcgcgggagcgagctctccggcctcgggccggggtaggggaagaagatgggcggccggagccctcttcggctccgcgcgcacgccggcttcccagcacacgcgagggcggaggaaggcgaggacggcggcagcaaggcggcgatggcactgcagcggcggcagctggcggtcgtgctcggagctagcggccaagcggcggcagaggcggtcacgggtgtgacgccaatcggggaaaaagcaaaaaggggagggagaaaggagctcggctccttgccgattttggacgagctgagggaggagagagcgcgtgggagagagaggtgctgcctccgcgtcttggacacacgcgcgctgcggcgcagaggtgggggcagcggcagagtgggcgcgggcggctgcgcggcgcaggcgggccaggtcgatgtatccgaacttgccatagaaagcatcggccggaacacttctcgtcgagtgatcgcagcggaccgacgcgccgaagtcagccaagcgctgtccggggctataccattcgccaccatccaacacacaacntcattggcagagtcaaaacaatcactggaggcgtacaacccgacgagcatcgtgcacgccgagtcgggcgaaatgccatccgcagccgtagcgtccagcacggcgagcagtgcgcccgggtgggaagcgtaagagagcgccgcggtggccgtggtgaagcaggcgtgcggcgccggaggatgcccatttcgtcgagcaggtggaaggcgcggtccgcgctcgcgccgttccccgacttgtagttgcaggggttaagacgaccgtagtgcggctgtgtcagggtaggcgacgtaggccggaaggacagctgcttggcgaggtcgacgaatcggaggaggaaccggtggtctcggaggaggaggcgatggaagggggagcgcatgggtggtgcggaaggaggatgcggcggaggcgacatctatcggagagcggtggttggttgtagccttgcaggatgcagctcacggcggagcgcgctacgtttgggcggcggacaacggccgaacgacgggaggagcagcgctggcggcgaagcgagaggagtccgactggcggagctgccgaagatcccggccggcctcgaggaacccaatcgccctatggagtg

SEQ ID NO: 18426 - DNA, 333 bp, Oryza sativa
  Clone ID: PAT_MRT4530_23986C.1
atgaggcgtggccagcagtggaggaggccgacacggtgcgaggaggagctaccagtgggtgcggtacggtctacggcgcatgaaggctggccggcggggggtgccggtgtagtggtcccacatgtcggcagaggttggacagtgtggagcatcggggcgccagccatggactcgcaggtggtgccatcttcgagggttctgcaggagacttgcaactacatcaggagcttgcatcaggaggtcgacgacctgagcgagaggctgtcggagctgctggccacgtccgacatgagcagcgcgcaggcggcgatcatccgcagccttctgatgtag

SEQ ID NO: 18427 - DNA, 2360 bp, Oryza sativa
  unsure (1)..(2360): unsure at all n locations
  Clone ID: PAT_MRT4530_23987C.1
atggccggcctggacgcgatggccggcctcggtggcctcggcgggatgggcggcctcggtgggctcggcgggatgggcggccttggtgggctcggcgggatgggcggcctcggcggactgggcggcttcggcggcgggggcatggaggacctgtacggcggcgggggaggtgcggggggggaggagggaggggaggggccgtacgcggcggagatggaggtcggggagtagaaggagatctggaacgatggactcagaaagagactggtgaagcagggagaggggtagggacaccccgaaggcggctgcgaggtcgaagtacgcaacacgtggacgctttaagatggaaaagtatgccaggcctgctgagatatatgtaaaggctttaagcttcctcgaggatgacagctccttcagagaagatgagaatcaggtgttcaaaccactaaagagggagttgcaacctcaaccatcctgcatgtaaagctgaagcatgaagactacgaggacccaccggatatgcgtcctaaggtcctgctgctgtacggcatgaatgtgaacgctttttacagtgtcaaggacatttgcaaggacggtggcatcttgaagaaggtactagctgaaggcacgaaatgcactaacccaagagaccgcgatgaagtttttgttaagtatgaggtgaggcttgaggatgggactgttgtagcagaatctgatggtgtcgagttcaccgtgaaagatggtacaatcctgtccatttttgaacatttgtattataaagttttgaaagggcatttctgtcctgccatatccaaggctgtgaagactatgaagaagaatgagaaggccctcctcacagtcaaaccacaatatggcttcggtgagcaaggcaggccagccgctagagatgaagctgcaataccccctaatgctacattgcacattaatcttgaattggtgtcctggaaggcagtcactgagattggtaatgataagaaaatcctcaagaagatcctccatgagggtgaaggctatgagcgtcccagtgattgcacacttgtcagagtgaaacttattggaaagttagaggatggtaccatatttgtcacaagaggtcatgatggtgacgagccattcgagtttaagactgatgaagaccaagtggttgaagggcttgacaaagcagtacttagcatgaagaaaggagaagttgcattggtgactattccaccagagtatgcgtttggatctgatgaaacaagacaagatttgtctgttgtccctcctaattcaactgtttattatgaggtggagcttgtgtccttcgataaggagaaagaatcatgggacatgaaggagaatactgagaagattgaagcggctgcaaagaagaaagatgaagggaatgcttggtttaagatggaaaagtatgccagggcttctaagagatatggaaaggctttaaacttcatccagtatgacagctccttcagtgaagaagagaagcagctgtccaaaccactcaaggtcctggagcttgacagcatgaatgtgaaggctttttacagaagggcacaggcacacatgtatcttgttgactttgatttggcagaactggatatcaagaaagcactagaaatagatccagacaacagggatgtgaagatggggtacaggaggctgaaggagaaggtcaaggagcagaagaggaaggaaacgaaattgtacggcaacatgatttcgaagctaagcaagcttgaagactcggaaaccgaaggaggcacaactcaggcgccaagcaagaagcatggcctatggccactcaccgcgctgctgagaaggctgttcacgaggagtgacggtagcaaggagtcgatgctgtggctggtgctgaggctgctcattccggtggtgctgctggtggcggtctgtgtggctttctacatgcgcagcggacctcctgaagtagactgcatcaactgttaaattcttgtatattgtcgtctactttacatccggctgtagaggtccgtctgccagctgtgcttcacaatcggagtcgactactactgttcacggtaagttatttccgtggctgctgttgtgttcaatatgtatagaggacaggcaagcattgcatcagctgcacctgtgagctagacacgttcgagtgattgaaacatacaaaggaaaaaatgatactgaaagttcaactattctcgtgtatgatactagaagttactgaaagttcgcttcaaccattatgtacttaacaaaatactaaaattcttttggggacggctatagctcagtcgatttgtgtcctcagccagtccnnnnnnnnnnnnnnnnnnnaattt

SEQ ID NO: 18428 - DNA, 926 bp, Oryza sativa
  Clone ID: PAT_MRT4530_23988C.1
ggaatgttagaggatggtaccatatttgtcacaagaggtcatgatggtgacgagccattcgagtttaagactgatgaagaccaagtggttgaagggcttgacaaagcagtacttagcatgaagaaaggagaagttgcattggtgactattccaccagagtatgcgtttggatctgatgaaacaagacaagatttgtctgttgtccctcctaattcaactgtttattatgaggtggagcttgtgtccttcgataaggagaaagaatcatgggacatgaaggagaatactgagaagattgaagcggctgcaaagaagaaagatgaagggaatgcttggtttaagatggaaaagtatgccagggcttctaagagatatggaaaggctttaaacttcatccagtatgacagctccttcagtgaagaagagaagcagctgtccaaaccactcaaggtgagttgcaagctcaacaatgctgcatgtaagctgaagcttaaagactacaaggaagcaaaggaactgtgtactgaggtcctggagcttgacagcatgaatgtgaaggctttttacagaagggcacaggcacacatgtatcttgttgactttgatttggcagaactggatatcaagaaagcactagaaatagatccagacaacagggatgtgaagatggggtacaggaggctgaaggagaaggtcaaggagcagaagaggaaggaaacgaaattgtacggcaacatgatttcgaagctaagcaagcttgaagactcggaaaccgaaggaggcacaactcaggcgccaagcaagaagcatggcctatggccactcaccgcgctgctgagaaggctgttcacgaggagtgacggtagcaaggagtcgatgctgtggctggtgctgaggctgctcatctccgtggtgctgctggtggc

SEQ ID NO: 18429 - DNA, 1003 bp, Oryza sativa
  unsure (1)..(1003): unsure at all n locations
  Clone ID: PAT_MRT4530_23989C.1
gcacgaggtactaatgcacctacgaatcctgtatacatggcgactcggcagcaaccggcgaggcgggccaaaagcagatcggactccgggcgccagaccaagaaaatcaagattcatagcgagcggcccatcctgagcggcagcgcatcctcttccagtgggctgaatatgggcgacgcacatctatggacccatgacgaagaaatcgctttgtttcgggaagctcatgtacttcttacgactcaacagttttctccggaaatcacagctaaatgaagagcttgcgagggtgttgaatggaggttttccagaggtggctattaagttcacttctaacgctattaagaacaaggttacgacatttaaatcaaggtggacaggaggtcgtcccttgttaacatgcaacagagcacaaattgaatgcagtgcaatagttgccaggttattctttnagtgggactactagtggtagtgaaaccacaaattcagttgcagctgattcggtgactgtgaacaatgggaggatccctaccatccagaatgtgaacaacaggaggatccctaccatccaggagtgtataattcttgctgaatctttggaagggctcacaccaatagagaaggcagatgcgccagaactgatgaggttagatctggctgctagagaagctttcatgagcttcaatgacgaacaagttcgcctgttgtggatcaagaaactcattggtccggtgaacaatcctgggactgcttaaaaggttctgctgggactgctggttcatggagatggagatgaagacttgaatctgtgatgttgaagggctgctgccttgtattgtgtcatttatgagctgctgctgcagtttgaatctgaacttgttgtgtcttgacgatagaatcgaccaagatagtcatgctttggttgaagatagtctgtacaataagtactggaattgtactggactttgataatcagtgttgactgtcaatgggaccctgaacc

SEQ ID NO: 18430 - DNA, 1086 bp, Oryza sativa
  Clone ID: PAT_MRT4530_2398C.1
ccacgcgtccgccaccttgccttgcttgcctctcatcagacgattgatcgacaagagagagaaagagcttgcgtcgcaatgaccgccgtcgacttgatgcctgcagctgacgacgacaacaacaagcagtcatccaccggcctcctccaccaccaccagctccccgccgccgccgacaacgccatactacacaataccaggcggctggaggggaaggtggccatcgtcaccggcggctcgcgtggcatcggcgaagccatcgtaagggccttcgttcaccacggcgctctcgtcgtcgtcgccgacatcgacgacgccgggggccacgcgctggccgccgcgctcggcccgcacgcctgcacctacgtccactgcgacgtggccgaggaggccgacgtggaacgcgccgtcgccaccacgctggagcagcacggccgcctggacgtgctgtgcaacaacgccggggtgctgggccgccagacgcgcggcgccaagagcatcgcgtccctcgacgccgccgagttcgcccgcgtgctgcgcgtcaacgcgctgggcgccgccctcggaatgaagcacgcggcgcgtgccatggtgccccgccgctccgggagcatcgtgtcggtggcgagcgtggcgggcgttctgggcggcctcggcccgcacgcgtacacggcctccaagcacgccctagtggggctcaccaaaaacgccgcctgcgagctcggggagcacggcatccgcgtcaactgcatctcccccttcggcgtggcgacgccgatgctggtgaacgcgtggcggcaggggcagggaggagatcacgcggatgaggatcaggcggcggcgagcgaggaggaggaggtggagaagatggaggagatggtgcggaggctggcgacgctcaaggggccgacgctgcgggcaggcgacatcgcggaggcggcggtgttcctggccagcgacgagtccagatctggagtaaccaagagagacagagaaagattgaacacgagtcggagtcgtagtcgacaagggctgcaggagcaggcaacagtagacactagtatctcacttggaatagtagagtag

SEQ ID NO: 18431 - DNA, 2006 bp, Oryza sativa
  Clone ID: PAT_MRT4530_23990C.1
accgccacgtcgcctccaattcatccctcccagtgggccccaccacctcccccatggcgaccgccgcgacgacctccgccgccgcaatccccaccggcggcggcggtcgccggcagcatccccacccgcgccgcccaggcctccgcccgcgccgcctccaccgcctccgcctccctgcccaagcagccgccgcggcggccgcctcttctccatccacgtcgtcgtcgtcgtcgtcgtcgtctactccggcggagggaggagggcggctggtggcggagctggtgggcgcgttcaacgagctgacggggaggatgggggagggcctggccacctcgtcgtcgtcgcgcctcctcttccgcgcgctcaagctcgccctccccgccctccgcgacggcgacggcggccgggctctcgcccgcgcgctcgctatcgccgcctccctcgccgacctccagatggacgccgaagttatttcagccggaatactgagggaagcacttgatgcaggagcaataagcatgagggatgtcaaatctgagattgggatcagcacagctcatttgctgcacgagagtttacggcttaagcatgccccttcaaagcttgatgtacttgatgatgaaagtgcaagtgcattgagaaagttttgtctttcttactatgacatccgagcagttatcttggaacttgctctaaagctcgatatgatgagacaccttgactgcctcccgagatatcttcagcggataaagtctcttgaagtcctgaagatatatgccccacttgcccatgctgttggagctggtaatctatcactggagctagaggatctttcatttcgctatttgtttccgcattcatatgaccatattgatcaatggttgaggagccaagagactgagaacaagctcttaatagattcgtacaaggagcagttgcttcaggcactgaaagatgatgatgagttgagccagattgtgcaagacatctcaattcaagggcggtataaaagccgtttcagtactatgaaaaagctagtaaaagatggcagaaaaccagaagaagtaaatgacatactagctttaagggtaatcttagaacctcggtgtgatggcagctcgttagactggggccctagggcttgtcacaggacacatgaaatcattcaagctatgtggaaagaagttccaggaaggacaaaaaattatgtcacacggccaaaagaaaatggttaccagagcttgcatgtggccatcgatgtaagtgaacctgggaagatgaggccactgatggagatacagatacgaaccaaggagatgcataaatttgctgttggtggagaggcatctcactctctctacaaaggtggacttacagatcctggagaggctaaaaggctgaaggctatcatgttggctgcagcagagttagcagctatgcgtcttcgtgacctcccagctagtgatcaaggagacagcaactgcacgaaccgtgctttctgccagcttgataaaaacggtgatggaaggatcagtattgaggagctcacagaggtgatggaagaccttggtgctgggggcaaagatgctaaggagctcatgcatcttctcgacgcaaacagcgatggctccttgagctccgatgaattcgaagcattccagagacagatcgaactgatgagaagcttggacgacaaagacgatcgctacaggaagatactgaaggagaagctgcagacgattgacagcgcgggtctcattcaggtctaccgcaaacagctgggcgacaaactgcttgtaagctaaaactgaagcttagcacaggtgacgaaactaatccaccatcttgctatataggctatggctactatctgtctgcatactgcattcagggtacgctcttattatcattgattatatatatgttcatggagttctacgcaagcctggataagttgtattatttcttgattaaaaaaagaatggttggattttccccatagcacc

SEQ ID NO: 18432 - DNA, 300 bp, Oryza sativa
  Clone ID: PAT_MRT4530_23991C.1
atggtctgtaaaatatttcctggcggcgtgcgggcgacaaatccggcggcggagatgctcctgggcagcgtatccatccacatgcttgcggctcgaggcgcgggaggcggtggatcagtattatatagtagattgttgattgcatctctttttggaaaacatgtagcaaagaagaatgcttctaaattgctttcttccccggttatggtagacgagcacactcaagaacaagatggggatgaagaagatataatgagcactttcatggccattagaagacgtacatccgataagaattaa

SEQ ID NO: 18433 - DNA, 552 bp, Oryza sativa
  Clone ID: PAT_MRT4530_23992C.1
cggacgcgtgggcggcagcggggctcttactcaagggctacggagaagacggtgagatctgccgagcggggaatgcgcagtccctgaacccagtgccatggtgccggaactacatcgcgcggggtagtgctaacccccttcgggcaaccagctacgttataattgataaacaaccaagccttgcaggagcattgtgcacaacagctcattctggtagcgcaacaatctgactaccaggccattactagcgctcaagagattgagcaccagctacagctgcatgatgtcgctggtgcttactttgatcgcactcaagctcatgctcaagctttgctggacttacacttgccatccatatgggcgatctatactaactactacgttgctccgaggagcattcccacagactggtggcgcctggtactgaattgtactatactaatggctcaaatggtaaacataaactcatgcactaccatgagtgacagctgaaactaggcgtcatataaatccaaataccagtagcctattttgataccgcatgacgatgac

SEQ ID NO: 18434 - DNA, 381 bp, Oryza sativa
  Clone ID: PAT_MRT4530_23993C.1
gccgttccggacttccatttccgacccgcgcgaccggtccgacagcgcttaacctcataccgcccaggcgggaactggcactccgtgcacaagctcatgaggccctactacaaaccgggactgtggattcgcctaccataaactcaccctggactagaggatgaggacgcacgatataatgtgtaagttaatgatcggaatcaaatcttgagtacggctactaactatatgtaactactgatggcttgacctacagagacagacaaaaaactcacagagtgacgataactaacgcatgcgtgcattgtgggcaacaatgtcagctaatgtgcatcatgtcatagatcagcgtgttatagattgacatatagatatcggatg

SEQ ID NO: 18435 - DNA, 228 bp, Oryza sativa
  Clone ID: PAT_MRT4530_23994C.1
atggagcccctcttcccggcataccgtgtagaaatagggtatctagttgagcccgttgcagatggcgtggatgacgcaacactcgacaacagcacaataaaccaacttactagccatggaatggagcagaaaaccacgacgaagaggaacggcaagtggggggaagaagctgatgcaggagaatgtacacctatggcgaatgaagaggggagcagccagaggtactaa

SEQ ID NO: 18436 - DNA, 987 bp, Oryza sativa
  Clone ID: PAT_MRT4530_23995C.1
tcagcacggcgcgagaggtgctgccggcggcgacggaggccggcttggcgcgagaggcgcggccagcggtggcggtggaggaggcgacctcagagcgaggaggagccgccggtggatgtggcgcggtcttcggcgcacgaaggctagctggcggggggcgccggtgcagtagtcccacatgtcggcagaggttgagtggtggtggagcatcggtgcgttagccgtggattcgtaggtggtgaacggcgggtgaaaatccagtccggccatggccggaccgataacgatggttaattctccctcctgagggtgttgtcgtgctgtctcatccctcaagggtagttgccaggcgtaagcccagtgttggctcctttgagccccgacgaacaggcggcggcggttctccgtcgcttctcttcttgaagacgccgttttggcatccctgttcagaggtaggactgtgcatgttgcccttcgctgtttatgctgcccgacggcgacgtgcagcgacggcgacgtcccggcgaggttcgctgcgtgtgctcgtcgcggcattgatgtggggtctctggccgccggcctcttgatggcagacgggtattgcagttgggtgtcatcattcttaagcggcttgccttcaatggagtatgttttggatggaccacgccctccctggtgcgcggcgtctcgtcgcaccggcgcccctcgcgcgtccgcctcggctcccaccgcggacaccgcgcgcacccgcgccaccacgccgcattgctgccccctttgacgaccaaataatgctgtcgcttttgctttcttcctcctgcgccccgctttgcccccacttcccacgcccgccgcgttctcggtgccggggcggacgacgtcttggcttggcttgttttgcctcttcggtagccggtggcaatggcatacgtgcacactagcaaatagcctcctcctcttgtgcgtcctcgccatcgacgccggcat

SEQ ID NO: 18437 - DNA, 508 bp, Oryza sativa
  Clone ID: PAT_MRT4530_23996C.1
ggaagttcaagagatgggctccgcttcgctggcgacggggtcttctttcagaggcgtgcctgccgtccctgcccgccggcggccgtctccgcctccgcctggctccaccaccccgcgctccgccgcgcctctgcaagcgcgccgggatctcattaccccttccagtttccctcttttttttcgtgtttggtctttgatttttttaaaaaaaattattgtttcaaatttgaagttgcttgcaattcgggcacttgttaccctcatatgcgtacgataagttgttgtagtgcaatttttttttcgttttctttccatatgggagcaaccttggaagtgaaatcatggttgataagggctttgaatttacatgggacaacattttgtatcatgacttcatgttcatgatcatctccttgaaatctctgaatggcagcagagcattcctaggaatttctcatcagcagtagtggttgtgacatggactataggcatttttaatttatttata

SEQ ID NO: 18438 - DNA, 2053 bp, Oryza sativa
  Clone ID: PAT_MRT4530_23997C.1
gcacgagggccggacggcgggacgcgcctcgcatccaaaatggcggcggccacctccacttcctccaccgcgctcgcccaccccaaaaccctaaaccccgcctccaaatccgcggccgccggctcggtcgccttccccgccgcccagcccccatgccccctcgccgacacccctgacggccgccgccgccgcggcgccgtggccgccaaggtctcgtcgccgcaggtgatcggggccaccatgccgtcgctggacttcgagacatccgtcttcaagaaggagaaggtgtctctagctggccatgacgagtatattgtgaggggcgggaggaatctgttcccgctgctgccggaggcgttcaaggggatcaagcagatcggcgtaatcggatggggttctcagggtcctgcacaagctcagaacctgagggactcacttgctgaggcaaaatcagacatcgttgttaagattggtctccggaaaggttctaaatcttttgaagaagcacgcgcagctggatttactgaagagagtgggacacttggagatatatgggagactatctcaagtagcgatcttttgttgttgttgatatcagatgctgctcaggcggataactatgaggaaattttctcacacatgaaacccaacagtattcttggattgtcacatggatttctccttggacatttgcaatctgttggccttgatttccctaaaaacatcagtgttgttgctgtgtgtcccaagggaatgggcccatcagttagaaggctttatgttcagggaaaagaagtaaacggtgctggtatcaactccagctttgctgtacaccaggatgttgatggaagagcaacagatgtcgctcttggatggtcagttgctctaggttctcctttcacatttgctactactctagagcaggagtaccgaagcgatatttttggcgagcgaggtattttgcttggggctgtacatggtattgtggaggctcttttcaggagatacacagagcatgggttggatgaggactcagcatacaagaacactgttgagtgcatcactggaatcatctctaaaactatttcgaaaaaggggatgcttgaagtgtacaattcattgacagaagaaggaaagaagcaatttatcgaggcttacagtgcagcatattatccatgcatggatatactatatgaatgctatgaagatgtttcttctggaagtgaaattagaagtgttgttttggctggaaggagattttatgaaaaggaaggacttcctgctttcccgatgggcaacattgatcaaacacgtatgtggaaggtgggtgaaagggtgcggtcaacacggccagcaggtgatcttggcccattacatcctttcactgctggagtgtatgttgcacttatgatggcacagattgaagtccttagaaagaagggccactcttactcggagatcatcaacgagagtttgatcgagtctgtggattccctgaacccattcatgcacgctcgtggggtggccttcatggttgataactgctccacaacagcccggttgggatcaaggaaatgggcgccacgcttcgactacatcttgacccaacaagcttttgtgactgttgacaagaatgctccagttaatcaagacctcatcagcaatttcttctccgatcccgtccatagtgccattgaagtctgtgctcagttgaggcccaccgttgacatttcagtgcctgctgatgcagactttgtgcgtccagagctgcgacaatcttcgtgaagtttttgccaactccaggggcacctcataaactatgtcagtatctgacggtttcaactctcaaagctatgtatcactatttgagaacctaaatgtaaacttttggagtgtaggattgtcgtttggttgtcactggactagtgctggtgtttggcatgaataaaaatagtggtttaataaaaaaaaaaaaaaaagagcagcagaggtggctgctccctctaaaaaaaaaaaaaaaaaaaaaaaaacaagaacacacactctctctctc

SEQ ID NO: 18439 - DNA, 984 bp, Oryza sativa
  Clone ID: PAT_MRT4530_23998C.1
atggtcgtgcccggcggtggcggtggcggtagcccagaaggacaggaccggcgaccacaggggtctccacggggatggtgccgctcgccgggtcgtccagccgcccgcggtagcggtagcggcagtggcgccgacggcagcggcactgatggcggcaacaatggcggccagcagatcatcgtgcagagggtgatgaaggagacggctggctcggtggtctaccccatgttgacgcgcaccaactacaccgactgggctctcgtcatgcgcgtgaacttgcaggctcaaggtttgtggtcggcaattgagcccggctacgcggagtaccaggatgacaggatggcactctccgccatcctccgtgccgtgccgccggagatgttgccgactctggcggtgaaggatacggccaaggaggcgtgggagtcggtgaagaccatgcgcgttggtgttgcgcgtgtgcgagaagcgaaggcgcagaccttgcggaatgagttcgagttgatccgcatgaaggaaagtgagtctgtggatgaattctcgatgaggctcaacgccatcgtcaacaacctccgcatgctcggtgacccactggaggaggagaaggtggtgcagaaatttcttcgtgttgttccttctcggttcgtgcaggtggccattgcaatcgagcaattgcttgatttgaagacgctgtccatcgaggaggtcacggggcgcctccgaactgtggaggagcggtacaggcccggtgacaatgatggtggcgttgatggcggccgcttgctcctcaccgaagagcagtggctggagcgtaggagaaatcgcaagaagaacggcgacacgtttgacaagtcaaaggtccgttgttacaattgccaggagtatggtcactactcttgggagaagaagtgccatgaaacaaagaagaaccatcaggcgcaccttgtggttgcggatgccgacgacgagccgacgctgctttga

SEQ ID NO: 18440 - DNA, 411 bp, Oryza sativa
  Clone ID: PAT_MRT4530_23999C.1
atgtcgccgccgccgcatcctccttccgcaccacccatccgctcccccttccatcgcctcctcctccggcccccgccaagaccaccggttcctcctattcgtcgacctcgccaaggagctgtccttccggcctacgtcgcctactctgacacagccgcactgcggtcaccgaacccctatgacaacaagtcggggaacggcgcgagcgcggactgcgccttccacctgctcgacgaaataggcctccgccagcgccgcacgcctgcttcatcacgggcaccgcggcgctctcttacgcttctcgcccgggcgcactgctcgccgtgctggacgctacggccgcggatggcgtttcgcccgacttggcgtgcacgatgctcgtcgggttgtacttctccagtgattgtttga

SEQ ID NO: 18441 - DNA, 690 bp, Oryza sativa
  Clone ID: PAT_MRT4530_2399C.1
gtggattagttttccaagtggattgaagccaaaccggtcgttacaatcactgcagacaaagctagagatttcttcatcaatattgtacatcggtttggggtaccgaatcgtatcattactgataacggcactcaatttaccggcggagtatttaaagacttttgtgaaaactttggcattaaaatttgttacgcctccgtggcacaccccatgagtaacggacaagtcgagcgtgctaatggcatgatacttcaagggatcaaagcacgagttttcgaccgactgcgtccctatgctgtttatggcgcagaagcaatgctgccgagtgaagtagaatttgaatcgctacgatttcggaacttcaacgaggagcgctatgaacagggccgagtagatgacatcaaccgactagaagaagctcgtgaagcagctttaattcagtcgactcggtatttgcaagggttgcgccgttatcacaatcgcaacgttcgatcacgagctttcttagtcggagaactggttttgaggaaaattcaaactacacgggatcggcacaagttatctcctttatgggaagggccatttataatctctgaagtcacccggccaggttcttattgactaaagcgtgaagacggtacacctatcgacaattcttggaatattgaacaccttcgtcgattttatgct

SEQ ID NO: 18442 - DNA, 312 bp, Oryza sativa
  Clone ID: PAT_MRT4530_239C.1
atggcgcgcccctcctttctcccctccgtttctccctttcccctctcggcccggcccctgcttcctccgttcggttcccgcgccatggacacagaggatcagccgcccaagccgttgcccgagtttgaccgcgcccgagaagcctatcctttcccctcgaagatccctcgcaccctagtgtcgcccaagatcggtatccgaaccgacattgccgcctataaacccgagcccctccccaaaccaatctcccccgttttcaccctcgccattgccgctctcttgccctgtttcgtcgtcgccatccgttgttga

SEQ ID NO: 18443 - DNA, 255 bp, Oryza sativa
  Clone ID: PAT_MRT4530_23C.1
atgaggatgagtcgtcgtcgtttgcaattgcaatatgaccagctatgcatcttctcgaggaggtcgaggcggtactacgccgacgacgaggcggcggcggtgagcgactgggagcggccggcggcgacgaggctgcggaaggtccggtcgagcgacgaggacaacgggtggtggatcggcgagcgcgacgtcgaccagaaggcctccgacttcatcgccaggttccaccaccaccagaccagcctcgtcgtctga

SEQ ID NO: 18444 - DNA, 140 bp, Oryza sativa
  Clone ID: PAT_MRT4530_24000C.1
aggaagtataggtattattattcggttatattaggatgagtttgaactttgaagcgcctggatagccgtgcgaaggtcggatgtatatactgtaactgaatcttatttacttcctccctatctaaagaccacactttcct

SEQ ID NO: 18445 - DNA, 354 bp, Oryza sativa
  unsure (1)..(354): unsure at all n locations
  Clone ID: PAT_MRT4530_24001C.1
aaaagctggagctccancgcggtggcggccgcctcgtcccgcgcctcagagaggtcggcgccctctgcacctagcccgcggggccgccacgtgtcccatcgtcgtcttcctccgtcctatcctctctaccatggcttagctccatgccttccatgtacataagctgggttatctccgccatttcagaaatctagagggggtggggtgaaaaattccacgccgaaataatactaaattttgtttgggctcatgtgttcttctggaaatcaaaggggtttgtgagaaaattcctggatctaaatgtgattattaaacagtaataataaaaaaaaaaaaaaaaaaaaaaaaaaaaaa

SEQ ID NO: 18446 - DNA, 345 bp, Oryza sativa
  Clone ID: PAT_MRT4530_24002C.1
gtataccctctacccttggatatacgatgtataccagtatggtataccagcgtgtatacggatgttccctgtacacgttaacgaattccataacggagtccacggatggaaggagtcctgctcggacagaaccgggtcgttactatatcgtgtggggtccgatgtctccgagtcctacttagagaccaactgacccgcggtataaaagggacctccccgggagaacttaagccatcgaatctcaccaccaacacatcgaccacagcctacgaagccgaagcctcaggagcaaagtcgccggttgatctagtcgaatcaactcgactatgatctcatcggtatcat

SEQ ID NO: 18447 - DNA, 273 bp, Oryza sativa
  Clone ID: PAT_MRT4530_24003C.1
atggcgatggagacaaggatccgtttgatgggaatccagaacaagctggacgagtgccacgtcgggaaggccccgctggaagtggggccctcgtacgtgcgcttcctctgcgccctcaccgtcaaatactccacgcggcggctcggcggcggcggcgtcgccgtgcccctgcagcccgcggcgccccacggcggcggcggcatccgccagttcaccatgacgatgcagagcgacgtgcgcccggtggacgacccttctatggggatactatag

SEQ ID NO: 18448 - DNA, 619 bp, Oryza sativa
  Clone ID: PAT_MRT4530_24004C.1
acgccagcgcggaattcggctcgaggtattacttctttccttctctcaccaccactcaaagttctcacaaaggaggaaaaaaggcaccttgggggcccctctctttggtgctactctgtcccaaccaccccctcctttccctctcaaccaaccctgaagctagcaagcagactgaagctcggccttaatagttttgattagatccaaataatttgcgtagggaacgctctgcatgctttgagaagcaggctttctgatcccaacaatatgttgcagagttgggacccaacactggttaatccctgtacttggtttcatgttacctgagactccaacaatcatgtgattcgcttagacttgggcaactctaacgtttctggaactctgggcccagaacttggccagctacagcatctgcagtacttgtatgagttttttcccttgcctgttacagctgagaagttcatatatgagcttctgagtttaatctgttctttaaacatgtgccttctgacattattcaaacagtgaaattgaacatgatagtttttggattttattttgtttgtactcgtacacattatttttgccccaggctagagttaggagactaccaaat

SEQ ID NO: 18449 - DNA, 291 bp, Oryza sativa
  unsure (1)..(291): unsure at all n locations
  Clone ID: PAT_MRT4530_24005C.1
ttcccgatcgaccacgcgtccctcctgtgcgcagcgtgattgagagagatcggaggagatcccgtggcctcctcgatgaggtatccgactccgactantctatccctggtcgtggtgtacctacattatcactgtggcttttttatatttatatttatatctaaatatgtgttgctgggtgatgattttgagcccagagttaccgtattttggatcgatcgtgtcgttggctagaaatcttatctatcttcgttgtattctattctctataacatcttttacattttttta

SEQ ID NO: 18450 - DNA, 409 bp, Oryza sativa
  Clone ID: PAT_MRT4530_24006C.1
tttgttttttttttttttttttttttttttttttttttcaaaatttttttttttcctctatttttttaaggatggaatggagtaggaaaactttcaccccaaaagacagccatagcgacaaaaaccaaaaaaagccgcatgctcagccgccagggcgggcaagctgagcagagcagctaacacaaagaacacgagaccactataaaccaaacggcaacgaacgaagaaaatacaggaacaaaacttgtctgaagaaacacgaagcggaacgattactgttattcaaaggctccactcctcctcgaagatgggagcatggcaacggcaaaggcgaagggatccaggcttaaccgaagggaaggggctcgccgacccactccctgaggcacccgagcaaggggacgaggag

SEQ ID NO: 18451 - DNA, 560 bp, Oryza sativa
  unsure (1)..(560): unsure at all n locations
  Clone ID: PAT_MRT4530_24007C.1
ctagatttgatctaatctttattgttaaagatgtcagaatgtatgatcaagacaagcgaattgcaagccacatcattaaggtgcatgccagtggtgctgctgcttcatccaagaatacagatgctagtgaaggagagaattggctaaaaaggtacattgagtattgccgtgttacttgtaaaccacgactctcagaaaaggcagcagagatgcttcagaacaaatatgtggagattagacagaaaatgagacaacaagctcatgaaacagggagggctgcagctatacccatcactgtgcggcagcttgaagccattatacgtttgagtgaatctcttgcaaagatgagattgacaagtgtggctacaccagagcatgttgaagaggcatttaggctgttcaatgtctccactgttgatgccgcaggatctggaatcaatgagcatttgaacctatcaccagatattgcaaatgagatcaagcangctgaggcacatataaagagaaggatgggaattggagccacatatacgagcgacgcctgatcgatgaactaaata

SEQ ID NO: 18452 - DNA, 213 bp, Oryza sativa
  Clone ID: PAT_MRT4530_24008C.1
tagcggggtttggattcttttagatattggaaacgtattcgatgttgtctgttgatttatggccttagctccctatgactactctagaattcgacactcgtatagcgctatagcgcgtatgcgtcgtctatcgtgatttgatagtcatcatgtagtcaaagtctatacgacatatatgcaacggtacaagtcgcatcatcgtgctagcagacg

SEQ ID NO: 18453 - DNA, 2465 bp, Oryza sativa
  Clone ID: PAT_MRT4530_24009C.1
atgtcgggttggggcgagggggccgtcttctacagggaccgcgcgcagttcccgcgcggcggctccgggggccacctctcagcaggcctctgccgccacacagccttacgctacatcaaagagttcctcctgggcttaaccggcccaaccggagacttatcctaccgcgagtgcacagtgcacatcttcagaccagtgttcctggacctagatgaactgtaattgttctatacagtgctttccaagaatatccggatcaatagggctctgttggagccaatcagcgagacatttgagttgtggggtttcaccagtcttgagaccccaactcctggagtcactgaaaatttgcacttgacgacgaaatgggatttaaagattttgctgacagcacagatgcatatgccaactttggcttcaatatgggcgctttactttttccagattctgaagattagaaagatcacgctggcgcactaattggtggaaggaagggaattggaagccacgttgcccagcgacgactggacaatcatgtaaagcggctgggggagccttcatccattgtgcgaaaatccctcatgatcgtgcaccaaagggctgcagtggagtacaagacatagcgccatgtcattgtccggaaggcttgaggtgaactgtggagtatttataaatcgaggacaacttctattcagactgtataaggctatgagttcactgaaactgtaatctctgggggaagacaaggacatgtttgagtttcggttgatcactgacatgaccattgtaatctgcaagagtagaagaaatgcagtccgtccttgatgaaactgtagttaaactacagtattaaagatgtaactgtagtgaaaccatgtaaccttgggttctgaaatggctaatgtattaaactacagtattaattttacacttgatgaggaaatggaattcaaagaatttgcacagaggccagatgcatatgtcaagatttgctcaatgattggcccttcaatttatggccattctgatgtcaagaaagctattgcatgcttgctgtttggtggctcaaagaagttcctcaagtttgtggagaagacagcgccgattgctgtctatacatctgggaaaggttcatcagcagctggtctcacagcgtcagtaattcgggacggtagctctcgagagttttatttggaaggaggggccatggttttggctgatggtggagttgtttgtattgatgagtttgacaaaatgaggcctgaggcccgagttgcaattcacgaagcaatggaacagcagaccatctcgattgccaaagctggcattacaacagtactcaattcaaggacctcggtactagcagctgccaatccaattgcagggcgctacgatgatcttaagactgcacaagataacattgatctgcagacaaccatcctttctagatttgatctaatctttattgttaaagatgtcagaatgtatgatcaagacaagcgaattgcaagccacatcattaaggtgcatgccagtggtgctgctgcttcatccaagaatacagatgctagtgaaggagagaattggctaaaaaggtacattgagtattgccgtgttacttgtaaaccacgactctcagaaaaggcagcagagatgcttcagaacaaatatgtggagattagacaggcacgtgctaaagatttttcacttagtctaactaaaatgagacaacaagctcatgaaacagggagggctgcagctatacccatcactgtgcggcagcttgaagccattatacgtttgagtgaatctcttgcaaagatgagattgacaagtgtggctacaccagagcatgttgaagaggcatttaggctgttcaatgtctccactgttgatgccgcaagatctggaatcaatgagcatttgaacctatcaccagatattgcaaatgagatcaagcaagctgaggcacaaataaagagaaggatgggaattggaagccacatatccgagcgacgcctgatcgatgaactaaataggatggggatgaatgaatccattgtgcgaagagcccttctgatcatgcaccaaagggatgaagtggagtacaagagagagcgccatgtcattgtccggaaggcttgaggtgaactgtggagtatttataaatcgaggacaacttctattcagactgtataaggctatgagttcactgaaactgtaatctctgggagaagacaaggacatgtttgagtttcggttgatcactgacatgaccattgtaatctgcaagagtagaagaaatgcactccgtccttgatgaaactgtagttaaactacagtattaaagatgtaactgtagtgaaaccatgtaaccagggttctgaaatggctaatgtattaaactacagtattaattcatggatataaatggctaatattctgcagtgcccagacaagaattt

SEQ ID NO: 18454 - DNA, 378 bp, Oryza sativa
  Clone ID: PAT_MRT4530_2400C.1
atgtgggatgtgggtgtaggaggcacagaagaaaagaaggtcagggatgctggggttgaagctagtatggagagcgggcgcaggccgaccctgaggaaaccggtgcactggcggcctcctcgccaccaacccctcgacgtcgtcggtgcgagccccatccttttcaatgtcaggaatgagaagaaccgtcaggaggagctcgagatggctggcggcatagcagcaagcttgagcgggagcgggtggggctgttgggaggatctcgtcatcatcgacccactcccattctcgctggagctgatgatgcccttatccacgaacaccgacaccgccgcgcccccgaatccaatgctagcttgccaccatgtagctcgttag

SEQ ID NO: 18455 - DNA, 3723 bp, Oryza sativa
  Clone ID: PAT_MRT4530_24010C.1
gcacgagagctggggatgtcctcatcgcgccccagctagccacgccgccacctggccccctcctccgaggcagcagaggaggaaaccacagtcgccggcaaagcggggcacctccgccatggagcgggtggcgctgctccgcaactccggccgccgcctcctccatcgctgccgccggcccaggcccgtcgtccaggccgcggggccgtccgcgccgtaccgcccgtcgtcgtcgtcgcacagccgcgcgggtctacccggcggcgcgcggctcctggccgccgcggcgccgctgcactgcgccgggcggtactggccgcacgccgcgcctcgcttcgtccggcgcctctccgcccctgccgtgtccacgtcgccctcacccgtgcccagtgatacagatgacgtccatgagtatgctgcaaagttagggtttgagaaggtatctgaacagagcatagatgagtgcaaatcaactgctgtcctttacaagcacaagaagacaggcgcagaagtgatgtctgtatcaaatgatgatgagaataaagtgtttggcattgttttccgcactccaccgaaaaattcgactggaatacctcacatccttgaacatagtgttctctgtggatcaagaaagtaccctttaaaagagccatttgttgagctcttaaagggcagcctgcacactttcctgaatgcgttcacttatccagatcggacatgttatccagttgcttcaacaaacgctaaggacttctataacttggtagatgtataccttgatgcagtctttttccctagatgtgttgaggacttccaaacatttcaacaggaaggttggcattatgaacttgacaatcctgaagaggagatatcctacaaaggtgttgtcttcaatgagatgaaaggagtttactctcaacctgacaacctaatggggcgtgtatctcaacaggcccttttccctgagaacacttatggtgtggatagcggtggagacccaaatgaaatcccaaagcttacttttgaagaattcaaggagttccacagcaagtattatcatccaagtaatgctaggatctggttctatggtgatgatgacccaaaagaacgcctacgcgttctaagtgaatatctcgatcagtttgaagccagccctgctcctaatgaatctaagatttggccacagaggctattcaaagaaccagtgagaattgttgagaagtatcctgttggtcaggaaggggatctaaagaagaaatttatggtgtgtattaattggctgctgtcagagcagccactagatgtagaaactgagcttacgcttggtttcttggaccaccttttgttgggaactcctgcttcaccccttagaaggattcttcttgaaagtggtttaggggatgctatagtaggtggtggtgttgaagatgagctccttcagccacaattcagtataggtttgaaaggtgtatctgaggataacattaaagaagttgaagagttggtaatgcaaactttgaagaatctggcagaggaagggtttgcaccagaagcagtggaggcatctatgaacacaattgaattcgctcttagggagaacaacacaggatcgttccctcgaggcttgtctctgatgcttcgttcgattggaaaatggatatatgacatggacccttttgagcctctgaaatatgaacgcccattgcagcagttgaaagcacgcattgcagcagagggatctaaagcagtattttcaccactcttggagaaatttttattgaataatgcgcatcgtgccacaattgaaatgcagcctgatccagagaaggcttcacgtgatgaagcagctgagaaagagattctaaagcaagtaaaggctagcatgactcgagaggatcttgcagaattggcacgtgccacaaaagagctgaaggataaacaagaaactccagatcccccagaagctctaaaagctgtccctagcctgtcattgcaagatatccctaaagagcctattcatgtacctatagaggtgggagagataaacggggtcaaggttttgcaacatgatctctttaccaatgatgttgtctactccgaaattgtatttgacatgagttcgttgaagaaagatcatctgcagttgttgccgttgttctgccaatctttgctggagatgggcacaaaagacatggacttcgtgcagcttaaccaattaattggaagaaaaactggaggcatatcagtttacccattcacatcgtcgataaggggaaaagatgatcctcttactcggatcgttgttagggggaagtctatggcaacacgagtagaagatttgtttaatctgatttactgcattctccaagatgttcagttcacagagcagcagaggttcaagcagtttgtttctcaaagtaaagcaagaatggagaatcgattgaggggcagtggccatggcatagctgctgctagaatggatgctaagttaaatgcagctggatggattgctgagcagatgggtggtattagttatcttgagtatttacgtgatctggaaacgaagatcgatcaagattgggacaaaatatcatcttcgcttgaggaaatgagacaatctctctttagaaaggacggttgcctggtcaacataacaagtgactggaaaaatcttgagaaatctaacaaacatattgccaaatttcttgattcgctgccaagtactacatcccttggaagtgatccatggctttctcgattgccatctgttaacgaagctatcgttgtacccactcaggttaattatgttggaaaagctggaaacctgtaccaaagtggatatcagctcaatggaagtgcctatgtcatctccaagcatataagcaatacgtggttgtgggaccgtgttcgagttagtggtggtgcatatggagggttttgtgattttgacacccattcaggagtgttctcatacttgtcataccgtgatccaaatttattgaaaacactagaagtttatgatgagacggccaagttcctaagagagctagaaatggatgatgattgtctcacaaaagctattattggtaccataggtgacgttgattcctaccagctgccagatgctaaaggttacagcagtctaatgcgatacttgctgggcatcacggtggaggaacgccagcaaagacgtgaagagatactatcaaccagcttgaaggatttcaaggagtttgctgatgctgtcgaaacaattaacgacaacggtgtcgtggttgccgttgcatcacctgaggacgtcgaagcagcaaacaaggaaaatcccttgttttcagacgtcaagaagtgcctgtgaagctccttcatttctgctgcctttgcaggattttagtctagatctgcgctgagcacagaggttcttcagtctctcctcgcctacgaatgatgattctgatactgtaacatcatatcttacatagcgagagtatccagccatgattttttttctcgcaattttggggacaacagtagttcaggatgatgggcaaagtgtattcagtgtatttcacttgcattgctgctttccccatcaaacaagtcagatgtacgcgaagtttctgacagaagataaataagagattgctcaaattgttgctccaaaaaaaaaacaaaataacaaaaaactcgagactaattccctccggcactagttccctcgtgcca

SEQ ID NO: 18456 - DNA, 210 bp, Oryza sativa
  Clone ID: PAT_MRT4530_24011C.1
atggctcgttgcctcttcaccttcctgccccccctcccccggccactaccacctccgcgatggaggcagccagggcttaggagcgacccgaagaggcaaggggaggaggacccatggcagatcttcaccgccgccgatggtccggctcattgccaagaacttatccgtgttttacaatgtcgagacccacaacgtgttgctcagatctag

SEQ ID NO: 18457 - DNA, 197 bp, Oryza sativa
  Clone ID: PAT_MRT4530_24012C.1
atggggaagaaatgtaccggcaacatagaagccaagaaatgatacagcctatggattaacacagcgctcaggcctgagaatacatgctagagcgactacttacatggaagctggagacagtaccgaaaaacattaatgagactagaacacaacctgaaccaaatggtaggattaccacagtgagtccagagggaatc

SEQ ID NO: 18458 - DNA, 2099 bp, Oryza sativa
  Clone ID: PAT_MRT4530_24013C.1
ggaatggtgtaaaattgctaagcacgattccttcaacaatgatgcaaattacaaggacataacacataaaaaaagagccgcaaaattcaccacatcagtcgtacaaaatggaacagatttactgctcactaccttttgctatgaataatggctaatcaattgcatcagctacctctggtttctttcatctctggccttcaccaactatgcatagtttactccgaaaattcttctgtggataatttggggatagttccatctgtgttcctgcacacttcttctaggctgccatctgcagctttgaagcccgtcgcttcttgattttcttctatttgctgctgcttttgttttagctgacatttgatggatttgtatatatggcgaacgaacagcaaggcggcacggaaaccaaccatgcccagcatgaggaagaaggcgtagcagatgcaggccatgtaaccaaagaagaatgatgtctgcatgaacccagacatgtcagaccgttcacggtagtagtataagcagtaagcgaagacgaaaaatccagttgatccaccacaaaggaatgacctccaccaccactcgtggtcttcagcagtaagctgaaagtaggtcagagcaacagtaatgaaggctgtgacaataaggaggatgataaagactataaacagaatgctgtaaattgtgtagatcctgtgtccccagatgcttgcaaagatgtagtacagctcaatgtaaatggcactgaaaggaagaaaaccggccatcgccatctgcggaatggttctccggtaccaggcaagtggtggaacctctctcaggaatttggtggtgcggcaaggagcctggaactcatttttgctgtttttcccagcaatgcctcccaaaacaagcaaaggaaatgtgaccagcgtccatatgagcacaatgacacagatagtaccaaagggcaatgctgccgttgaattgtaagcaatagcaacagtgttcaagaaacagaatgtcagaaagagaggtccacaaaacaggcatccagtcaatagcaagttcctcacccagttttttccttcgaactgacagtagaaagaggttgcactgtacccagcaattcctgaagtgagtgcataaatgacaacgagtgcagtaaaaagcgcaccccggttgtaaggatagaatactccgaccagtgcaagtaggaatataaatgttgtgagagcaaatagctgagtgcctgtaccaagagcagcagaaaataacgatttgttagtggggaaccgaaagacatccccatggatatatttccatcctgtttcttcctggtcatcaggttcctcctcatcatgtgaatacttgacaaaatcattcttcagtacacgcatgaggatcgttgccaggaatcctgtcaagaggagaactgtgacacaagagtttacaattgagaaccagtgaacttccaagtgatgtggcatgacagatgagctcgagtacttctccatcctcttctcaaacggtatctgtgtctccttccacttggctgtataaaggaattcgacatcaagttccttgtcttctgtcaagtccactaccgcgttctggtcagtgtgcacattgatctcaattacacggtccttattgtagaggatgtcaaagatgatgtgcctgtaaagataatacttatcccctgcatctgccttttctggcttagtcccaataaatccccaaaagggaaggtcatcatagtacatctggaagtagtagtccttggaaacagcgtgtcggaacttgaccacatcatccttggagagccgtctactgcaaacagacttggcatcaaaatctacacggaaatcaagcttgtagggcgcatcaaccagacgatccccattaaggacttcaccaagggcttcaatcttgtcctttactttctctggggcacaaaagggcaagtcaaagtaccggtacgtctcactggggttgtggaaagggccgaccttgttggcgtagagcggcacggcgtcgcccggcctgtagcggtggctgtccgccgcggcgcacccgaccaacatcaccaggccgaggaggagcttcggcgccgccat

SEQ ID NO: 18459 - DNA, 452 bp, Oryza sativa
  Clone ID: PAT_MRT4530_24014C.1
cacaagcgtacgccgatgcgtctaccttgggagtagacacgcaggctacaactgagcagctgccatgagatgcggtagctaatgctgccagcagatgatgttgatgagcgcagcactatcattgccacgctatttgcaccatggtgcactactatcatgcaccaagtgcagtttgatgctggctttgatggcaagccccaagttcaggcccaggcccagttggctctcaattagccctccatgtgtggagcctaccctaggtactgccacactccatgcaaaggttctactgggcattgcggctcttgctactgtgtaccatcatatatatatagcaggctcaatcaagtgtgacacatcatcgagcttgtcatgtaataaaatttgcaatagattttcgctgttcttatgaataactgaaaattctacttggaacgctcggaagccagcct

SEQ ID NO: 18460 - DNA, 629 bp, Oryza sativa
  unsure (1)..(629): unsure at all n locations
  Clone ID: PAT_MRT4530_24015C.1
cggacgcgtgggataaacaccaccattggtcgccatggagaaaagagggagagggtgagagaaagcgagcagcagagcatatcttattgagcagccaagaaagcaaggtattggaaggaattgaggaggagaggaagtgatggaacagcatgagctttcttcttcctcttcctcttctgaaccctcttctccttcgttttcttcttcgtcttcgtcatcgtcctcgtcctcgctgctgaggcagtgcaggatttgccatgaggaggaggatgagtggtgcgctgcaattgagtccccctgtggatgctctggctctctcaagtatgctcacaggggatgtgtgcagaggtggtgtgatgagaaggggagcacactctgtgagatttgcctccagaattttgagtcatattacaccatccctcccaagaaagtgcaggttgttgaaacggcagtcactgtcagagacgaggagatgctccctgaggaactctctcaggaggatcaggaagcagtatgcaggatccgagncgcaaacggngtaatggagactncttcctcaatggtgccgtcattgacgataacgttcaccattatgctctggtgtggcactcattgcagttgtgacaatt

SEQ ID NO: 18461 - DNA, 1496 bp, Oryza sativa
  unsure (1)..(1496): unsure at all n locations
  Clone ID: PAT_MRT4530_24016C.1
tttttttttttttttttttttttttttttttaganccagatatctagtttatagtagcacagaatcatcacataacatgttttgacttagcatcagaaacatctatagggtagatacatatacagatactcccagaagcagtagaaagtagaaacaaacagctgctagggctccgcaaatacaatcaaatgaagtcaaccctttcattagggttgtatatcaaatacattcctaaccatttcttcggtagaggtgtttacaggacagcagctatgcatgtacatcaaaggtatgatagaaagatttctaacattcatcctgtcgatgctttgtcacttccatttgtctacaacaataatgggattcttcaaaccaaaattcccatacttccaatttccaactacatggaaaagtataaaataagtgaatctgagcacgttcaatcggcacagatcttttgctcatgcgctagccaccatttctgttttcttatcaaggctagaagtcagctgcttgtcgatctcagcaaacacatcatccaccaaagcatccccttttacctcaactatcacatcttcgtaaattgatagcaaggattctacattttgataatgagtctgtaacctcagcttaaccttttcttctgtatcatcaaatctctgtgtaagccttgaagcgatttcttcattctccggtggggaatactttagatggtatattttcccagttacaggatcaagccgtctcccaactaccctttcaacaagaagttcatctggaacatccaaaagaatgaaaatgtcaggtcggatattaagagtttccagcgccatcgcttgcgaatagcttcttgggtacccatccaacaaccaacccttttcctgagcatctggttgcagaaggcgttccttcaccatattaacaacaatctcatcaggaaccagctgacccttctccataaattccttagctcgcttcccattctcactgcctgcagcaatttctgcccttagcaaatctccagcagaaatgtgcaccagaccatatttgctcttgatgagctcacactgcgttccctttccagatgctggagcccctgctatcatgaccttcaaaggatcagccttcacagccacaacaaccttggctgctcgaggcaaggagcgtggcttcctggtcgccggcgagatgccgcagcggcgggcggattggaggcggagagagcgggaggtcgccggcgaagggggcaagaagaggccgccgcggacagtcggcctctcggcggataaaaccggcggcgagagggtggcggtggcggccatggaagaggccatgggcggcggcgccggcgaagaacaacacaaacgcacaacttctactactactagtctactactacaaataaataaatgcttctctttcttaaaaaagaagacattttttctgttgacaattcgtggacgaaaaacatgaggagatatgtgtttcttatccga

SEQ ID NO: 18462 - DNA, 474 bp, Oryza sativa
  Clone ID: PAT_MRT4530_24017C.1
atgtcaacaagaaatgaaatgttcctagaacctcttttgctagatggttcaaattacatatcttggagtactcgtgcgcttaatgtgtttagggccatgggtcctcatacagatgctttgagtgatgatgtgttcaaaaccatcatgccacttgaagatgctcatctcatttggataacactaaaggaaagatatgacaagtccaaatgtgatggagaggatactcttgtggaagcatcatttggggattgctctacttcattgcctcatcatgacaagtcccaagtgattatctcctccaaccaagaaggtctcacctcatcatccatcccaccaacatacaactatgagcaagaattcacatcatcaatttgttcatcttccattgccgaagatcatgtgtgctttatgggtcatgatgatgattccgtggttgatcacttgaacaagaaggacactgttgacggtccttaa

SEQ ID NO: 18463 - DNA, 615 bp, Oryza sativa
  Clone ID: PAT_MRT4530_24018C.1
atggaccatgcggcggtgaagggcaagcaaggggcttggtgccaaagaaccaaatccggtggtgaagggaggaggatgtggaggcggccaggtgggcagatggcgtgtggacgggcggaacgcctattcaccccctcccctctaggcgacatcaaggtccttccaattggtatcagagcgagatctctcatttcgggcttcaccgcctggagagaaattatcgacaagagtgctttaagtgaagatgtgttcaaaaccatcatgccacttgaagatgctcatcttatttggacaacactaaaggaaagacatgacaagtccaaatctgatggagatgatactcttgtggaagcatcatttggggattgctctacttcatcgcctcatcatgacaagtctcaagtgattatctcctccgaccaagaaggtctcaccccatcatatatctcaccaacatgcaactatgagcaagaatccacaccatcaatttgttcatcttccattgccgaagatcatctgtgctttatgggtgatgatgatgactccgtggttgatcacttgaacaagacgaacacaacaatggtgatcaagctcatgaggattattgagaagtaa

SEQ ID NO: 18464 - DNA, 180 bp, Oryza sativa
  Clone ID: PAT_MRT4530_24019C.1
cgcacatgtccggtcgcgtggagctcaggaacaccagatctggtcacctggagctcgcataccaccggatctagtggtggtgaccacggtgcggagagggaccctagcagcgacatcggcgtggagagggacccggcggcaggcggtgacctcgcgcagagagggaccctggcagattga

SEQ ID NO: 18465 - DNA, 821 bp, Oryza sativa
  Clone ID: PAT_MRT4530_2401C.1
ctggatttacagagatgttcgccgtcatcagggcaagacgaagttcacttcctgtaggaatcccaaaacttccccgtgttcgacagagggaattaatgaacttcagttttattgagttggaggctgccactcataactttgcaacaacaattggtcaaggtggttctggaactgtctacaagggtgttttatctgatggggttcaggttgctatcaagaaacatacagatggatttccatctcaatatgacgagatgcccaaaaagcatcctttgatccttctacgttcaatgcttgagcataaaaatatagttaaacttgtaggatattgccacgaatacagggaaattgaaatgccgaaagaaaatgccacaaatggaaatgtttctgccaaagaagaatttcttttgctggttgaagaatacatgacaaatggaaacttgggcaacttaatctatggggggttgcttgattggtcctcccgattaaaaataattgaagggataacccagggagttgtttaccttcacacccactccgagaaacctatagtccatctggacctgaaaccagacaacatacttttggattctaacatgaaccctaagattggtgattttggattatctgaagaattacaagatgactacattaatgcaagcgttagtggaacactgggctatatgccaccagaatatattatagaaggtactgtctctttgaagaatgatgtctacggttttggtgtgacactacttgagaccattagtggaatgagtgagtctggacgaggtgctcgtcatcaagcttcgattgagtgg

SEQ ID NO: 18466 - DNA, 684 bp, Oryza sativa
  Clone ID: PAT_MRT4530_24020C.1
gagtccaacgtgttccttaattctgcagcaacagcagctactgcgacactggagacatgctctggaccaaggcaagtagttcaaatattccattcacatatcacagaagcattttcgaagttagaactcagtacacctcaggcaaagaacagattgtgccgtgatgtccaacatattcttgtatgcattcggaagttgcctgctgagaacttcagtgcagaagctattccgaattatggtcttcttgatgatttcttggctgaaaagtttgggacaaaatactcatatggtacatgggaagtactccaagacatcgccgttattggcgtgaaatcctgtgcagaggcatcaaagcgcttccttgagagctacatcaacacgctactgatggtttgctcttatgctcttgaagctgaacttatggcctgcaatgagggggtgaaaatggcactgcaatggacaatcctaccagtgataatagagaccgattgcctctctgtaactcaaatgttgcaagaaggcaaaatggacagatctggtcttgcttttgtgaccagggagacgaaggagctcctgtccggaaggtggaatttcacgatccagaagattcatagagatcaaaatagagttagtcatcaattagcaaatatcgctcgaaccaagaagaaattccaagatgtctaa

SEQ ID NO: 18467 - DNA, 1899 bp, Oryza sativa
  Clone ID: PAT_MRT4530_24021C.1
atggccctccacctcgtcgggtcttcctccttcaacctcccgttttcacattggcctcttcttcttttcacgctccctccgctgtctcgctcgccatggccctccatctcgtcgggtcttcctcctacctcccatttttacattagcctattcttcttttcacgctccctccacctcctgtccctgctccttccctccaaagatgttgtcgcctttgaggaagaaggcgatcattatgctaaagtgctgcggggaggcggcaggaagaggagagtgctagggggagggattgaggatgagctgaggccggtggccgtgaggtggtacggtgctggcatgaacatggtcttgccttatgctaccgagccacctgccttctttcacacatccagcaacgtcgccgccatgtcgctgagccgaccgctcgccgccgccgccgccgccaccgtgcccgacgagctccatctggagatcatggtgcgcctccctgcgcttccccaggcgctcgcccgcgcctccgccgtgtgcccggagtggcgccgcgtcgtgcgcgacgcggccttcctccgccgccaccgcgagctccacggcggggtgcccgccacggcggggttcttccacaacaccgtcgtcttcggcggcgcgcccggcggcgcccgcttcgtctgcgccggcgccggccccctcgccctgtccgttccgccgtcggtaagccgccagggtgtcccctgctgccacacccacgtaaaccccggcgacgcatggacggtgctcgactgccgcggcggccgcgtcctgctcggctgctgcagattctcctgctacttcctcgtctacaaccccatcaccggcaagcgctgcctcgtcaaggcggcatcccataaacgactccatctccatcactccatccgatgcaacgccacgctgatctgcgacgacgacgacgccgacgccgacgggccgttccgcgtggccgccgtgtacaccaccgtcaccgacggcggccgcctgttcggcgcggcgttcttgtcgcgcaccggcaggtggaccacggcgccgcaggtgttcgtcgacctgccgcggggcatcgacctccgcggcgagccgtccgccgtggtggggagcacggcgtacctctcggcgtacagctacctcgtcctcgcgttcgacgtcgagcactggacgatggccacgttccagcggccgccgcgctgcggcaacgcccggctgatgaagacgcgcggcgacggcgtgctcggcctcgtcggggcgctggagctcaccgtccggctgtgggcgcgggaggccggaggctgggtgctgcgtagcaccgttgagctctccgacatggggcttcttcgtgatctcccatcggcaccgttgcccagctctgatgctcggttcccgctgttgccaccggtgaagatcatcggcgtcgctgaggagggcgacgcagtgttcctttggacgatgctcgggatctttatgttctgtccaggatccatggagcttaagaagaaggcagtgaagaaacagcaaaacagggttgacatgctacaacaaatgtcgctgaagattaatgatgaagcgccggcgggcggagggcctggcggccggcggcgcggaggcccgggcggcctcgtgggcagcgcggtggccgggcggcgcagcggcccaggcggcctcgcgggcagcgcggtggccgagcggtgctgcggcccgggtggcgcggtggttgggggcggcgcggcgttgggcggtgcggtggcgggcggttcccttgaattgtggaaagcaaggaagattgtgctagggcgagctgactgctcagacaagtcacaacaagtcttcagctatgttaggagaagtaccatcgaagacacaaccgtgttggcatga

SEQ ID NO: 18468 - DNA, 2571 bp, Oryza sativa
  Clone ID: PAT_MRT4530_24022C.1
atgacgggggcgcgctcagccttcgccgagctcgacactggagtcgtcggcactgtcaaattcggcgatggctcggtgatagacatccaggggcgcagaagcatggtgcttaagtgcaagaacggatatcaccggtcacttgacgcggtgtacttcattccgaagctgcgcaagaacatcgtgagcgtcgggcgactcgacgcgcgcggctacgatgcactcatatggggcggtgtgttcacgctccgtgatcccgaaggcttgctgctcaccaaggtataccgtgataatagctatctgtatgtgctaaaactgaacattgcaagccctgtttgtttggcggcgagtggcggcgagacggcttggcggtggcatgctcgttttgggcacttgaatttccaggcgctacagaggctggcacaggcgaacatggtttgccggttaccacacattgatcacatggatcagctgtgtgatggctgtctagccggcaagcaacgtcatcctccatttcctgaggaggccacgttcagggcgcaggaggcgctcgaactggtacatggagatctgtgcgggacaatctcgccggcgacaccgggcgggagaaagtattttttgctcctagtggacgacatgagtcggtacatgtgggtccgacttctctccggcaagcacgaggcggtggcggcgatcaaacagtttcaagccggcgttgagcttgagtctgggcgaaagctgcaggctctaaggacggaccgcggggaggaatttacctccgttgagtttacagactactgtgctgatcgtggaatgaggcgagagctcactgctccctattccccacagcagaatggagtcgtggaacgacggaaccagacggtcatggcggcggcgcgctgcatgctcaaatcagccggatgccggcgcgtttttgggggggaggctgttacggcggcggtatatgtcttgaaccggtcaccaacaaaggcgctagacggagtgaccccctatgaagcctggcatggacggtgtccatcggtcgaacacctgagggtgtttggttgtgttggtcatgtcaaatcagtgaggccaaacttgaggaagctcgacgaccgaggtggacaagctggaacgactgttcaaggaggcgcatcgccggcgtcgactattgtttcgccctcgccatctggagcagcagttagggtggaattttgcacgccgccaagctcagttacgccaggaacagaagaaggtcctgtcaggtatcgccgtgtgcaagatattctatccacaactgagcctgttttggatttcgactacagtgatcagtgtttgcttgccaccgaagaaccagcaagttttgttgaagcagagcagcatgaatgctggagaaaggcaatggaggaggaattaagatcaattgaagaaaaccagacatggtctctagctgatttgccagcaggacacaaagccattgggcttaaatgggtctacaagttgaagaaagatccaactggtgcagtagtgaagcacaaggcgaggttagttgccaaaggatatgtgcagcagcaaggaattgattttgaggaagttttcgctcctgtggctagaatggaaactgtgaggctcttgattgcattggcggcaatgtatgtgaggggaaatgggtgctccaagttgattgtaggagtgtacgtggatgatctgattatcagtggggctcaaccaagtgagattgaagtattcaaactggagatgaaaaagaaattttgcatgagtgatctaggactgctgagttactatctggggatggaagttgtccaaaaggaaactggagtgtttctgtcacagactgcttatgcagcaaaaatccttgaaaagacaggaatggaaggctgcaactcgactcaaagtcccatggatgctaggttaaagctcaggaaggagagtgatggaaaggctgttgatcctactatgtacaaaagcactgtgggaagccttaggtatttggtgaatactaggcctgatcttgcttattctgttggttatgatactggttgttggtttgcaagaaaaggaactgaaggactcagtttgattgggttcagtgacagtgatatggctggggatttggatgatagaaagagcactactggagtgttatacatgttggggaaaagcttgatcagctggcaatctcaaaaacaaaaggtagtggctctgtcatcgtgtgaagctgagtatattgcagctactacggctgcttgtcaaggcatttggcttactagattgttggctgaactgattggagaagaacctagccaaactgtaatgaaggttgataataagtcagcaattaatctatgcaagaatccggtgctccatgaacgaagtaaacacattgacacccgatatcattttattagggagtgtgtggaaaagaagcaaattgctgtggagtatgttcggtccgaagatcaacttgcagatattttgagaaagcctgttggaagagttcgatttttggaggttcgcaagaagatgggtttggaaccagcacaccaagattag

SEQ ID NO: 18469 - DNA, 1308 bp, Oryza sativa
  Clone ID: PAT_MRT4530_24023C.1
atgcaggcgaggagggaggtgaggacgaaggaggagcaatggcggggggaggagagggtggtggagagcccgctggggagcgcacggtggagcccggaggcggagatcgggatgagggtggaggacatctgggacagcctggaccagccgcagctgagcgaccgggaccggctcaacagctgcttcgacgccatcccggtggcgtcgttcccgcacacgttcgacggcgcgcaggtggtcgagatcccctccgacgccacgctcgccgaggccgtcgacatcctgtcgcgccaccggatcatcaccgcccccgtccgcaacgtcgacgcccccgacgacgccagctggatcgaccgctacatcggcgtcgtcgagttcgccggcatcgccgtctggctgctccaccagtccgaggccgccgccgccagggccgacgacctcggcgccgacgagctggcggccaagctcggcaccgtcgcgcttgagggcgccgccgccgcgagggcgcccgaccagcagcagtcggcggagggggcggtcgcggaggcgttcggcgcgctgccgtcgtcggacctgttcaacaagacgaaggtgaaggacatctccgggtcgttccggtgggcgccattcctggcgctgcagagctcggacacgttcctgacgatgctgctgctgctgtccaagtaccggatgaagagcctccccgtggtggacatcggcgagggcaccatcagcaacgtcatcacgcaggccgccgtggtgcacatgctcgccgagtgcgcggggctccactggttcgaggactggggcgccaagtcgctcaccgagctcggcctccccatgatacgccccagccgcctcgtcaaggtccgccacgacgagccggcgctcaaggcattccgcctcatgcgcaagcgcggcgtcggcggcatccccgtcgtcgaccacgccggcaagcccaccggcagcatcatgatcaaggacgtcaagcatctcctcgcctcctctgacgccaacagggactacaggacgctgacggcgcaagagttcatcgcgaatgcgaggcagagttcaggcgagaagcagatgaacatcgtgacctgcaagaaggaggagagcataaaggagatcatcttcaagctggatgcagagaagaggcagaggatctacgtcgtggacgagcaaggcaacctggatgggctcatcactctcagagacataatcgccaagctggtgtacgagccgcctggctactttggggacttcttcaatggcgttttccctctacctcagaacagcagggtctga

SEQ ID NO: 18470 - DNA, 482 bp, Oryza sativa
  unsure (1)..(482): unsure at all n locations
  Clone ID: PAT_MRT4530_24024C.1
tttaaaaatttcccccctttggggggccccccccccccgnaaaaaggggaaaaaaccaaacccccccctttttggggggttggggggaaaaaaaaaggcccaaccttgggtttaaaacccgaaaacctttttttaaagggggtttggaaatnttaaaaaaaatttttaatttcccaangtttttaaanggggtttttttaatttttttggnaaaaattttgggtttaannttgggggaaacntaaaaatttttttttncccttttgggggggtttggaaagtttaaaattttgggccttaaatgggggttcccttaaancctttttttcccttttaaaattttccccccctcccttggccccttggtttgnttttaaagggaaacaaaaccgncccccgttggnttttttaattttggaaattaaaaagcccttggaattctttggaaaaancccccgttccatttttaactttttttaacc

SEQ ID NO: 18471 - DNA, 276 bp, Oryza sativa
  Clone ID: PAT_MRT4530_24025C.1
attctcctgttttttttgacctactagacagggtgtgtatcagggggatgtttttaaatagcaggtggagcaaggaatgtgaatggaggctggtttatgccaggacaaatatattgttacaatttacatgaaatacatatcatcgttaatggttcagattgtacaacccttgctttcaaaaatcttacctgaattttagggtacatgcgcgtggcaaagttttaacacaaattgtaatatcctctgaaaaactgtggtcaactgtttgcacccgtg

SEQ ID NO: 18472 - DNA, 234 bp, Oryza sativa
  Clone ID: PAT_MRT4530_24026C.1
tcgtccacgcgtacgagcgacaggactcgcgagcgtacacagaaactgaacagcaccaagctcctttcttctccttcactaatgaaaactactcgctgatcgacgtcgtcgtcgactgctcctgttagtagtagtcgtattcgcatgacgccatgttaggactagtatgagaggtgctaccattgcgacaggatcaggacggttgttcatcccctttgaggacgagacgctgct

SEQ ID NO: 18473 - DNA, 448 bp, Oryza sativa
  Clone ID: PAT_MRT4530_24027C.1
gtttcttctcttcttccatcttcgtcatcttcaacctcctcctcctcgttatattaggtatataaaatagcctttcttttcttatcctttttaattttacagagtaattgatttgcaactcttcacctggaactctcttgagaaatgggattttgatactggtagtactagtaaatggaattgaattctttgttagtactactactggtagtactttgtactgctcgcttggtagtagtaacagccaatccatccgccatggattggctggcttgaacgggaagctgaagaattaattcatggcggaatcatgtctaccgaatgggttttgattgctctgcgtttagagaagagatctctgacgttactgaccccaagattaaactcattgatttttttttatgtttatgtacgcatttattgaattcgtaacagctcgcgcctatag

SEQ ID NO: 18474 - DNA, 2556 bp, Oryza sativa
  Clone ID: PAT_MRT4530_24028C.1
atggcacggatgctgctgcacggggtgatcgacgccaagatcgtggaagcagacctgtccgtgacgtcagatgggcagctcaggccgtcccggaagactctgatgaagaagaaggtcttctcatggatcaagaagaagctgcccttctgcaacagctgccagacgcagcaggtggagaacgccgtcggcctcggcccgctgtccggcaagctgtatgcgacggtggacatcgacaaggcccgcgtcgcgcggacgcgcacggtggagccgacgggcacgccgcggtggaaggagtcgttccacatctactgcgcgcactacgccggcgacgtcatcttcaccgtcaaggccgagaaccccgtcggcgccacgctcatcggccgcgcctacctccccgtcgacgagggcctcgccgccggtgcgccggtgtccgacctgtggctccccatctgcggcgagggccgccgcccgatcgacggcggggacaagatacgcgtccagctccggttcaccggcgtcgccgccgacccggcggcgcgctggggcgccggcgtcgggagcggcgcgtaccagggcgtgccgcgcaccttcttcccgcagcgccgcgggtgccgcgtcaggctgtaccaggacgcgcacatcgccgacggcttcgcgccgcgcatccagctcgccgggcgcaggtggtacgagccgcggcggtgctgggaggacgtgttcgacgcgatcagcagcgcccggaggatggtgtacgtcgccgggtggtccgtcaacaccgacgtcgtgctggtgcggcggccgtcgtcgtcgtcggagacgctcggcgagctgctcaagaggaaggccgagcagggcgtgatggtgctgctgctggtgtggaacgaccggacgtcggtgggtctcggcccgatccgccgcgacgggctgatggcgacgcacgaccaggacacggcgaggtacttcgagggcaccaaggtccactgcgtcctctgcccccggaaccccgaccagggccggagctacgtgcaggacgtcgagacggccaccatgttcacgcaccaccagaagacggtgatcgtcgacggcggcggcgggaagacggcgccgggcctcgtgagcttcctcggcggcatcgacctgtgcgacgggaggtacgacacgcaggagcacccgctgttccggacgctcgacaccacccaccgcggcgacttccaccagcccaacttccccggcgcgtccatcgccaagggcgggccgagggagccatggcacgacatccactgccgcgtcgagggccccgcggcctgggacgtgctcgacaacttcgagcagcggtggcgcaagcaggccggcaggggcaaggacagccttctggtcaccctcgaccggagcatggccgcgcgcgacgccgaccaggccgacccggagcactggaacgtgcaggtgttccgctccatcgacggcggcgcggcggcggggttcccggagagccccgacgaggccgcggcggcggggctggtgtccggcaaggaccaggtgatcgagcgcagcatccaggacgcgtacatccacgcgatccggcgcgcccgcgacttcatctacgtcgagaaccagtacttcctggggagctcgtacgcgtggcgcggcggcaagggcggcgtggcgagcgtggaggggatcaacgcgctgcacctggtcccgagggagctctccctcaagatcgcgagcaagatcgccgccggcgagcggttcgccgtgtacgtggtggtgccgatgtggccggagggcgtgccggagagcgactccgtgcaggccatcctggactggcagcggcgcaccatggagatgatgtacagggacgtggacgccgccatccaggccaaggggatccgcgccgaccccaccgactacctcaacttcttctgcctcggcaaccgcgagcgcctccccgtccccggcgggtacagctacgagccaacggagcgccccgaccccgacaccgactacatgagggcgcagaacgcccgccgcttcatgatctacgtccacgccaagacgatgatagtggacgacgagtacatcatcgtggggtcggcgaacatcaaccagaggtcgatggacggcgggcgggacacggagatcgcgatgggcgcgtaccagccgagccacctggcgtcggtgaaccggccggcgaggggccaggtgcacggcttccgcctcgcgctgtggcacgagcacctgggcagggcggctgcggcgtcggccgccggcgaactcctccggccgtcgagcctggcgagcgtgaggctcgtgaaccaggcggcgcggcgccactgggacgcgttcgcgagaggcgacggcgacggcgcgccgccgacggaagacctcccgggccacctgatggcgtacccggtgcgctggacgggctgcggcggcagcgacggcagcgacggcagcgacggcaagctcgtcgcggcgacggagacgttcccggacaccaaggcgaaggtgctgggtgccaagtctgacgtgctcccgcccatcctcaccacatga

SEQ ID NO: 18475 - DNA, 516 bp, Oryza sativa
  Clone ID: PAT_MRT4530_24029C.1
ttttttttttttttttttttttttttttttttttttttttttttttttttttggaaaaaggaggcagggagtactgccaaaaccctttttgctaaaagaacctgaacaggaaaataggggtccaagaaacaagtcattgcatcagcagtaagggtggaggggccctaaagcatcaagatttaaactatcaagttgctgcataaatagcaagttagcaacaactcatattacaactgaaatcaaaatatgaaaaaggcatgaccatgcatgaaaaccatcacaccatttagtgatcctcacaacatgagggatgggcttgaaagataattaacctccaaagatgttatagttggactccagaaggcattctgccagaatgaattccaaaaactctggccaaaaatgtcagtggtggacctctggaggccctttcctagctagaagggcagcataggcatcataaagaccagggacaacggtctcgtgctgatcaattaagtctattacaaaacaact

SEQ ID NO: 18476 - DNA, 592 bp, Oryza sativa
  Clone ID: PAT_MRT4530_2402C.1
ccggccgggacatctgtatatattacctatcttgtactccttgcttcatccttgcgactacgcactctgctcgtcgcctgttctatatacatctctcgaggcatatcgttgattatgccagggatctatagcaccaactgatttaatccagcgacgaccccctggcataccgcgccgaccggcaccgataaggagccgacgcctgtccgactacagcaattggaggcactgcctgaactgaagatcattaatgactgggctgagtacgtctccatgatctagaatgcaattattcctgtgcgcattgactgttgtcatccgactggaaattccacctcgatgtcctttgccaccgcgatataatgatactcctggacatgcactacgtcgttcattatcaggttgctatgatgattagccttccccgaggtgaccgttgacttatccactgctagtccgacatctttcttgctctgcgtcaatctcttcggactgagtttatgaatgagcctcttatgatccatcaagttaaaatacgagaatgtgtggcgctcgcatatgacgcatctcattgataccacgatgatgtaga

SEQ ID NO: 18477 - DNA, 367 bp, Oryza sativa
  Clone ID: PAT_MRT4530_24030C.1
ggagggacaaaaaatttttttttccccaaattttttaaggttggattgggttacaatttttttccccccaaaatcaattttaccaacatttttttaaaaaacccgtttgtttttcccccatggctggcaagctgagcaaagcattttacacaaagaacccgagttcttttttaaccaaaggggaacgaacgaagaaaatacagggtcttttttgtctgaagatacaccaagcgggtcgttttcttttatttttaggctcccctcctcctcgaagatgggggtatggcaatggcaatggcgatgggatcttggcttaattgatgggaaggggcttccccttccacttctttaggcaatccaacatggg

SEQ ID NO: 18478 - DNA, 564 bp, Oryza sativa
  Clone ID: PAT_MRT4530_24031C.1
atggccgaatccctggtcgccgccatcgacgaccactccgtcatctccaccgagatcccgcactccgacctaggcgagaaggcgagcctcgtcgacgctgatcaccggatcggggatgtgacacgagcaccggcggcggcggcggctgaggaggagcacgggcactacaccagcgacctcctccgccgcgccgagtacacgcgcgccgtgatcatctcatcggcggcggtgatctccatgacattgcttgtcccgacattatatgttgcttggatgattttatggccgcactccaccgtcgccactaatgttgatgatgatggttaccatgtggaggatatcctgcgtgattttcctacaccatggcttatctcttcttctcgacgactttggtcacgcgtcacctgctgcgatgagctcttattggtacgtggatttcacgttttcctcgtcgtgttcgccttcatcacagttttacccttgtttttcgctggtattttcggtgatgttgttaggattgttgtcggtgatgttgttaggatcggtgtggtctttgaaaagtga

SEQ ID NO: 18479 - DNA, 162 bp, Oryza sativa
  Clone ID: PAT_MRT4530_24033C.1
gaaagaactatttatttttaattttaaagttgcatgataacaatttacgatatttgtacaaaaacaggacggatttgttaaaatctctagaggagaatactaacgagccatacgttggctacagggtgaacaaaagttggaccgcgggagaaaaaagggttt

SEQ ID NO: 18480 - DNA, 220 bp, Oryza sativa
  Clone ID: PAT_MRT4530_24034C.1
statataagttgtaaaggatccaattcgatgctgcttgcggcgtgctgcgatccgatgtgttcggttttaaaaaattcgatcatcccttggatgcgggctgaggtgtacattaaatctcgatcaaaggagcaaaggataatgaaggacggaattaattaagcggaatacaccacttagtacacacacacacacacactttggggactacttactgagatg

SEQ ID NO: 18481 - DNA, 111 bp, Oryza sativa
  Clone ID: PAT_MRT4530_24035C.1
atggcctgggagccacaggtctgggcgaggcagagaagggcacggttccccgcaggcttggccctcgccgcaatggtcaccggtgatggatggatgaagaacatgtgttag

SEQ ID NO: 18482 - DNA, 501 bp, Oryza sativa
  Clone ID: PAT_MRT4530_24036C.1
atggcttccaagtcattgtttctgcttggtgcggttttagcctcactcctactcgttgcacaagacgtctctgctgcgagagaactcgcagaagcaaatgaagctaaagggaagaacatgaaacaagaagtagcttatggccctcaagatgagaagctagcacatcatgctgacggatatggacatgggggaggctatggtggtggctatggatctggatatgggggaggaaatggtggtgggtatggcggtggatatggcggctatggaggtggatatggtggaggatatggtggtggtggtggtggtggaggaggaggaggatatggtggatatggtggatacggaggatacggtggtggcggatacggaggatacaacaaaggatacggtggtggcggtggtggtggatacagtaaaggctttggaggaggatatggcggtggtggctatcctggtggtggatactacggtggtggtggtggtggcggatggcactaa

SEQ ID NO: 18483 - DNA, 2285 bp, Oryza sativa
  unsure (1)..(2285): unsure at all n locations
  Clone ID: PAT_MRT4530_24037C.1
ggcccgctctccgggctcgcggggaggcccgtcccggacctccgcgtctgcgggccccgcagcggccgggcggcccgccccgggccccgggcgcggtccaacctggtttgcagagtttgacaagaagctctcagtctgtcccttctttcggtatctttcgatgagatcttttgtcaaaggttcctttagtgtcaacaggtcgatttcttccatgccatcgtacaatacccaactcactggcccatcttcggtatggccggaggcgtatgtcgtcgacatcgggagcgtgatcggtgggttgtgcagcgaggggctcgtggcgtggtataaccaagacgtgcatgtgctcgagacacattactactccggaggcgccgcgcagtcgtttgccatcaagggcttcaacttcgactcggcccctttcctgttccctggcttccagtcgcgacgcccccatttctggctcgtcgtttaggtcgtttatgcgctaagcggatagggtcttacctctcgtcttgggatggccagattggaacttcagcaggctcagtgatgaccgtcatgatgaacctgggatggtcttcgccagaggaaatggcacagcggtgctgatgcagtccaggagtggaaaaagcttcttgtgagtttctttgatgcagttattcctatctctgcagctgcaatggctttgcctccactttccattcgaggtgatttaggtgttctctccacatctgctggtagatatgctccttctctgttgaaatcaatcctgcaaatgggacctcaaggggctcttggtgctacaaaacttctaagacctttctcagagatcgttgattcattgggcctgaaaaacccctttgttcgtaattggatcgatctcttgtgttttctacttgctggagtcaaatctgatggtgctctttctgcagaaatggtttatatgtttgcagaatggtataaaccaggatgctcgcttgagtatcctcttgagggaagcggagcaataatagatgctcttgtgcgaggaataaaaaaatttggtggcaggcttgctcttcgttcgcatgttgaaaagattttaattgagaatggtcgagcagttggtgtcaagctacaaagtggacaaattgtgcgcgcaaggaaagcagttgttagcaatgcatctatgtgggatactttggatttgctgccaccagatgctgtcccaagatcatatcaagacaaagtgaaagcaactccacaatgtgaatcatttatgcatctccacttgggttttgatgtcgagaatgccagagaggaccttggaatccatcatattgtggttaatgattggaacaaaggagttgatgctgaccagaacgttgtattgatatcagttcctactgttcttggaaatggcttagcaccgcctggaaagcacgtcctacatgcttatacaccaggaacagaacctttcagtttgtgggaaggactagataggaaaagcgccgagtatcgaaggctgaaagaagaacgctctgaggtgatgtggaaagccgtggagcttgcccttggtccaagatttagcagagaaaaatgcgatgtgaagctggttggatcaccattaacacacaagaggttcctccgaagaaatagaggaacctatggtccagccataaaagctggggaggccactttccctgggcaggcaacacctataccccagctattctgctgtggtgactcgacttttccaggcatcggtgtaccggccgtcgctgcaagtggtgcaattgtcgcaaacacgctagtctccgtgtcacaacattcagagcttcttgatgctgttggaatttgacatgcagacgtgcagaatactactgtgtggagcttttgacagagatcaatattaatctatgaagattaaaagctaagttcatcctccccacatgcagaggtaggcaggcagatctgtggataacagtatatgactacattacaacatacagtagatactacaagaaacatatggataagcaggaattttacattggataattttgagttattttctgtgacccgattgtcgtttacaactagtacatgagaaccacggttatgtacagaagtttttcttaaagaaaaaacctgcatgatcctgtacacgccatagttctgatgaacgatgaacttgataacaagggggggggccgggtacccnatnccccccataattgaattcttnttacaattncactngggccgccgttttacaaccctccttgactngggggaaaacc

SEQ ID NO: 18484 - DNA, 387 bp, Oryza sativa
  Clone ID: PAT_MRT4530_24038C.1
atggatactggcaacaatttctttccaccagttttagaggtggtgttatgtgtgattataaaggaagatggacatatggtttgcagggatttggagtttattaatagtatagtagaaattggcataggcctggtgggctttggcatcctattctcattctttggcgttatccttttctttgataggggcttgttggcgttgggtaatattttcttcttgactggaatcggcttgttgcttggttggcaatctatgtggcagcttttcacaaagaaggcaaacattaagtggttatggacctcctatccaggccttcctataccagattccagtcattggatggattctgcaatacccattccagctgtttggtcagttcaggcgtaa

SEQ ID NO: 18485 - DNA, 249 bp, Oryza sativa
  Clone ID: PAT_MRT4530_24039C.1
atggtgaagagtcgcaacgacatgctctcgccgggcctccccaactctaatgttgtcgtcggcgtctcctctccccaagcttccccgaatgctcgaggggttcggctagccattgccaccaccctcccgggctccactaccactggacaccgctacgcgtgcccctgcgccgagcgttgttccccgtctgattctgaccactttggtcactccgtgctgtacctgtaccctggaatgatgaactcgtga

SEQ ID NO: 18486 - DNA, 402 bp, Oryza sativa
  Clone ID: PAT_MRT4530_2403C.1
cacctaaaacccttattttttttcaggggcccaaaatttttttaccactcccttgtattaaaaagctggaccaggggggccaaattttccagcatttcggttcaggtccccgtaggtgattgcaaaattgcagccaagttaaagcgaaccaggaaaatcgggaaaaaaattattccccttttttctttctttatggacgggctggaatcacacggggtaagactgctggatggcctaaaggccggggcctttgagcttaacacccgtttttacatgccctttgagcgtttggggctcccttagcctggcattttccgccctccttttcgccttttcagccatctgattgacctcattgtacccagccttttccgaaaccatttgggcttcaggcggttgcag

SEQ ID NO: 18487 - DNA, 159 bp, Oryza sativa
  Clone ID: PAT_MRT4530_24040C.1
atggtcaagaatgaccggtctatgaccggcctgacgccggtcacgtctgactggacggacaaccgtgctcccacgtcgcatctgcttccggcggagtggaggcgagggacgacactgggccccgctaaaggacaagctgtggttttagcttccaggtga

SEQ ID NO: 18488 - DNA, 960 bp, Oryza sativa
  Clone ID: PAT_MRT4530_24041C.1
ctcgatctctgccgcctccccccaccgccggagaaggtcgccgccggcgagcgagcgcgcccgccggagttgtagccgcctctctcccccccgcggcagcctgacgccttcacgcagcgtgatctccttccccccctaccgctggcggggatccgtgctctgtcggtcggttcagttggtggactggtgaactgaaacttattgcttggtgctagtgtgatggcgtacgagattagcgagatcaaaaaaattggcataggcctggtgggctttggcatcctattctcattctttggcgttatccttttctttgataggggcttgttggcgttgggtaatattttcttcttgactggaatcggcttgttgcttggttggcaatctatgtggcagcttttcacaaagaaggcaaacattaagggatctgttcctttcttccttggtctgtttcttctctttgtccgatggcctgttgctggcataataatggagctatatggatcttttgttctcttcagtggttatggacctcctatccaggccttcctataccagattccagtcattggatggattctgcaatacccattccagctgtttggtcagttcaggcgtaaacgtgcatgacaactcacggcagaaattacccttcgtacgggagcatattttgtgatgttaatacggaaacctgctgtgtaccatctgccacgatgcagtttaattcttgtgtgcatattcatactttcgcctttctaatctggagtttatctggcttttgctcattttgctaactggcagtagtttagtgttcatatatagacgatgtagaggcttcaaatgattgttgctagaaatttgggatctgggtttagcaaaacatgtggatcttttagcctatttctaacaaattgtgagccagtaactattgcttgaaaacaaaaaaaaaaaaaaaaaaaaaaa

SEQ ID NO: 18489 - DNA, 228 bp, Oryza sativa
  Clone ID: PAT_MRT4530_24042C.1
atggaggaccggaagtgggtggtggacacgggcgggcaacgaggtgcttgcggcggcaccgaagtcacgaggatggcaatgggcaatgggctagcattggcggcaggcaaaatggcgagattggttaggaagcggcgaccggtggtggcagatctagtggtgggtggtggacacaggaggcgatgggtggcggtggctgatccggtggtggggagatgccggagatag

SEQ ID NO: 18490 - DNA, 1221 bp, Oryza sativa
  Clone ID: PAT_MRT4530_24043C.1
atggccgctacgcttgccgcacgcacgcacgccgccacctcgcgcacgcccgcagcctcgcgcacgtccatcaagcagtcatacgccagcacacacgccaagccggccgaccatcacgcgtgtgtagcaggtgaaccctctagtactgctcgttcaaaacgatcggacgagcagacgacacgacggaaggaagtggttgatggtgttctttcactgggtcaaatccatgatgcatgtgtgtggagagaggctgctcgattgttgttgttgttgttgatggggttcatcgggtgtatggagatcactgactcagccttcggtgttcactccatcggtttccaattgcagaggacattatcaattggaatacgggttggcggaatgccaaaattgctaatctccacgacgttcaagtttgtgtatagtgcatcaaggtacgaggggatgggtgtttcattacattgtgctgcaggcatcatcaactcgaggttgcgagtggaggaggatgcggcggtgaggtggcacgacggcaagcgtcaccacggcctcccactcgccggccaccggcgtcgagggcatgaagggagcgacagcggcgagctcctcaccatcaccacagttgtgcttgccgccgccgctgctgatcctacccgagcggactcccccgcaagctccggcgtcgttgtctggaagcctccgccctcaccagattcggccgatagcgttgatttaggggagccacgcaacctctgccgccatctggagcagcggcgagggacggggacgaagtcgaggaaggcagaagaggcggcgccaacaacaacaacatcatcatcgacgccaccaatttccaccgtcaatgccaatttccgccgctacctccgcatccgcccacccacctgccgcctccctcgcgcgagcagtaggaacgtcgtcccctccacctatttccgtcaacgccgtcgcccacccgctgatggcacgggagaatcgacgagggacagcggcgtcgccgcttcccacccatgtcgccttctgttgcctggatctgctagccgccatcgagcttggaaaccgccaactgccgcccctaacatgcgctatcttggagtggcgttgattaagtctgccgtgtgtgtccatgacgagaagctagcgctttacctgtgcttaattgccgtattcagtagaaaaacgacaccacgaggctcgttactggtg

SEQ ID NO: 18491 - DNA, 1780 bp, Oryza sativa
  Clone ID: PAT_MRT4530_24044C.1
ctgcaggaattcggcacgagggttggtagccatggcggtggaggtcgtgtctgagggtgcggcggccgccgcggcggaggtggcggcgccggagacgaaggaggtgaccgcgaaggcggcggcggatgaggcggtgacgctggctgccgtcgtgtccaagaacgcgtcgttcagggaggagagcaacttcctggatgatctcaaggacggcgagaggaaggcgttggctgagctccgtgccaaggttgaggaggccatcgtcgacggcaagctgttcgatgacggcaaggtggaggccaagaagaaggccgcggcggcggaggaggagaaggcggtggaggaggccgccggtgagaagaaagatggcgaggagaagaaagaggaggaggagccggtgacggaggagaagaaggaagaggagcaaggcgaggaggaggaggagcccaagaaagaggaagccgacgagggcgagaaggaggagaagccggcggaggaggaggcggcggcggttgtggacaaggacatcgctctgtggggcgtgccgctgctgccgagcaagggcgacgacgccaccgacgtcgtcctcctcaagttcctccgcgcgcgcgacttcaaggccggcgccgccttcgacatgctccgcaagacgctccactggcgcagggagtggaagggcttcgccgccggcaccgacgacgacgacgacggcgaggcgctcccggcggagctcgccgacgcgtgctacctcgacggcgcggacagggagggccacccggtgtgctacaacgcgctcggcgtgttcgccgacgacgccgtgtacaagaaggcgctcggcacggaggaaggcaaggcgaggttcctccggtggagggtgcgcgccatggagagccacgtggccaagctcgacctcaggcccggcggcgtcgcgtcgctgctgcaggtgacggacctcaagaactcgccggggccggccaagaaggacctccgcgtcgccatgaagcaggtgctcgacctcttccaggacaactaccctgagctcgtcgcaagaaacattctgatcaatgtgccgttctggtactacgcgttcagcaccctcttctacccgttcatgacgcagaggaccaagagcaagttcgtcattgctcggccctccaaggtcaccgagaccctcctcaagtacattcccattgaagccattccagtgaagtacggtggtctgaagcgcgacgacgacaccgagttctcggcagaggacagtgaagtcacagagctcgttgtcaaggcaagctccaccgaaaccatcgagatcgaagccacagagggtgacactacgctgacatgggacctgaccgtgctgggatgggaggtgaactacaaggaggagttcgtgccgagcgaggagggctcgtacaccgtcatcgtcaagaaggggaagaagatggggtcgtcggaggcggcggtccgcaactcgttccgcgccggcgagccggggaaggtggtcctcaccgtcgagaacctgacgcacaggaagaagaaggtgctgttcaggcacaaggccaagagcgcctgtgccaaggagtgctgagaatctgggctttcgctgctcattgtggtgaattcttttggaggctgctgagatgcgtggattcgttctattcttttgtgtgtgtgtgagagagagagagatcattttgtttgtatgtggagattgtttcattgatttacccgagaatataaagaatcggatgattacagaactacaaaaaaaaaaaaaaaaaaa

SEQ ID NO: 18492 - DNA, 1811 bp, Oryza sativa
  Clone ID: PAT_MRT4530_24045C.1
cgaagcggaggaggggaaaggaaggcgagagagagagagagagagaggagaggagaggagcgcgttgcgaaggctctcgaatcgagcgcggcaatgcgagagagcggttcttgagcccccgcgattcgattcttccggtgcaaagaatgtacaagatgatgtatcctagctggaatgacatttcagtgtacatatctgagtattggtctgttataattgctacagtcatttttgcatctgttactggtgtgacaatttattatactgtcaatcaattgaacaaaaacatcagcttgagtttgatgaaagctatcagagctagggcaaggaagtacaagaaattgaaagataaggtccctgcctcttcccacatttggagaaaagaacttggctctcgtagtaaaggtctgaaatgctgtgtatgcttgaagtctgtttcatctccgcagtatatggggggagttatccatcagtgtgatatttgtggtgccactgcacatcctagttgctcaggaaatgcgcacaaagattgcaaatgtgtttctatggttggttttgaacatgtcattcatcagtgggctgtacagtggattgacacatcggatcgctctgaggaggattctttctgctgctattgtgatgaatcttgcaatggagctttcctcgcaggttctccaatttggtactgtatgtggtgccaacggctagtgcatgttgattgtcacaacaacctatctatagaaactggtgatatctgtgacttgggccccttgaagcggctaatattgtcacctctttgtgttaaggagctccattggacaggtgcagcaggacttatcagttctataacacatggggctaatgaattggcttccaatgtccgagagaggatcaggagtcgcggtaaaaagtacagaaagggtaccatttctgttgattcagatagctctggtactattgacccgccatctgatattgaaggagattcacaagaaacaaacaatgcagctaaaaggagagaggatcatgccaatggtgaacttcctgaagtacatgaaagctctgaatcagagaatgataaacagctgttgacagaaaacaaaactagcataccgaacggccaacatgaggattcacacgtacacaataatcagaaatatgaaatcgtggatgtgccttctgattctaggccattgctagtgtttattaacaagagaagtggagcacagtgtggtgattcactgagacaacgtttgcagatccttcttaatcctatccaggtttttgagctgggtaaacagcaaggaccagaagttggtttgactttgtttaggaaggtaccccacttcagagttcttgtttgtggtggagatggcaccgttgcttgggtcctggatgccattgagaaacagaagtttgaagctccaccacctgtggccatccttccagctggtactggtaatgatcttgccagggttttgtcttggggtggtggtctcggaattgttgagaaacagggaggtctgttctctgttttaaaagatgtcgagcatgcagcagttactgttcttgatagatggaagatcacaataaaagacaaccaagggaagcttatgtcacaaccaaaatatatgaacaactactttggggttggctgtgatgcaaaggttgctttagatatccacaatctgagggaggaaaaccctgaacgtttttatagtcaggtaaacccagcttgttcctacgaagtcacttctccttcttattctcatatgcaccatttacttctccttgtttgactggtcatgtaa

SEQ ID NO: 18493 - DNA, 2634 bp, Oryza sativa
  Clone ID: PAT_MRT4530_24046C.1
atgagggccggggggtgcacggtgcagcaggcgctgacggcggaggcggccgccgtggtgaagcaggcggtgacccttgcgcggcggaggggcaacgcgcaggtgacgccgctgcacgtggcgagcgcgatgctggcgccgccgggggggctcctccgcgcggcgtgcctccggtcgcactcccacccgctgcagtgcaaggccctggagctctgcttcaacgtggcgctcaaccgcctcccggcctccgccgccgtcgcctcgtcgccgctgctcggcggccacgggcacggccaccacggccactactacccgccgtcgctctccaacgcgctcgtcgcggcgttcaagcgggcgcaggcgcaccagcggcgcgggtccgtggagacccagcagcagccggtgctcgccgtgaagatcgagctggagcagctcgtcgtctccatcctcgacgaccccagcgtcagccgcgtcatgcgggaggccggcttctccagcacccaggtcaaggccaacgtggagcaggcgtgcagcaccaccacggccaccagcgcgccaccgaaccaaaaccctaaccctagctgcaccggcgccgcagccaccgccaccgccaccaccagcccggctcatcctccggagatcaaagccaaactgccactgctcgacatgctggcgcgcgacgaggacatcgccgcggtgctcgactgccttgccccggcagcggctggcggccggggcggcggcggcagcaggaggagggtcgtcgtcgtcgccgagagcacggccgccgcggaggccacggcgcgcgccgccgtggacagggtcaggagaggggaggcgaagcagcacgacgcgctgcgtggcgcgcaggtggtcagcctccgcgtgtcgtcgttccgcgacatgccgagggaggaggcggagcggcggctcgccgagctccggtgcctcgtgaagagccgcggcgcgcgggtgctcctcgtcgtcgaggacctcaagtgggcggccgacttctgggccgccgcgcacgccggcgccaggagggtcggcagcggcggcggcggcggctactactgctctgtcgagcacgtcgtcaccgaggtgcgcgccctggcgtcgtgcgacggcggcatctggctcgtcgggttcgggacgtaccagacgtacatgaagtgcagggcggggcatccgtcgctggagagcatgtgggggctccagacgctcgccgtccccgccggcagcctcgcgctgagcctcacctgcgccttcgacgacagcgcgctgggcgcagtcaatcagtccatgaaagcgagccctcacaccaccgatgggaaccgcccggcgccgtcttgcgggccgcttttgggcggcagccacctcctctccagatgctgcggcggcgactgctccgccgcgacgacgacgcacgagcacgacaccaaggcgtcgttgccccgctccttcgtgtcgtcgtcgagcctcccttcttggctccagcattgccgcgaccagcagctgcaggagtcgacacatttcgcggatcttggcaagacatggggatccatctgcggcaagccgtctcagcggatgacgctgcatttctcggcgccggtgtcgccggcgtcctccatctcctcctacgagcacggccacggccaccagcagcagcagcaccagcctcaccactcgtggcttctcgccgacctcgacgccaagcacccatggaagcccaagcgcgaggacgacgacgacgagaaggccaagtcgcacgacgactgctccggcgcctccaatggctcggtggaggtggagtgccgttccaggttcaaggagctcaacgccgagaacctgaagctcctgtgcgccgcgctggagaaggaggtgccgtggcagaaggagatcgtcccggaggtggcgagcgccgtcctccagtgcaggtccgggatcgccaagcggcgggacaggtcgaggtcgacggaggcgaaggaggagacgtggctcttcttcctcggaggcgacgggcacggcaaggagagggtggcgagggagctcgccggcctcgtcttcgggtcacgcaagagcttcctctccgtcaagctcggcgcctcctcctcctcgccgtccgcgtcgggctccaccgaggatcaccaccggagcaagcggccgcggacgacgacgacgtcgtcggcgagcgaggcctacctcgagcggctctacgacgccgtctcggagaacccgcaccgcgtcatcctcatcgaggacgtcgagcagggcgaccatcgctggcaggtgggcgtcaaggaggccatcgacagaggggttctccggagccaggccggcgacgaggtcggcgtgggcgacgccatcatcatcctgagctgcgagagcttcgaggcgaggtctagagctggctcgccgctgatgaacaagaagatgaaggtggagaaagaggaagccaacacaagtgatcatgatcacaaattagaaatcgaatcaggcgccccctcttcttgcttcgatttgaaccttgacatggagagcgatcaagcagcagatgagctcagctccggtgatgtctgtctgctcacggcggtcgaccgggtgctgctcttcagaaggcaggatgaaatgtaa

SEQ ID NO: 18494 - DNA, 282 bp, Oryza sativa
  Clone ID: PAT_MRT4530_24047C.1
atgatggttatgatggttggaatggtcggtaataccatccaaccgtcattggggatcaatcccagcggtccatcaaaaccctgcatctatcggcgctgcgggaggttcggtcgaactaggggctggcccaactagcccaagtttcggctggtggcctcctccattgctttactttatatacttgtgaattttggcccaatttatcatgtcaattctgagttcttggcctattcatacataagtctggtcctcgacatcgttcgattgatttatcatttgatt

SEQ ID NO: 18495 - DNA, 276 bp, Oryza sativa
  Clone ID: PAT_MRT4530_24048C.1
caaggagagtgaagcattactgtatggcatggaccgggagtccatacaaaggcaggcatattgagaaataaacctgaaagtagaccaacgtacgaacttgattatagctggacctgtatcgggggtacatcagtgctatttactggcccaatgactgtagggcgaagcctttttgttgcacttttagtggctcaatgactcaaaggggaagcctttcttggcagtgaaattcggggcttggccttggagtccaccttagggaatttcaaggtcttg

SEQ ID NO: 18496 - DNA, 346 bp, Oryza sativa
  unsure (1)..(346): unsure at all n locations
  Clone ID: PAT_MRT4530_24049C.1
cggacgggacagngnaccgcgtgggcgcaggcgtcntcggcgcgcgcgnntgcaagncgcgggtncgcacgggtgagcccgtggagggctggctcgacctccgnggcggtgagcatggcnacgcgacgcacaccccgaagctccgcgtcnggctgcggttcttgggcgtggagtccgacncgtggtgggacgccggcgttcgctccccgggttcgccggcgtcacgcggtntncttcccggagaggagcggctgccgcgtgacgctgtaccagaactcgcacctgtccggcgggttcgacccgggcgtccgctcgccggcgggggggcgtaccggccggcgcgcct

SEQ ID NO: 18497 - DNA, 1225 bp, Oryza sativa
  Clone ID: PAT_MRT4530_2404C.1
atgccgtgtgggtatggggtacccataatctccacactcgacttcacggcgcggcggggcaccacgttcgcgtcgcaccagtacgacacggggcccttctacgacgagatccggcggcgcctctccttcgacttcaccaagagccagctcgtcgagaagctccgccgcctcaagaagaagtaccgcctctgcgccgcccgcatggcctcctccccccacgccgccgccgccggcttcgccttcaggaccccccacgagggcgccatctacgacctcgcccgccacatctggccccccgccctcaagcgcgacggcaccgcctccgacgacgacgacatcaaccccgccgccgcagctgccactgcggcagttatgacgcctgttgcgatggaggatggtttcggcggaagcgcccctacgccgacgccgacgccgaggggcaggggagggcggcgcgtccggcggagaatggcgcaagagcaggaggccgcagcattgccttccgcgccggcgctgacctcaacagatggagctcatcaggagccgcttgtcgcggccatggagaacacattgccgcagattgcgcagctgccaccggtgtcggagacggagccaatgccagtgattgccaatggtgctaatgaggaggctgtccggagcgttctgtcacgtctactgaaggagttcatcacctcattcgctgtggttgggcagactggtccaggaatgggcttaaacatgggatttgggggtgctggattaaacgctgatattgctggccttggtttcggcattgccgggctgaaccctggggtgcccggtgctgataggtggaggcagcatcagatacttgagctggaggtttatctgaagaggattgagcttgtgcgtgagcaagtcaccgccgcgctagatgagctcaggtcatcggaaggttgatttgttctcttgtttcatagtcccgtcgatactttctctcattagcagggagtactttcaacttcttctgttgtagtgtgtgccattagttgatgcatgtattataaagttctgattgtatacttggatctagcttagctgcaggtagttgcccataaggttagaggtgagaacatcgatgtgtagatgaaatgaggatcaaagctgatcaatacttgtagctctactttatcttataatttgataaaatgcaatgaagagtttcgagtcaggaattttatgatcc

SEQ ID NO: 18498 - DNA, 500 bp, Oryza sativa
  Clone ID: PAT_MRT4530_24050C.1
gaatttttcctcgagaggaggcggcggcgcaacgaagacgcgacggcgggggcggcgcgcggcgcgacccggaggcgacggcgacggcacggcgctcacctccggccgccatcttctctccggctttgggaggaaggaagtctgagaggatgctggttcaaatactgagtggctgagcaaacatgtacatgatgctggttttgtaaaggagcaataaatgtggttctctgaacattgtatattgctgatgtaaccatttggcataggagagtactggtgtggcagcccatgtttattttttatagcttgaaaggtcacataaatgcaaattctaagtagaaatgtcaagtgaatcatgccatatttcacttttttttaggcttcatcaatgtgtatttgatgcatcagtagcaaatgatgcatgacgttcatgggcccatgctttattatctcctggctaattatctcaagtgaatcatgatatagtttcatctttttct

SEQ ID NO: 18499 - DNA, 1036 bp, Oryza sativa
  Clone ID: PAT_MRT4530_24051C.1
ggggacaataaagaagaaaaagatgaaactatatcatgattcacttgagataattagccaggagataattaagcatgggcccatgaacgtcatgcatcatttgctactgatgcatcaaatacacattgatgaagcctaaaaaaaagtgaaatatggcatgattcacttgacatttctacttagaatttgcatttatgtgacctttcaagctataaaaaataaacatgggctgccacaccagtactctcctatgccaaatggttacatcagcaatatacaatgttcagagaaccacatttattgctcctttacaaaaccagcatcatgtacatgcttgctcagccactcagtatttgaaccagcatcctctcagacttccttcctcccaaagcctgaagaccctcaaccttggtctcattgcctcgtattacaacgtcaccggagagaagatggcggccggaggtgagcgccgtgccgtcgccgtcgcctccggatcgcgccgcgcgccgcgcgccgcccccgccgtcgcgtcttcgttgcgccgccgcctcctctcgaggaaaaattccacgccgctggaggagttgatttattcccgggcaaccatcgacgcaagtcgccacctccgagccacggccgccggcgctgctaggaagcaagtcgtcgccgtcggcgtcaccaccacagcctgcgcggctgcgcctcccagcgaggtcccctttgttgccgcccttctttttcccatccccgccccccgcctccatgtcctccctcgaacgggagcctccgctgcgtccgccatggaggtcgcggaccgtccgcgttgacgaaaccatgactcccgcggatgcgccggaggagacgacgagcggcagtgagcggccggccgaagaccacgggaaatcaggagccatcccgattttgctggccgagaagaggatggtggcaacgaaggggccctcgcgcgggagacgcaggctgtggcggtggcggcgacgccgacggtgcagaggtctcccctcccccatcgtcttcg

SEQ ID NO: 18500 - DNA, 366 bp, Oryza sativa
  Clone ID: PAT_MRT4530_24052C.1
atgacgggcgcgggcgacgaggccctcacctctctcccctcccctcccatccctctccctctcccagatctagccggaggaagggggcagcagccgccgtggcagcgacggcagatgggcggtggcggagctgacgccgacaacaacgtgccggaccaggcgggcgcgggcggcgggcggtggcgcgcgggcgcaggcggagaggccggatccaccgccgccgggccgcagggaagccggatccgctcccgccggaccacggtgaggacggcaccgacctcgacgccgtcaaccgtgctgcccggctccctcctctccgacctcgacgccgtcgaccgtgctgcctggctcgctcctccgtgttga

SEQ ID NO: 18501 - DNA, 1307 bp, Oryza sativa
  Clone ID: PAT_MRT4530_24053C.1
aagggaaaacctggcttagctgaagaagagcaagcaatactattatattatataatccaataaaagttgaaacaaaaaagagggagcaaattaaagcaaaagctagatatatataatataataatgatggacagagatatatagttagtcgaggaggagtttcttgacgtaattatcgtagacgaagtcggtgaggatgctgtaagctttctcggtggggtggtagctgtcccagaagagatagtcggagacgggggtgcagacggaggaggtgagggcgttgcagaggacggaaacctccaggaggccagtgccgcagcaacccatggtggagtcgctgaagccgtacgcccgtggacgcatcatcatgtccatcaggaagccgtagatgtccatgaaaacaagcttggtcttggtgctcttcttcttggcctgcatctcctccatcctcctcttcatcccggcgttgtacgccaccgcgatctggttgtgcccctccgagcagcgcctctccatgccccccgacatggtcctctgcgacggcacgcacccgatgggcggcatcccgatgatggccaccttcctcgccccggccttcaccagctcgtccacgaacgccgccgcgtggtgcaccagcagcgccgcgtacgaggcgtggtcgtagccgggcctcgcccgcatggtgaagtaggtgttggccacgtcgtcgctgccggcgcagatggcgaagatgcccctggtcatcatgtccgccacccgcgcgtccccggcggcgccgcgcacccgctccttgtactgctggaacagcagcagctggtcgggcatggagatgacggaggccaggcgaggcgtcagcgggtcgaagccggtgccccccgacgcgaagctgacgccggtgaggagctcctcagtcgacagctccggcgacaggtacggcgggagaagctccttcagaccaagacgggaagcgatgaagtcggttggtatgcgtccgttgcagaatctgccggtgggggtgtggttgtggaagtcatggccgtagggagggaagttggccttgatgatggtgttgatgccgttgttgttccccgggtccacgatcgagtccccaaacacgatcagcgccggcgatgacgctgcctgcaccaccaccaccggcaccgccgcccacaacaccatcaccaccaatgccgccgccgcgctactgcctcctcccattctcattctatctctacacgctctacgtactgccagcgaattgaatctaagcacagcaccgcgcactctcagtaaaatcctgcagcccg

SEQ ID NO: 18502 - DNA, 426 bp, Oryza sativa
  Clone ID: PAT_MRT4530_24054C.1
atgagactgctgaagagagagagtcgccagagacgaagacgaatcgagacaactgcgcttcttctgttcacatcaggtgcaacaagtaagaaccgtagacccatctgtagaatcaagtcgtagaggaaagaaaccagaaagaacctacccatgtgaagaagagaaggagggatactgaggctaagcccagtcccagtcccaattccaggaatatcttgagatggagaggggtggactgtgacagagaggaggatctggagacagagaggaggctagcgaagaaactcaggtgaagaaaggaaattgggaggtccgatgatggtatggacaccttttccggaccttggatttgaggcgacttcgttcagatgatgagcaaagatttgattggaatacggtggatgatacgaagtagaccagaaaaaa

SEQ ID NO: 18503 - DNA, 883 bp, Oryza sativa
  Clone ID: PAT_MRT4530_24055C.1
actctctcgcgatttccctagtctttcggtgtgcgtgcgcgtgtgaaggcgagcaagcgagcgaaagcgaaagaagcagcaagcagcaagaggaggaggcggaggcggcctcctttgcatgtgaggagagagaggaggtgaggtgaggggggccatgtcgatcgcactggagagtgggcccgggctaggaggaggaggagggggcggcggcgggccccggttcggccgcgtcgcccgctgcgcctacgccgcctcgccgccgccggcgtcggtgggggcgcgcagctcgtcgtcggtggggagggacagcgacagccccgcggcggcggccaagtgggagtgggacggcgaggaggtggagggcggcgacggcgaggtgcagagctcgtacaaggggcccttcgacaccatggacgcgctccaggaggccctccccttcaggaaaggggtatgcaagttctacaatggcaagtctggatcttttgcaaagcttcaagattccgtgatcccatctccacctgagaaaagtcttccaaagccagaaaacccatcccctaggaagcggaaaggtcttcttccgttcagtttcaagtggggcaagccacagaacaaagaggtattccctgaagatgatgtgatcatcagccctacaaattgcaggagaatgacattgtcaccagctgcaacaagcagttcggggagcaacagcggcagtgatgatgaacactaccgctctccgaagctgcatacccgtcagccactccgaaggcccagcaatgccgccatgggtgtctttgcttctccacctgcacctcgtccaccgcaggatgtgacagagtcgaccgccatggtttctcccagggacaagcgaaggaggaactag

SEQ ID NO: 18504 - DNA, 483 bp, Oryza sativa
  Clone ID: PAT_MRT4530_24056C.1
atgaggctgattggcctaaaatcggtcaccaaggtaggggcgttcctctttggaagcaaggaattaggatgcaacgtcatcggcaggccggtcggcggtggggagggggttgcccgggtgagaggtccgtcggccggcgggcgatgcggcagcgacaacgtggctgctgagacacgagagaaggggaaggcgacgggccagcgtcgtggtggagaggcggcagcaggcgtgcgagcgtcgtggcagagagggcggaggcggcggtggcggtggagaggcgatggcggcggatgcgagcgtcgtggcggagaggaggcggcggcggcggctgccacgcgggaggggaggccaaaggcgacggcgtgggcgagcgtggaggcacgcgacggcgaggccgccgctccgcccgtcgcctcttctctctcaggaggcgaggtctggctgccggagccgttccagctgtcggcgcccttgcccagctag

SEQ ID NO: 18505 - DNA, 682 bp, Oryza sativa
  Clone ID: PAT_MRT4530_24057C.1
gtcaatggcgtcaaatatttagggactgtcggagatatgggcctgggggggggggggctcggggtgccatgtcatgcccctcgggccctcgtgctgccttgccccgaggcctcgcccaactgcatgtggcagggggaacgtgcggtgccgcccgactgacgcaccgtcattcggagctccctccacgagaggaggaccaccacaagtcttcacccatttataaggggatgacagggttgtcccccgtgtcaggcggggggcggcgctgggtcgcgctcaaggacgggctgctgcttagcttccgggcgaaggcacggatcgtggcccggacaaggtgaagtgggtccccctcccatgaaaagttaggtagaggcggtgcatgtggtatccccttgagctgtataatctcgtcacccatatgtgacttagtagcattcagggcggatacacgatctctggaggcgagctctttcccccagccgaactcacaaaaaggggatctcacgatttcccgctcactctcctcccccaaatcaggcggcactgcagccctccccgtcgccgtcacccaccgctcgccggagccggcggccgccgccgcggggaaggtggcgatggcgaggagctcggcggcgggagcggggcgcggtggagccggaacggggtgcggttgcggcggcat

SEQ ID NO: 18506 - DNA, 590 bp, Oryza sativa
  Clone ID: PAT_MRT4530_24058C.1
atgccgaggacgcacaggtccggggcgctcgacgtccacaaggcgttcgtccgcgcgtctcagtctggcgggagggcgagggaggaagcagatgtcgcggccggtctttatactctcttcgccgtcgtgcgtccgtccgcgcggagtggggtcgggacgccctgtggccatggcgccataaaatgggctgccgttgcctcccaggctctgcgcggtgaggacgagctgacgtttgctgagcgcggcggcaacggagtggttggggcgaaacgggcagagggcgagtccgtttcgggcactacggcgtgcgtggcagcggcttatttggggttgaaggtggaggctggtggcatgaggcggtgtggaaattatggcgtgagatccactgccgacgacaccaccttcatcttcggactagttcttctcttctggagtcgggcccacctgtcattgccctcgccctaacctccggccgcccacgcccgcgccaaccgccgtcgaaaccaccgcccacgccgccgcgtatcccgctgctcccgcgcccactccgcccgtgccgcacgcccacgtcgccgctcacctcccgctag

SEQ ID NO: 18507 - DNA, 162 bp, Oryza sativa
  Clone ID: PAT_MRT4530_24059C.1
atgaatgacaaaatcgaggacgtacgtggtggcggcgtcagaccacacggtctcgcgcggccaaaccgcgagaccaagcagtctcgctcgctcaccgggcgaaagcgactgttgaaaatgtattgtaatgcacgtttcgtggttcgctacatcatcttggaa

SEQ ID NO: 18508 - DNA, 783 bp, Oryza sativa
  Clone ID: PAT_MRT4530_2405C.1
atgccactggaattttacaaaattaaaaccgtgccactgccgtcacattttccatccattctcttccttttccgtcttcttccttccttctcccatcatcttcccggagtcaagccggagagggagcttgctggcaaggtgaacgaacccaacctagagcgtggcgcggatcctggcgttggtctcctgcaggccgagccacctcccatagctcgctctatcaggcgcgactggcaaatccagcggtgggcacgaccgacgaatccggtggtggcggtgtcggacgatagtggcgtcgggcggaaccggcggaagcctaggctgcgcgtcgagagtgaccggcggcgtgaccctcttcttccccatcgctgctcgacctcggctcccgctttggcctccaggtcggtgagcacctcacgccggccgctgtccctcacggcggtgttctccctgctctcctcgtccgcaggcctctccaaatgcctcctcgccgcctgccgcgagcgccgcaagcggcaggacacctctccaccgtctttaagtcttcgtcgccaccgtcaggcctgctcgcgccatgccgtgccagatccaccgacgcttgctccaccaccgaagctgtcgaagctcgcggcggccatggatggatggacgaccgccggtggcatcgccgctaccgctcccgcgcgagatctcgcgtgcttgggtctcgctgctgactactctgagcttgccagcttggctctcggaagaaatgcgagaaagaaggagccgccactgccgtga

SEQ ID NO: 18509 - DNA, 843 bp, Oryza sativa
  Clone ID: PAT_MRT4530_24060C.1
atggaggagcagtttctcatggtgggattacaggctctggcctgcaggatatggcctaataagggcgatgcagtgttggcttctaccaatttcgccttcctgctcgaacgactcatgatgtgttccttcatgagaggtgagccgatcgtcgatggagtccgtttcttcgtcaagcagaatggttcaggatacgagttcttcgatttgtgtttaccgggtttcggcggtctaactggagatctaccggcggtcagaccggcggcaagcggcgttcagaccggcggcatacgggcggtcagaccggcggcggcgacaggcgcggcaggcgatctcggcggtcagaccggagattcaacaccgcttgggagaggcaaaagagaagacaaagatggtgagaagaccagcaacaacaagcccaactacaacaagtcgaagagttctaaccaagggaggaagacggagaatcttaggaaggcttttcaacaagtttgcgccgctttcgggccactaagtgatgtagatggtgaaagtggagatgatgataagggaaagaacgtctccgatgtttgcttcatggcgcgtggtgaatctgacacagagtatgaagataatgagattttggtggcaaggaaggagaacgtgtggatcgtggattctggttgttcgcggcacatgaccggtgataaaaattggttctcctccctaaagaaggaatccaagactgaatcaattgtctttgatgacgcttctacgagtgccgttgtcgctacaggtttggttaaggtgactcgatgtctcgggagagtatttggggtgatggaccgggagtcggcttggggataa

SEQ ID NO: 18510 - DNA, 1518 bp, Oryza sativa
  Clone ID: PAT_MRT4530_24061C.1
atgaaacctggagaagctttggatgactatctttctaggtttaacaaaattttgagtaatcttagatctgttgattcttcttatgatgctaattatccacaatctgagatttctcgccactttttgaatggtcttgacatgtctatttgggagatgaaagttacatctattcatgagtcagttaacatgtctactttgactttggattcgctttacacaaaattgaaaacacatgagatgaacgttctttctcgtaaagttgatactaagtcgagtgctttggtttcttcttcttcttcttctttggatgttgatgcttcttcatctaagtcttcttttcttgctatttttaatgccacatccgatgatcaactcgaacagatcgaggaggaggatttggctttggttgctaacagaattgctcgagctatgaacaatgccaggtccaggaaaagaggtggtccaaatcgttgctttgaatgtggttcaattgatcatcttcgttcgcattgtcctaagcttgggagaggcaaaagagaagacaaagatggtgagaagaccaacgacaacaagtcgaagggtacatccaaagggaggaagatcaaggagaatctcaagaaggcttttgatcaagtctacgccgtgtttgagccactaagcgatgtggatggtgatagtggagatgaagctaagggaaagaacatctccggtgtttgcttcatagcgcgtggtcgtgttgagtacatggaagacgttgtgaaaaacaatgaagtactttcttgccccaaatgtcgtaaaagtaaaggtgtcttggtagattgtgaaaattgtgctaatttggaaaaagaggtttcttatttgaaaaattctttgctaagattttctgatggtgttggtgctagaagtggtgagattttggttaaacctgatactaacaaaactgtgtttaaatctgctggaaaccagacagaccgcagtaggtcccgcggtcagaccggcgaccggtcagaccggctactgtgcctcggtcagaccggtggtgaagcggcggctttggtggcaaggaaggaaaacgtgtggatcgtggattccggttgttcgcgacacatgactggtgataaaaaatggttcacctctctcaaaaaggcatcaaagactgaatcgattatctttggtgatgcttctactagtgccgttctcgctataggtttggttaagattctttggcttttatctactttgaaagattatggtcttacttttgagaaagtacctctcttttgtgataatactagtgctattaacattgctaagaatcctgttcaacactcacgcacaatgcacatatatattcgctttcactttttgagggatcatgttgagaagggagatgttgaattgcagtttttggacacaaagttgcaacttgctgatattttcactaaacctttggattctaatcgttttgcttttcttcatggtgaattgggaataattcatccttttggcatgttttga

SEQ ID NO: 18511 - DNA, 540 bp, Oryza sativa
  Clone ID: PAT_MRT4530_24062C.1
gatccacaaaacggtgtcgattgcttcaacctgaattgcgctggtttcgtgcaaatttcgaatgagtatgcatttggggcagccctagcccctttgtcagagtatggggacgtgcagtatgagacccatctcactatttacaaggatatgctttctaacagatggtgtgccatgtacggggacaccatgctggggtactggcccttagaggctttccctgcctttgacaagggcgaggaagctttctggggtggccaagtgtgcaacatgcatgagggccaggaatacacaacaacgggaatggggagcggatatcacccaatagaaggtatggggaaaagcgcatatatacatgggattcaggtcatgcagattgacaaatcttggcagaggccaaccaggacgtttggtaacatgagcaaccagccctgctatggtgtcgagccctatgaatccaaggatggggcgctctccatcttcttcggtggtaccgccaatatggcttgttgtggcctcgcttgccagagcccagggaaatga

SEQ ID NO: 18512 - DNA, 1359 bp, Oryza sativa
  Clone ID: PAT_MRT4530_24063C.1
atgggatgtggaggcggccccggcggcgctgggatgggaggcggcagcagcgctgggacaccgaagccgccgcggctgcagcatgggatgctgtggcagatgccagccatatccccaccgcctctcccattttgcagttccgccacgaccaccaccgacaaaggtgacgcaggtagcgtggatcccgacgccgccgggaggggaccgggttgtcccgcgtcccgccctgccgccacctccgcgtgccgcaccgccgtcgcctccgcgtcccgcgcaccggtggtcgaagcctaccgcggtggcctccgctctcctctcctcgctcctcctcgccgccattaccgtgcccaccacaacaaccaccctccagtcctcactgcctcgctcgctggtgtcctcctcctcctcgctgccaccgcggccaccacagacgccgcctccccacccaagagccgctcgtccactacaccgccgcatcccacgccgccgccgccgcctcccatcccacgctgcagccgccgccactgcctccgcatcccacgccgcagccgccgcctgccgtgcttgccgagtgattcgatgtctctggagagtatttgcggtgatggaccgggagtcggcttggggataagacgacgtccgtggtggtcagagatcatgcgggatactaaggctagagttgataccggctacagatcctcggtcagaccgaacatcggtcagaccggcggtacagtggcggtcacaccggcccctggtcagaccggctactataccttggctttggtggcaaggaaggagaacgtatggatcgtggattccggttgttcgcggcacatgaccggtgataaaaattggttctcttccctcaaaaaggcatctaagactgaatctattatctttggtgatgcttctacaagtaccgttgtcgctacaggtttggtaaagataaatgaaaattttgaattgaagaatgtagctttggttgaggatttaaagtacaatttgctttcggttttacaaattgttgatgaagagtttgaagttcactttaagaaaactggaagtaaagtttttgattctcgtggtgattctgtgctgaatatttctcgttatggaagagtgtttaaagctgattttgaaaatcctgtttcacctggggaggatggtcgtatttttcaagatgagagcgactacgacgacgacgacgaggtcggctcggccggtcagactgggcgccaggccggtcagaccgccggcacacctccggttagaccggcgcaggacaacgtgactcaacttcagaagtcactgctcctttgcacattcaacgacgacatccgccggaacaaatcattg

SEQ ID NO: 18513 - DNA, 3060 bp, Oryza sativa
  Clone ID: PAT_MRT4530_24064C.1
atggccgagaaagcagcgccaccaagcacaggctccgttaaaggcagagcgccaaagccagggttgaccgacatcattgatgacaatgtcctgccggttgatcccgacaagttcacacctgatcagaagcaggagttcgaagcaatgatgcaacaagcgcgagatcagtatctgagctcattcatgcaaactcggaagggaacgcgggttcaaaagtacaagatgaagctagtcgccgatatccctggaaccggttcttctaaagatggagaagtgaaacaagatccagatggctcggcccagcagatcatcaaaggtgctaccagtggttatgcaggaaatcaaggcgataaccttccagagatgcatggagctccaagtcatattgcccaaggactacacggaggaaatttcagtcaagatattcaggagtctttcaacaactttcaggatcgggttgactacgcggtgcaccatgctttgatcaatcaatccgggatattagtcaacacactgtcaaacatgatgaagacgatagacgatggctcgatagctgagcatcaggctacaggcctggtctacttgccaggaggacaagagggcgtgtcaacttatgagcacatcagccgatatcttgctcagtgtggagaagcatcggctgtggacgccttgagagttaggatgttccgattatctttgtccggatcagcttttacctggttctcatctttgccatatgggtcggtcaatagttgggccgatttagagaagcagttccacagctatttctacagcggggtccacgaaatgaagttgtccgatttaacagcaatcaaacagcggtatgatgagcctgtacacgagtatattcagaggttcagagagatgaggaacaagtgctttagctcaagtttgaccgatgcccagttagccgatttggctttccagggtatgatccctccaatcagggagaagttctcatccgaagacttcgatagcctatcacatttgatacaaaaggtaaccttgcatgagtataggttggctgatgtcaggaggagctctaaaaaggttaatcacgtttgcccgtatatgtatggatcggacgatgaagatgatgactctgagatagctgcagccgagttggtaaggagcaaaacggttataccgtgtcaatgggtgaaaagtcctggaaaggagcaaaagtatgattttgatatcacaaaagccgacaagattttcgatttgctgctccgagaaaagcatatcaagcttcctgccagtcatacgatcccatcggctgaagaattaggcaagaagagatactgcaagtggcataattctggatctcattctaccaacgattgcaaggtttttagacagcaaatccaagttgctatcgaagggggaaagattaagtttgacaattccaagaagccgatgaaggtcgatgggaatccttttccggtcaatatggtgcatacagcaacggggagacgttatgaggagaacgacaatggttttgatcctcattgggattgcgagttcttcagattctgctggaacgaaggaatgagacaagactccctgttcatcaaaggttgggttcgatgggtcaagatcatggtcgagaagacgagccgaccaggaagaatcaatggtgtccttctggtgtggcgcgttaagagtcaagctcctgcagccgatgatgctacagccgatgaagcaaagaggttggcaaaaggaaagagcgttgttacagcaccaatcaacatggtctttacgctgccagccgaatttggaattagtcaggccgatgtcgatgaagtggaagaagaatcggccaagctagtcctatcatcggagcaggcagtatttgagaagcctgagggaacggagaatcggcatcttaagccattgtatgtaaatggctacgtcaatgggaagccgatgtctaaaatgatggtcgatggtggggctgcggtgaatttgatgccttatgctacgttcaggcagctgggtaggaacgccgaggatctcatgaagacaaatatggtactcaaagattttggcggtaatccatcagagaccaaaggtgttttaaatgtggaactgacagtcggcagcaagactattcctaccacgtttttcgtcattgatgggaaggggtcatatagtttattgcttggaagagattggattcatgccaattgttgtatcccttcaactatgcatcagtgcttgattcagtggcaaggtgacaagatagaggttgtgccagctgacagccaattgaagatggagaacccaagctattactttgagggcgttgtggagggttcagatgcctgcgctaaggatacagtagatgatctcgatgataagcagggtcaaggttttatgtcggccgatgatttggaagaaattgatataggtccagccgatcgatcgtcgaacatcggctacctatcaaaccaggagttagaccacgtcagcaacctccaaggagatgagctggaagggaaggagcgagttgtgttctatcttagtcgacggctcttggatgctgagactcggtattctcctgtggagaaccagttggcaggcgaatatgaatgcaagaatgatacattgctggtttataatgagaagtgcctagagctaatgaaagagtttcggctggttactttgaagcatgtatctcgagaccaaaatcttgaaggtaatgatttggctcaaggggcatcggggtataagccgatgatcaaggatgtgaaggttgagattacagcaatatcagccgatgattggaggtacgatgtgcatcagtatttgagcaatccttctcgattggcttctaggaaattacgatataaggcgttgaagtatacattgctggatgacgagctctattatcggacgattgatggggaacggctggttgttcttcttcctcgacatgatgacttcctgcggctgaaggggtctggtcacttgatgattgttgagccgagggagaaggaggaggtgaaggctgaaaagaaagcaagcgttaagtag

SEQ ID NO: 18514 - DNA, 354 bp, Oryza sativa
  Clone ID: PAT_MRT4530_24065C.1
atggagcgaggaggaagaacggagggaggcatcaccgaggtgaggaggggcgctgtgacgagaggccgacggcgcgggagtaatctctccggcctcgggccgggaaagaggaaggagagggcgcggccaaagtccccttccgcgtccttgctcgtgccagctcctccgacacgcacaacgatgaacggcgacggcgaaacagagggcggcaatggcgcggaggcggcaagcgaaacaggagggggaatcgatgggagggcgccttggtttataggacgacgatgtcggtttggaaaccgaccttgggcggtcaaggcgcgagctggcactcggcgctcgcggccaagacggtga

SEQ ID NO: 18515 - DNA, 2421 bp, Oryza sativa
  Clone ID: PAT_MRT4530_24066C.1
atgcaagctttggatgactatctttctaggtttaacaaaattttgagtgatcttagatttgttgattcttcttatgatgctaattatccacaatttgagatttctcgccactttttgaatggtcttgatatgtctatttgggagatgaaagttacatctgttcaagagtccgttaatatgtctactttgactttagattcgctttacacaaaactgaaaacacatgagatgaacattctttctcgtagagttgattctaagtcgagtgctttggtttcttcttcttcttctttggatgttgatgcttcttcatcaaagtcttctattcttgctttatttaatgccacatccgatgatcaactcgaacagttcaaggaggaggatttggctttggttgctaacagaattgctcgagctatgaacaatgtcaggttcaggaagagaggtggtccaaatcattgctttgaatgtggtttgattgatcatcttcgttcgcattgtcctaagcttgggagaggcaaaagggaagacaatgatagagagaagaacaatgacaacaagccgaagggtacattcaaaggaaggaagatcaaggagaatctcaagaaggcttttgatcaagtctacgccgcgtttgagccactaagcgacgtagatggtgatagtggagatgaagataagggaaagaacatctccgttgtttgcttcatggcacgtggtgaatcatattcagagtgtgaagacaatgagaagttaaaacaaccacatgatgttttagattgctcaacatgtactttgtataagaagaaactaaaagttgctttaggtcgtgttgagtacatggaagatgttgtgaaaaacaatgaagtgctttcttgctctaagtgtcgtaaaaacaaaggtgttatggtagattgtgaaaattgtgctaatttggaaaaagaggttttgtatttgaaaaattctttgcaaagattttctgagggtgttggtgctagaggtggtgagattttggttaaacctgatactaataaaactgtatttaaatctgtgggtatcatgtctacattgagtgcatcttctttaaaatccaatgttatgcatgcaaaacctcctgttgttgcttgtgttgctaagtcttctgattctactaatgtgtctaataatcgtgaaaaatatgcttgttctttttgtggcaaatatggatatattgatggtttttgtttcagattagctcataaacagaaaaaggagagagaggttgcttttgcaaaatcaaagtggcaaaaatctaggtttccttcgaggaaatcggttagaccgcagtggttcccgcggtcagaccggcgaccggtcagaccggctgcagagcctcggtcagaccggacaccagtcagactggcagtgaagcggcggtcagaccggcccccggctttgatggcgcggaaggagaacatgtggatcgtggatttcggttgttcgcggcacatgaccggtaataaaaattggttctcctccctaacaaaggcatccaagactgaatcgattatctttggtgatgtttttacaagtgtcgttctcgctacaggtttggttaaggtaaatgagaaatttgaattgaagaatgtagctttggttgaggacttaaagtacaatttgctttcagtttcacaaattgttgatgaagattttgaggttcactttaagaaaactggaagtaaagttttcgattcttgtggtgattctgtgttgaatatttctcgctatggaagagtgtttaaagctgattttgataattctgtttcacctgtgataacatgtttggttgctaaatttgataaaaatgtgatgttttggcatcgtagacttggacatgttggttttgatcatctcactaggttaagtggtttggatcttgctcgtggtttgcctaaacttaagaaagattttgattcgctattacacatagacacggttggtccagctagagtgcaatctattggaggaaagtggtatgtgttggttattgttgataatttttctcgatattcttgggttttctttatggcaactaaggacgaagcgtttcaacactttcgtggtttgtttcttcgattggatcttgaatttcctggttctttgaaaagaattcgaagtgataatggtggtgagcttaaaattgcttcttttgaacaattttgcaacaaaagaggtcttgaacatgaattttcttctcctcgtgttccgcaacaaaatggtgttgttgaaaggaaaattcgtgttttggttgagatggctagaacgatgttgggtacattgtcacaggttcagggggaggatggtcgtatttttgaagacgagagcgacgacgacaacgacgaggtcggctcggccgatcagaccaggcgccaggccggttag

SEQ ID NO: 18516 - DNA, 543 bp, Oryza sativa
  Clone ID: PAT_MRT4530_24067C.1
atggaggagtttggtgattggagtttgggagaggacaggcttgggagaggcaaaagagaagacaaagatggtgagaagaccaacaacaacaagcccaacaactacaagtcgaaggatggtgaaagtggagatgatgataagggaaagaaagtctctgatgtttgcttcatggcgcgtggtgaatctgacacagagtatgaagataatgagaccgcagtgggtcccgcggtcaaaccggcgaccggtcagaccggcgaccggtcagaccggctgaacagcctcggtcagaccggcggtacagaggcgtactggattcctaaatttttattatcatctaaccccagtactgaggcttcgacatctgcttgtgtgtcgactttggtggcaaggaaggagaacgtgtggatcgtggattccggttgttcgcggcacatgaccggtgataaaaattggttctcctccctcaaaaaggcatccaagactgaatcaattgtctttgctgatgcttctactagtgccgttgtcgctacatgtttggttaag

SEQ ID NO: 18517 - DNA, 1694 bp, Oryza sativa
  Clone ID: PAT_MRT4530_24068C.1
tttttttttttttttttacgacaagagaatttaattatatttctccactgtccctgccttatcataattaagtacagattaatcggataaaccagtccacgagggatggtgtgataatttcttccactaacatttaactgcatcactgatttaatcatacggaggttgctgatgatctgacgacgactgatcgatcgatggtagtacgaaaattttcatctctgcacatccatttcagggcctaattaacaaacggcaacacaatgcaactatatgcaatgcaagcttcgtcaggctccggggactgggactttggccttcgacgacggcgtcttcgtcctcgccgcctccgccgccggcggcgccggtggcgtccagttctccaccctgaacgccgacgtcgagttggccttcgccgtcgtcgtcgtcgccgcggcggcgccggagcggtgctggccatggctgccgctgtaggagtcctccatagggtcgccgctggagatggtgaagccgatggccggcggcggcggcggcaccgtcgtgatctcgatgacgggcttcttggtggcgttctggtccagctggtagctcggcaggaagcttcctaccacaacctgaacagggcttgcagccacaaggaggccggcaactccgcctccgatgacacggccatccgtggccgccaacgagacgctcattccaccggagcggcttctcgttccaccgctatcagttggcgtgaatgatccggataaggagagcagctcaaaccggccctcataagtcactgtaccacctaaagtatcttgctgacgcaatgtaacatttgaaatcaccccattagcagacagaatgcaaattgcccttggaccttgttgggagaaagatatgaccttcatattaacatcctcgccagcagcaacgttaatgatatgaggtgtgaagtttgcaccagaagcacatgctaccaattcacctagcggcccgagcggcgtctgggtgtgggtggccggagacgagacgaccaccgcggcggtggacgtggcggccgtcacggccacggacaccggcgacgcgcggctgacgaacccgacggggcggcccctgccgcgcttcatgacggcccccaccgccgccgccggcgtgtactgccccccgccggagtcgtccggcaccgacgccgagatcggggtcgccttcagcggccggagcaggctcccgtccggcccgtacttcctcggcctccccctcttcctcttcccgttccctctccccgccgccgcacctgccacggcgactggaaccaccggcgctggcggctgataggttgccgccgccgccgccgccactgccaccggcgtcgccgccgactccgcctccgcctccgcctccgcctccggctgcgcagcggcagccgcagccggcgaagtcgccgtggtctccgtcgcgggctccatgacaacaactcctatctcttcccttctcggcccgtgaccatcagagatcactctgcttcctaattcttcttcttcccgcgagtgcgatcaagatcaaccaacccaggaaatccgaattcgaacccgagctcgagccaccgcaccagaattctaacctggagtgcgaactcagagaccaccgcagaagttctccggcgaggaactccaagaacaggggagggagaaggagaaacgaaa

SEQ ID NO: 18518 - DNA, 333 bp, Oryza sativa
  Clone ID: PAT_MRT4530_24069C.1
atggcaacgggttgggtcgggcacgggcagagcgaaaccatgcccgacccgagatccacgtgccagtgcccgacccacgcccgcaaagcctatcgggcaaaaccccatacccgtgtccatgcccgacgggtactcatcggcggccatcgggcttgcttgccgtgcgccgccgtgtcgccaaccaccgccacgccggcagccgccgccgtgcacaatcgtgtcgccggcctccgctcgtgccgtcgtgtcgccaaccaccgcccctgccgtgcgccgacacgccaccggccgccgcttgtgcgccgccgcttcgctggcctccacccgcgctaa

SEQ ID NO: 18519 - DNA, 528 bp, Oryza sativa
  Clone ID: PAT_MRT4530_2406C.1
atgcctagatgcttcacgcggcgatccgatagcctaccgaccgagctgctcggcgtcatctttgagctactcggcgtcatcttcgagcacgccacccaccaccccaccgtcccttggtgcgtctgcgacacacgcctgtgcggcacccacaacgacacctgggttgctgtcaccgtggacttgtggcaaggatttgcggccgtcaacctctttactagcatgagggtcgtgaatgcagacttggatgaggtccttctcctcatcctagtatcttacattctcttcctcacatcctccatcttctccttcccctcctcctcctcctcctcctccccttcccccctccctctaccctctccctcgtggccggaggcggtggcggcgcccggcgcggcgggcggtgacgcgaccgtcgcggagggcggcggcgcccggcgccagagcgaccatcgtgaagggtggcagcaggcggctggccgcgcggagggcggcggcaagcggcatgcggcagcgcctggatggctgtga

SEQ ID NO: 18520 - DNA, 372 bp, Oryza sativa
  Clone ID: PAT_MRT4530_24070C.1
atggagaaatgcaagccaatttcaacaccaattggttctacagctgtgttggatcctgatgaagatggtgaagctgttgatcaaaaggagtatagaagtatgattggaactttgttgtatctaactgcttctaggccagacatacaatttgttgtatgtttgtgtgcgcgctttcaagcttctcctcgtgcttcacatcgtcaaccggtcaagcaaataatgagggatcatgttgagaagggagatgtcgaattgcagtttttggacacaaagttgcaacttgctgacattttcactaaacctttagattataatcgttttgcttttcttcgtagtgaattgggcataattcatccttttggcatggtttga

SEQ ID NO: 18521 - DNA, 2343 bp, Oryza sativa
  Clone ID: PAT_MRT4530_24071C.1
atggctactcccgctcgtttttcaactaagcctcatgttttcgatggaacggatttttctcattggtgtagtaggatgcaatcttacattatggctgaagattatgatatttggagaaaagtttcccatgcttatgtgattcctgaagctattaatactgctgctgaaaaaactgcttttgaacaaaattgcaaagctcgcaacattcttttgagtggtatttctcgttctgattatgatcgtgttgcgcatcttcaaactgctcatgagatttgggttgctttaagtaattttcatcaaggaacaaataacattaaagagcttcgtcgagatcttttcaaaaaggagtacattaaatttgagatgaaacctggagaagctttggatgactatctctctaggtttaataaaattttgagtgatcttaaatatgttgattcttcttatgatactaattatcctcaatctgagatctctcgccactttttgaatggaacaggaaaagaggtggtccaaataggagctttgaatgtggttctattgatcatcttcgttcgcattgtcctaagcttgggagaggcaaaagagaagacaaagatgttaaaacaaccttatggtgttttggattgctcaacatgtgatttgaataagatgaaactaaaagatgctttaggtcgtgttaagtacatggaagatgttgtgaaaaacaatgaagtgctttcttgccccaaatgtcgtaaaagcaaaggtgtcatggtagattgtgaaaattgtgctaatttggaaaaagaggtttcttatttgaaaaattcttttcaaagattttctgatggtaaaaagaacctcaacatgattttggatcaatctaaggctttggtggcaaggaaggagaacgtatggatcgtggattccggttgttcgcggcacatgaccggtgataaaaattggttctcttccctcaaaaaggcatctaagactgaatctattatctttggtgatgcttctacaagtaccgttgtcgctacagtgtttaaagctgattttgaaaatcctgtttcacctgtgataacatgtttggttgctaagtttgataaagatgtgatgttttggcatcgtagacttggacatgttggttttgatcatctcactaggttaagtggtttggatcttgttcgtggtttgcctaaacttaagaaagatcttgaattggtttgtacaccgtgtcgtcatgctaaggtagtttctacttcacatgctcctattgtttctgtgatgacggatgcactgggacagctattacacatggacactgttggtccagctagagtgcaccgttggaggaaagtggaggaagtttatgtcaaacaaccaccaggttttgaaaatcctgattttcccaaccatgtttttaaattgtctaaagctttgtatggtttgaaacaagctcctagggcatggtatgataggcttaagaacttttttcttgcgaaaggttttacaatgggaaaggttgacaaaacgctttttgttcttaagcatggtgataatcaactgttcgttcagatttatgtggatgatatcatctttggttgttcaactcacgctttggttgtagattttgctgagactatgcgcagggaatttgagatgagcatgatgggtgagttatcgtacttcttgggattgcaaattaagcaaacacctcaaggtacttttgtgcatcaaacgaagtatacgaaggatcttttgagacggttcaagatggagaattgcaagccaatttcaacaccaattggttctacagctgtgttggatcctgatgaagatggtgaaactgttgatcaaaaggaatatagaacttctcctggtgcttcatatcgtcaagcagtcaagcgaataatgagaattgataggaaaagtactagtggaacatgtcattttcttggtacatcattaattgcatggtcttcaaggaaacaatctagtgttgctcaatcaactactgaatctgaatatgttgctgctgctagttcttgttcacagattttttggcttttatctactttgaaagattatggtcttacttttgaaaaagtacctctcttttgtgataatacaagtgctattaatattgctaagaatcatgttcaacactcacgcacaaagcacattgatattcgctttcactttctgcgggatcatgttgagaagggagatgttgaattgcagtttttggacacaaagttgcaaattgctgatatttttactaagcctttggattctaatcactttgcttttcttcgtggtgaattgggcataattcatccttttggcatggtttga

SEQ ID NO: 18522 - DNA, 3003 bp, Oryza sativa
  Clone ID: PAT_MRT4530_24072C.1
atggctctccctcccttaccctttgcactagcagcagcattgctgctcacaataatctccggccatctcgccgcgccggcgacggcggacggctacgtcggcggcctagcaatctactggggccgtcacgccgacgccgacgaaggcaccctccgccaggcctgcgacaccggccgctacaccaccgtaatcatcacattctacaacgtcttcggctaccaccccggcaactacaacctcgacatctccggccatgacgtcaccgccgtcggcgccgacatcatccactgccagaaatcaagaaacgtcacgatcctcctcgccatcggcggctacggcggcggatactcgctccccacctcccaatccgccgccgatgtcgccgacaacctctggaacgctttcctcgccggccgccgcgccggcgtgtcgcgtccgtttggccacgaggccgccgttgacggcgttgacttcttcatcgaccagggcggcgccgatcactacgacgaactcgctcgccgcctccacggctacggcgccggcgtgatctggacggcgacgacgaggtgctcgtacccggatcatcggctggagaaggcgctggcgacgaaggtgtttgatcggattcatgtgaggatgtacggcgccggcgagatcgagcggcggtgcgtgatatcgtcgaggtattcgtgggagaaatgggcggcggcgtatccgggaagcaaggtgtatatagggttggtggcgtcgccggagcaggacgaggcgtgggtttttcagaaggatctttattatgaatatctgcagtttgttaccaagctgcctaactatggtggtttggctgtctatgataggtactatgataagaaggctaattacactgactcaggcacaccaacagactcagcatcaccaagtgtcccagtggagctgcccctcatagaacgccatgaggtctccagctgcaaactctcccttataccttctgccacctccgtcatctttggccgatcacgccctgcacgcctagtgcagagcgagatcggccaccttccatacagagttgagatcataatctgctcttatcctcgggtcagtgacgccctcgatgtctccttctgcgagcctctcatgcacccacagcaggatgttctttttttccgtgtcgctgatggggatgattgctggctgagctgtgatgagcaccaagagaacgacttcaaagctgacatgcatactcaggatccaagtatccaggagtacccgcttcgtgcgtcgccgccgctccggttgtcgtcgtcgctcgggaaggccgccatcgggttcgccaagtcgtcgctgtcctcgtcccatccttcgtttccgccgaggaccaccggagcatcgccgtcgtcgtcgacccgaacgtctccgccgcttcgacctcaccgccgtcgccgtcttttgccgtccgccgtcgtccgagccttcggtgagttcgccgcgtcgcccactacccgctggtgccctccgtttgcgccgccgcgccgtcgttcgccggcgagcacgaggtgccgagtcgccgccggtgatgacgtcatcgtcgacgtcagcgccatgtcagccgtagaccgcggagaagactttgaagagttccaaggcgcggcagggatttcagggcggtccaaccgagagatctacaccggtcaaaccggcggctatgctttggtcagaccggctaatctactccggatgcaatcttacattatggctgaagattatgatatttggagaaaagtttctcatgcttatgtgattcctgaagccattaatactgctgctgaaaaaactgcttttgaacaaaattgcaaagctcgcaatattcttttgagtggtatttctcgtttggattatgatcgtgttgctcatcttctaactgctcatgagatttgggttgctttgagtaattttcatcaaggaacaaataacattaaagagcttcgtcgagatcttttaaaaaaggagtacattaaatttgagatgaaacttggagaagctttggatgactatctttctagcaacaacaagcccaacaacaacaagccgcagggttcatctcaagcgaggaagttcaaggagaatcttaggagggcttttgatcaagtctatgcctcatttgagccatcaagtgatgtagatggtgagagtggagatgatgataagggaaagaacatctccggtgtttgcttcatggtgcgtggtgaatcagacattgagtatgaagatcatgagggcaaccctgctgcgtgctctgatctgatcaatcacccatacatccagaagcctatatcaatagatacacaatcacacgccgtcgccggcgtcgggcgctgcacagcacgcaagcctgagccggcgatgaaccttaaaccacacgctttggtagcaaggaaggagaacgtgtggatcgtggattccggttgtttgcggcacatgaccggtgataaaaattggttctcctccctcaaaaaggcatccaagactgaatcaattatctttggtgatgcttctacgagtgctgttctcgctacagttttggttaaggtaaatgaaaaatttgaattgaagaatgtagctttggttgaggacttaaagtacaatttgctttcggtttcacaaattgttgatgaagagtttgaggttcactttaagaaaactggaagtaaagtttttgattctcgtggtgattctgtgttgaatatttctcgctatggaagagtgtttaaagctaattttgaaaatcctgtttcacctgtgataacatgtttggttgctaagtttgataaagatggggaggatggtcgtatttttgaagatgagagcgactacgacgacgatgacgaggtcggctcggccggtcagaccgggcgccaggccggtcagaccgggcgccagcacacctccggtcagaccggctcaggaggagcggtcagaccggccaggttcgtcgggttcaggtactga

SEQ ID NO: 18523 - DNA, 2162 bp, Oryza sativa
  Clone ID: PAT_MRT4530_24073C.1
aatgctttgagtaactttcatcaaggaacaaataacattaaagaacttcgtcgtgatattttcaaaaaggagtatattaaatttgagatgaaacctagagaagctttggatgactatctttctaggtttaataaaatttttagtgatcttagatctgttgattcttctcatgatgctaattatccacaatctgagatttctcgtcattttttgaatggtcttaatatgtctatttgggagatgaaagttacatctattcaggagtctgttgacatgtctactttgactttggattcactttatacaaaattgaaaacacatgagatgaatgttccttctcggaaagttgattttaagtcaagtgctttggtttcttcttcttcttctttggatgttgatgcctcttcatctaagccttcttttcttgctgtttttaatgccacatccgataatcaactcgaacaaatcgaggaggaggatttggcttttgttgctaacagaattgctcgagctatgaataatgccaagaataggaaaagaggtggtccaaatcgttgctttgaatgtggttcaattgatcatcttcgttcgcattgtcctaagcttgggagaggcaaaagagaagacaaagatggtgagaagaccaacaacaacaagccaaagggttcatcccaagggaggaagctggagaatctcaggaaggcttttcaacaagtttgcgccgccttcgagccactaagtgatgtagatggtgaaagtggagatgatgataagagaaagaacatctccgatgtttgcttcatggcacgtgttgaatctgacacagaattaaaatatcttattcctaatgatgatgattgctcaaattgtgaggttttaatgaatgagatttcaaaaattagagatgttaatgctgcacatgatttaaatctgctggctttggtgtcaaggaaggagaacgtgtggatcgtggattctggttgttcgtggcacatgaccggtgataaaaattggttctcctcactcaaaaaggcatccaagactgaatcgattatttttggtgatgcttctgcaagtgccgttctcgctacaggtttggttaagtttgataaagatgagatgttttggcatcgtagacttggatatgttggttttgatcatctcactaggttaagtggtttggatcttgttcgtggtttgcctaaacttaagaaagatcttgatttggtttgtacaccgtgtcgtcatgctaagatggtttcttcttcacatgctcctattgtttctgtgatgacggatgcaccgggacagctattacacatggacactgttggtccagctagagtgcaatctgttggaggaaagtggtatgtgttggttattgttgacgatttttctcgatattcttgggttttctttatggcaactaaggacgaagtttttcaacactttcgtggtttgtttctgcaattggatcttgaatttcctggttctttgaaaagaattcgaagtgataatggtgttttcttgagatctaaacttggaaaaacttcttatgaacttcgatttggacatcaacccaaagtttcacatttgcgtgtttttggttgtacactatcacaggttcagggggaggatggtcgtatttttgaagacgagagcgacgacaacgacgacgacgagactacaacttcgaccagtactgatacagaacgtggatcaacttcaaaagtcgctgctcctttgcacattcaacgacgacatccgccggaacaaattattggtaatatagattttgctgagactatgcgcagggaatttgagatgagcatgatgggtgagttatcgtactttttgggattgcaaattaagcaaatacctcaaggtacttttgtgcatcaaacgaagtatacgaaggatcttttgagacggttcaagatggagaattgtaagccaatttcaacaccaattggttctacagctgtgttggatcctgatgaagatggtgaagctgttgatcaaaaagagtatagaagtatgattggatctttgttgtatctaactgcttctaggccagacatacaatttgctgtgtgtttgtgtgcacgctttcaagcttctcctcgtgcttcacatcgtcaagcggtcaagcgaataatgag

SEQ ID NO: 18524 - DNA, 1737 bp, Oryza sativa
  Clone ID: PAT_MRT4530_24074C.1
atggcgagcttcctggtggcgtgggggctcgccacacggcagcctctcttcgtcaccgtgccactcggtttgcgtcgagttcgatctcgcacgggaagacggagttacaaggcgtcggcgccgcccaagaagaacggcgcgggagacgacgtggacggcatttttgttacaggatgccatgctgttgcttattccggtaaacaacaagacctgttcaagctgtgctctgctggccatctatggcaagctcatgatctgtgtcaagtacgaatgtacaatccgcaaataattatcgagctggccctaaaacaatgtccagtttgtgcttcttttttgaacggcaacaactccaccattgcgatggaagtgccggagatcgcagtcgaagtggcgccggagatcatcatcgccgtcgaaatgccggaggcgatcaacaccaccattgtgcggctccccatgtacatgcaggaggcgaacaagggcctgttcaagccaagggtggtctctatcgggccataccactacggtcaggggagcaccctcgacatggaaactcacaaggaccgatttcaccatgctttcttccagcggttaggcaaccatgtcaaccatcaagacttgatcgctcagtgcactgaaggtgcaatgcagtgctacaacggcaatgttgacttcaggctctacaccctggagaagctcatgcacgacgggtgcttcattcttgagctcctcatccagtgggaagagggagagcatgcccatgtcgatgatcacatgcgattgatgtccaacagcatatactacgacctcctcatagtcgataaccaggtacctttcttcgttctcgctaggctgtttgaagaattcaggaggtacaacggtgaacatcctatcgtcctagtaaataccccgttggttaacctcatcagcaatttcttcaactatgatggccagttttcctgggttcattcaaacctgctgaatgaggatctccctaatgcaaaccatcgccatttgcttgagattcaatacaaccttgtcatccgcagaaacaataatagaaataacaatgatgagcagatgcattattatagttgcctgtgtggtttgtgcagcagaaacatttgccataaatcacctatgccgctaggaatccctggggcaaacgagctgcaagactacggcgttaaattccatcagaaagagaatcaccggatcaccgacatattcgacgtgacattctcgcataaaacgatgagcatccctcagttcaagatcaacttcggctccaagatcctactggcaaatctcttcgcctacgaccaaatcgctggccaacaagggagaaataataacggcgtcgtcgtaggtcccgtaacgagctacgtcgcgctcatgaacgcgctgatcaacacgaagaaagacgtgatggttctacagcgggagggcatcctggacaacctgctgtcgaacgaggaagaggtggcctccttcttcaacaggctcggcagatgcgccttggtggatgtcagcaaccaccgttacactggcatgttcgaagatgtcaacaggtactggaggtacggatgttgctgcaagcattttgtcacctttcgcatgaagcattgcaggaacccgtggacttgcctctcgctgatgggtgctattttgctcttgtttatctcattgatctccatgatctacaccatcctccaatactacaaccgtcggcagtag

SEQ ID NO: 18525 - DNA, 243 bp, Oryza sativa
  Clone ID: PAT_MRT4530_24075C.1
gcccttgttgatttggcggtgcttatataggggttggtcttgccctctacaggccctcctccacgtccaactcgggatagaagccaaaggaaacccgaaacatgccttcccgagcaaggaaacctcgagacccgacgaaacagaatcggactcggtcctgccagttagaccggccacacaccgccggtctgaccggccctcaaccggcggtctgaccgcccaacacacagcggtcagaccggc

SEQ ID NO: 18526 - DNA, 268 bp, Oryza sativa
  Clone ID: PAT_MRT4530_24076C.1
cacggaagtaggcactgccccgctcaaaggaacattttttttttaagataaccggcatctacacccaaaggatgagcacagctcaaaggaacatgcatgaaaataaatatagaatatataatgatccgacctgcctaaggtaattgcgatctaaaatcctatagaaccaggagagctgagcatagagatcacctgattaaagtaagcgcattaagcagaagcaattactcacacccaaagttgccattcaaagggaagaaggaaattt

SEQ ID NO: 18527 - DNA, 204 bp, Oryza sativa
  Clone ID: PAT_MRT4530_24077C.1
atggaggtgctgtcggcgttgctagatccaccaagcggcaacggcaggcgggcaggggaagagggaagagtggaggcggcagccgaaggaaagggcccggtcgtcagcggggagcgctggctgccggagcttgagatgatctggagcgccggcggtggagcggagcggcgctggatcgcgattgtgatagggatgaacggttaa

SEQ ID NO: 18528 - DNA, 630 bp, Oryza sativa
  Clone ID: PAT_MRT4530_24078C.1
ttctcaaattcagccataacagcctcctcatcctcagcagatagctgctcacccagagcagcatttatctcatcttggtaagccttggcctcagctgtgtcgtccatcaacttttggacatcatcaatatttatctcattctggatagacttaagagcagcatttccagcttttaggctgtcaaatacagccttctgtttacttgctagttcaatgtctgccagctgttgttcgacattcatttgccatgtgtcaacttgtttcagcagctcttcctgtgctttcttcttcttcagtgcaatcaaagctctgtctttcttcttttgttgaactagctgccgtgcagcttccttttctgcttcaatcaccttctcaagctgctgctggaactgcgcaagcttccggcgctgcgtcttgagggtgaggatggccctgtccacgtccgtcaccttgggcttcttcacgaagatgttccccatggccgcgtgctgccggacgcgtgggcggacgctcttcttccttccgacgcggcggcggcggagatggccggagaggggaggtggaaggggagggggaaaggtggactctcgaggtcgaggaggagacgggcacggtaaccgtaaagctggg

SEQ ID NO: 18529 - DNA, 1422 bp, Oryza sativa
  Clone ID: PAT_MRT4530_24079C.1
atgaggatagcgagttcgagtgggatactgatggatgctaatgggaaggccaatggatcagcaccatcagctttggttgcttactttttgggaatgggtttctcgagagagatggtcttcagagctatcaaggagattggggacacagattcggagcaaattcttgagttacttctcacttatcaggcgataggcagtgacccttcagtgggtaacagctctcattctgcctgtgacccccagattcttgaagaagaagatgaggaggaggatgttaattgggacgaggatgatactgttgacaattttgatagggctacttactctgatggttctggtgatgaggactttttacaagagatgtccgagaaagatgagaaaatcaagtccttagtcagcatgggttttcctgaagatgaagatacagagtttagttcctttggaggaagaaagaaaacaaaattaatagatggaagcaagaaaaaaagagaacggtatagaagtagaccacaatggaatcaagtgccatttgacggcagccatgaagagccaatgcctcttccaaattcaatggtgggattcagcttgcccaatgacgggttaaggtcagtccacagaaaccttcctgaccaggctcttggaccaccattcttttactatgaaaacgtggccctagctccaaaaggtgtatggacgaccatctcaagattcttgtatgacatttatcctgagttcgtatattccaaatacttctgtgctgctgctaggaagaggggttacatccataacttgccgattaagaacaggaattataccaggggagttagcaggacagcgagatatagagctcttgggaattcattccaagttgatacagttgcctaccacctctctgtgctgagggacatattccctaatggcatgaacgtcttgtccttgttttctggtattggtggagcagaagtagctctccacaggcttggaatctgtatgaagacagtggtcttagtcgaaatatcagaggtaaacatgacgttgctgaggagttggtgggaccagacccaaactggcacgctgattgaaatcgcagatgttcaaaatcttactgctgaaagaattgaactattcatcagaagatttggtggctttgacctggtgatcgggggcagcccgtgcaacaacctcgctggtagcaacagataccaccgtgatggcttggagggcaagcactcagcactattctatcactactacagaatcttggattctgtaaagactattatggctagcatttttggtgcgaaaggaaagttgtttcgccatgttcgcaaggcccttctgttgaaacaatcctcctccttgacactgaaaactgaacaagatccttccaataacagtgataaggattccatggacaaataa

SEQ ID NO: 18530 - DNA, 1500 bp, Oryza sativa
  Clone ID: PAT_MRT4530_2407C.1
gacgatctgttaatcagtgtactaatttagattcttcaacggcagatttcctgtaatgttgctgaaaattacacattcagcatgatgtcagataaacataccagtaggggacctaccagattgatcaatagatctaacagtttcttaatccatcatcgcaatcacagattgagaaccttaaaacagaatggtattccttattgaacttcctcaaggactagcagagtcaaaatgtagcctgcaaagtttagctgcaatttgcaaaaagattgccggttgccaaaagttgagtcactcgtcgagttctgtatcacagatgatcactagtgcaactacagagaggaccaagtgttcctcacattgtctggtagactgacatctgctaataacctagaacatggtgcgagaatgacttcatttcttcgacttgtttgccacggtgagctgctggagattgagcaagagatcattggagtccaggaacaccttgttagctgaagatgacatcgtatgagagatctccctggcagcttcgatctgcctgagggcaaggaaagcagggttgtttgcaatggcttgaccaatcagctcagcacttttagcttcaccctgtgccctgataatcgcactcctcttgtcttgctcagctttctcaacaatgaacttagcacgctcagcttcttgtgcagcaacctgtttggcttcaatagcatgagtgaactcctttccgaagctcaggcttgtgatggacacatcatcaagggcaatattaaaattcctggccctctcagtcagtatctttcttatctccctactcacggtctctctctgtgtgattagctgactcgcattgtattgtgcgacaacagctttaagtgtttcatggataattgaaggcaaaactctctcattgaagttctcccccagagtcctgtagatagttggtagcttctctggcatgggccttgtaaggacacggagaccaattttcaccatctggagatccctgcttccagaagtactctccacaagattgggacgagcacggacatcataaatgattggcctctcaaaccatggaatcataaagtgagtcccctcagggtataccttgtccttgattccctggatgcggttgaagacgatggcgcggtggccaccctcgacgttgtagaggctgttgacggcggcgtacacggccgtgccgccgagcaccaccagcttgacgagcgtgcccgcgccggccgggggcaccgggacccggcctccgcccttgatgttcatcgcgccgctcgagctcgggggttgcgcggcggcggcggcggcgggcggcggaggctagggttttggggggttttgtttgtcgaagcggcgacgctcgacgttgtagaggctgttgacggcggcgtacacggccgtgccgccgagcaccaccagcttgacgagcgtgcccgcgccggccgggggcaccgggacccggcctccgcccttgatgttcat

SEQ ID NO: 18531 - DNA, 466 bp, Oryza sativa
  unsure (1)..(466): unsure at all n locations
  Clone ID: PAT_MRT4530_24080C.1
tnnagctctgccncgtcccactcagatacagcccatcgtnttggagtgtgaatgaatctgcacgggaatagtatgaactcatatctgcggagagtgcagatagcttcaattggcccctgctttcatcacgttagatccaactgttttttagtcgtgacccttaacttgcaagctggtaccactggtgtcaagatcatcacggaaatgagcttcacatgctatnacacagtacacgggatatcacttttttttctccttgtccctnttaccagtgttgcaccgtatagcccaagttctaatttaccaatgggtctatgtgtactgagccagtgttgtaatttttatactntttatgtttgatttaaccccctgaaatngaatgagggggttaactattgtaggtaaaccctgaattccttataaaatgaaagtattttgcccaaattaaaaaaaaaaaaaaaaaaaa

SEQ ID NO: 18532 - DNA, 366 bp, Oryza sativa
  Clone ID: PAT_MRT4530_24081C.1
atgtggcaggatggcttgggccttggggatgccatatgcttcagctgctttgctgcatggatgatgatgatgaaggcagaaacaattgagagaagaaagaggcggacatggccacccgatccgctgcctcggcgcccgttcatcacctctgcgtgtatcttcattgtggcaagcgtgggagggggaggagaaagggatggtgacgctcaatgctggtctctgaggatcaagaagactagggctatgggagagacagagataaagggatctatagtagtgactggtttagacatcaactatccaactatatggatattatcagatgatagtttaaaaaatggcgggaagataatactcaccatttga

SEQ ID NO: 18533 - DNA, 1557 bp, Oryza sativa
  Clone ID: PAT_MRT4530_24082C.1
atggctgacaccgaccatcgccgccgcggcggcgccacccgcgcgcacgtcgtcctgttcccgttcatggcgcagggccacgtcgcgccgttccggtgcatcgccgcgctagtccgccggtgccgcccggacgcgcgcctcaccgtcgtcgctacccccggcatggcagaggccttccgagcccacctcgtcgcggatggcgtcggtgatgggcgtctggccggcgtccacgagctcccgttcctccccgcggagcacggcctccccgccggcgccgatacctcggccagcatcgggttccagcagctcatcaccctcttcctcgcctccgagtcactccgcccggcgttccggcgcttcgtcgacgatctcagggcggccaaccccggcgacgacatacacgtcatggcggacatgttcttgggatgggcggtggacgtcgcccgcgacgccggcgcgtcaagctccatcgtgctcacctgcggcggctacggctcggcgctctacttctcgctgtgggacagtgtccctcttccggcgacagcttcccccgacgacggcttcccgctgccgcgtttcccggatgtccgcgtgcagcgctcgcaactcaccaaccacctcgcggcggccgacggcaaggacgcctggtccacgttcatccagaggcagatcgctgccttctcccgcgccgacgcgctgctcgtcaacacggcggagaacttggaacccaaggggctaagcatgctccgtcaatggcttaacgtcccgacctatcccgtcggcccgctgctccgcgcgccggcgccctcgccggaagccaagaagacgagccccatcctggagtggctcgatgagcaaccacctggctccgtgctgtacatatcgttcggatcgctgtacaggatcactgcgccgcagatgatggagctcgcgagagggctcgagcagagcagccataggttcgtctgggtgatccggccgccggcggggaacgacgcgaacggcgagttctcgccggagtggctgcctgaggggttcagggagcgcgcggaggcggaggggcgcgggctggtggtgcggtgctgggcgccgcaggtggagatcctggcgcacaccgccaccggcgcgttcctgacgcactgcggctggaactccgtgcaggaggcgctcggccacggcgtgccgctgctcgggtggccgctctcggcggagcaattctacaactccaagctgctcgcggaggagatggtgtgcgtggaggtggcgcgcgggagcgccgccgtggacgcggccaaggtggcagctgccgtggaggcggtgctcggcgagacgtcgatggagcgcgccgcgatgaagcggagagcggcagagatgaaggaggcaatcgacgcggcgagggacggcgacaaatcgtcggtgacggtgatgcggaggttcttggacgaggtgttgccgccgcgcggcgctcagttcatggcctcatgggcgctccaatcagcatgctttcgggacggcgcgatgagtcatcaactccggtcatctcacccaatgatgtaa

SEQ ID NO: 18534 - DNA, 624 bp, Oryza sativa
  Clone ID: PAT_MRT4530_24083C.1
atggtggagctccgcctcagccaacaacgacctagagggcgctacgccgccgagggtgaggagggggagggtgcgagggacccaccgttggatataaaaagcactattgaaacaaaggtgccggcatttgagaacaaccaaggtaatgaggaagagaagaaagacgaagaggaagatgagaaagaaggtaatgataatggtgctatagctattcaagggcgcgcatggggcgccgtagagtggtcgtggacgcacgggagggtgtcgtggaccaagaagaacccgacggctgaagatgaccagtgcagacaacgaggttgtcgatgtgcgaacggcaaggaagacgacgagaggggcgacacatggtgcggctcaatgtcgatgcagtggcgagaactctaccgggggcagcgcgtccggggccgacggtggctgacgcggaggcttgtgcagcagcccccatgctccgccgccgaggacaccgatgctcagcaggccaggaaggacagggctgaccaggcgaacggaggtggtcgttgcggcatgcggcatggaggtacagccagtgatgacgaccccagatccgatctacgtggaggtagccgatggtttgctagctgctga

SEQ ID NO: 18535 - DNA, 142 bp, Oryza sativa
  Clone ID: PAT_MRT4530_24084C.1
gcactccattgtctccgttgacttagaagagctcgatgctgatatcgggattgacatcaacagtgccacaaccgatataaaagatgctgctacttcaaatgttgctgccgatgctgccatcaacgccgaagttgatatatga

SEQ ID NO: 18536 - DNA, 1401 bp, Oryza sativa
  Clone ID: PAT_MRT4530_24085C.1
atggtcgagatcgtcttcgccgccgtcggggccgccgcgctcctcgtgctcctcgtcgccgcctgcctctgctgctcgaggaagacggcgccgaggaggaagaggaagaagaagcctcacaaccccgtcacgcatttcgacgcggacacctcgggatccaaaggcggcggcggccgcgacaccagcgggccgaagccgccgccaccgccgccatggctggccgagccccgcgcggcgccgtcgacgagcgacgcggcggggatgagcaaggggacgttcacctacgagcagctcgcggcggcgacggggggcttcgcggaggagaacctggtcgggcagggcgggttcgggtacgtgcacaagggggtgctcgccggcggcaaggcggtggccgtgaagcagctcaagtccggcagcggccagggggagcgcgagttccaggccgaggtggacatcatcagccgggtgcaccaccgccacctcgtctccctcgtcggctactgcatcgccggcgcgcgccgcgtgctcgtctacgagttcgtcccaaacaagaccctcgagttccacctccatgggaaaggcttgccggtgatgccatggccgacgaggctgcgcattgcgctcgggtcggcgaaggggctcgcctacctacacgaagactgccatcctcggatcatccaccgcgacatcaaatccgccaacatcctcctcgacaacaacttcgaagcaaaggtggcggatttcgggctggcgaagctgacgtcagacaacaacacgcacgtgtcgacgcgcgtgatggggacgttcgggtacctggcgccggagtacgcgtcgagcgggaagctgacggagaagtcggacgtgttctcctacggcgtgatgctgctggagctcgtgacggggcggcggcccatcgacgccggcgccgccgaccacccctggcccgcctccttcatggaggacgacagcctcgtcgagtgggcgcggccggccatggcgcgcgcgctggccgacggcgactacggcggcgtcgccgacccgaggctggagggcagctacgacgcggtggagatggcgcgcgtcgtcgccagcgccgccgcgtccgtccgccactcggcgaagaagcgccccaagatgagccagatcgtgagggcgctggagggggacatgtcgctggaggacctgaacgaggggatgcggccggggcagagcatggtgttcggcacggcggagaccgggggcagcatcagcgaggcttccgggtcgtacacgttcgacatggaccggatcattcaggaggcgacggcggcgaggctggagtccggccggcgagacgatgtgtctttctccggcgagatgagcgcggagtggaagcagcctccgcaccgggtgagcaggtag

SEQ ID NO: 18537 - DNA, 936 bp, Oryza sativa
  Clone ID: PAT_MRT4530_24086C.1
atggtggagctccgcctcagccaacaacgacctagagggcgctacgccgccgagggtgaggagggggagggtgcgaggatttggttgagaaacttgagttgcctacacaaccgcatcctcatccatattacatggaatggttcaactcttgtggcatttgagaacaaccaaggtaatgaggaagagaagaaagacgaagaggaagatgagaaagaaggtaatgataatggtgctatagctattcaaggtatccatatttatgatgcattggagaccaccccaggtatgagggaagagaagaaaggcgaagaggaagatgagaaagaaggtaatgataatggtgctatagctattcaagggcgcgcatggggcgccgtagagtggtcgtggacgcacgggagggtgtcgtggaccaagaagaacccgacggctgaagatgaccagtgcagacaacgaggttgtcgatgtgcgaacggcaaggaagacgacgagaggggcgacacatggtgcggctcaatgtcgatgcagtggcgagaactctaccgaagtcatcgtagctgggcagctgaacggatcacggcaatcacgcgcaagtgctccacgcatagaggccgggtagtcggaagttccgacgatgagggccatgtacgagcacagagagggcagaagctagagaccgatgagtggcggcgtcctcaggagtcacaggctcgcagggggcagcgcgtccggggccgacggtggctgacgcggaggcttgtgcagcagcccccatgctccgccgccgaggacaccgatgctcagcaggccaggaaggacagggctgaccaggcgaacggaggtggtcgttgcggcatgcggcatggaggtacagccagtgatgacgaccccagatccgatctacgtggaggtagccgatggtttgctagctgctga

SEQ ID NO: 18538 - DNA, 2256 bp, Oryza sativa
  Clone ID: PAT_MRT4530_24087C.1
atggcgcgcctccaccacctcctcctctcccgcgcgctcgcctcccaccccctccaccaccacctcctcccgtctccgccgccctcctccagcctcctcccaccgctgctcccctcgccaccgcgtcctccttctcctccttctccgcttcccggtggtcgcggcgtgccccactcctcgctcgccgcggcctcgcggcactacgcgtcgtcgacacctggacgccggaggcgagcgccgccgatgctgctgaggcggaggagggcgaggcggccgccgcgggagggccccgccgagctcaacgtgcagattggcatcgaggaagccctccccgacgaccccactatcctgagcattgcagaagcgcttcaaatggatgttgctaaggcagcgaaggtggcctttgaccacctcgaaaactcggagtacaaaaccagagacaattgtataagcgatgtgaataagtacgatactgttgaggtctctatactgctttgtgatgacgatttcattcggaaactgaataaggaatggagggacgaggatcacgctacggatgttctatcaatgtcgcagcatatccccgggctggacattcccattctgcagttgggtgacatagtaatctctattgacactgcacaacggcaagcggaagaaaggggccatacactgcatgatgagataagaattctcatggtgcacggattattgcatttattgggctttgatcatgagctcagcaaagtggctgaagaagagatggagagcggggaagaacatatcttaaattctctagattggaaagggaaaggacttattaagagtgcatatgattccattcatgacatggatcattcacaaagttatgttgaggccagtagagattcagatgaaattaacctacgggaagttcatcaaccaaaactgagccatatcgtatgtgatatagatggcattgtggataatgaaggatacccgcatgaagaatcaatagaatctttgagagaggcagtttcaaggggaataaacgttatcacggtgactggaaagacccgggcttccacaataagaactttcaggcttcttgatttgggagggaaatatcgttttatatcagagagttcacctggtgtatttctacagggttcacttgtttatggaaggcacggccaagagatttacagagcaaacttaggtttggatatctgcaaggaggcatttttgtactccttgaagtatagtatacctcttgttgcataccatgaggaacaatgtttgaccctctttgaacatcctttggttgatttgttgcacacaatccactatgagaccaaggtaaaagtggtgccttcagttgaggacctcttggggtattcatcttttcagaagttgcttttccttgacaaagtggatggggattcatctgtactgagacagcattggtcagaactaacacaaggaagagcacgtgttatcaaagcgcattcaagtatgattgagattgttccacttaatgcttcaaagggtggtggtataaggattttacttgatcatcttggaataactgaagattctgatcttgatgctgtgggagactacacaagatggctaagcaacatatttacttaaccattcttaagcaaaagcttggtgataagcttgagataagaagaaatgacatgcatatgtgatgcacaaaaaggaaaacaaacaaggattccacattggacatgtctattttgaagcatgtaagaaaacaaacttcataccaccgtccttttgggctggaagagaaattactgtacccttaaacttttgaaagggatatgggtgtggatggaaagtttgctacttccttcagatctcatttatggaggtgtgttggaaataaaatcagaccagcccatctgtgatgtcaagaaaacaaacatcaagaaagtgcaatttgcaactagtgaaaattttatgtgagactattagtgttcctttgctctgagcaaacgtgtcaaattcatgccaattttgtttttctgtagaatacctgtatagctgcgctgcacaaagcattgctagttgttgctcgatcatgtaatgcaagagtactctagttcccagctgataggattttgcttattagctagctgtatttcattccacccgtttttagtagttgaatttcaaatggatggacttaaggaaatgtaagaagccaggttgatcccagaagaaaaaaaatagttgagtttccttgtg

SEQ ID NO: 18539 - DNA, 231 bp, Oryza sativa
  unsure (1)..(231): unsure at all n locations
  Clone ID: PAT_MRT4530_24088C.1
ttcgcancacacacattgaagaaaaaaaacacgacgaacaccgttaaaaaaaggtcgaagagaagtgggtagacccattacctgcgaacaattgtagtggaggcgccatcctctgccngagttcatccnagntgccgtcgcgcgccgcaggcgggctgaccaaatcgggtgaccgccagccacctgtggccgtacggctccaagaacgcngcncgcggnaagagcaagagc

SEQ ID NO: 18540 - DNA, 2574 bp, Oryza sativa
  Clone ID: PAT_MRT4530_24089C.1
atggagatccccaccgacgccatccaccgcctccgctcctccctacgcgagcccttctccgcccccgcctccgcctccgcgacgccgcccttcccctccgtcgcggacgccgtggccgccttcgactcccgcgtgggagtgggcgccgcgggggccaccccccggtgcggccgctgcggggccgcgggggggctcctccgcggcgaggggtccgccgtgtgcgcctactgcgggtgccccaggcgggaggggtgcggcggtgtcgccgccttccgcggcagtgtggcgtaccggtggctgctcggctcgctcgggctggatggatccgagcctgtagaatttgacaacgagtctactgattcaagtaaaaccaaagaagcactgaagaatgggatggtcttatctgatctgctggaccttaaactttccttcccccctgagaataaggaaacatctggaagtaccgaaaacaatgaacagtcatctgctgaacatatgctaaaattatctggtgttaacctagactcatttttcgctgcaagaatggagaacacaaccactgctgcagttcctactcaaaaacatactgtggtgcaggaaaaacaaagcacagatagtcatggttcttccagtttggagatgcgtgctacatacttaactggaacgaaaacaagttctcaaaacacaaatcaaatagaagttactccagcatttgcaaattgggatgctgactttcagtctgctagctcagaaagtgtcaccgaggactccaagaaatctgacctatttaacagcgcctcgaatgtcaaggcttctagttttccagcacatgtaactgccatcagcccagttgtacctagtggaaatgaaacatatatgagaagtaccaagctagaagattcaaaagatttggcttcagcaagtggcatgctagttaaagatgaaagtaacagtggaatctttcctgagaacaatattgctgagttcaccgagtcctcccttagcaagagttcagcgcatagtgatcaattgcctgcaaggggtgatactggagtcggtatagatgaagcttttgatgactggcaagagtttactggtggaaatcagggaagcctgtcgaatgcaggagaacatatggaggggcctatagagagcaacccctccgaaataaaaaccgtagatacctggcctgttagtagcatggaatcatccaataatgttactgacaactctgttgatgattggcaagcttttacttccagctctggtcaaggaggaaattcggtgaagccaatagaagggtcagctgctagtcaaggaggagatgtggtgaaaccagttggacaaacagcaagcatctcatttgaacatttttcagaagctaattctgttgagttatggcctgtgggcaatattaatgagcttcataataccaaagtagtaaacgaaactaatgattcttttgatgattggcaagattttacaacctctggtcaaggtcaaggtgcaccatctaatcaagttggaggcatgattgaagtctcacgtatcactcagaaagaaacaagtgatgactcatggttcacaacagatgttaaggaagaaataaataaagatttagtgaatacaactaatgccatgttggacgattttcaaagtttttctggttcagatctagcaccacaaagttcatcgtttgtaagtggagaaatgatgaatccttcatttgggcaacatgaaggaactgatactgtgcaatcatggttgggtggcagcaataatatgggtacaaacatggccacaacaaatagtgaagacaattcatttgatatttggaaagattttacaacgtcgggtcatcaaaaagaaaacatttctatttttgagagaaaaaaaactagcacatcatcagagccagctaaagaaactgatccaatggatttgtggttaaccagcaatgcccaggaatctaatagcagcaaagatgctaatagaattaatgactcatctggtggatggcaggattttgctaattttggtcaaaaagaaagtatgaaaattcctggggtagggcactctgcgaaagattcttcaagcaattcagctgaacttaagaaccatgaacagataaatgaagatagtgacccatttgatgactggcaggatttcaagaactcacatccactggatacaagcttacaagttccatcaaattcttcatttgataactctttagtacggatgcctgatgcactagaaggactggaatttgggagctttgcacagtctgttccatcccaaagccaaagagataataaggagaattctaacgaaacaaatacggtttcatccaatcataacttagaaaggatggttggaaggcagcagacaggcgatttgggttcactgtctaccatttggccaactacaagtcatgacacccaatctgtttcaaaaccggaatctgctgatgcaaatgtagagagactgctgtcgcagatgcacgacttatcctttatgctcaaagatgatctgtcgatccctgataaacctgtaggtcattataagccttga

SEQ ID NO: 18541 - DNA, 223 bp, Oryza sativa
  unsure (1)..(223): unsure at all n locations
  Clone ID: PAT_MRT4530_2408C.1
atgtgtacgtnacttaatnnnctcgntcanantatnaccagncanaatgtaanttcagcagaatctcagccgttcacttgtaatccattgggtcgaaatgatgtagtcagctacttagtcctggtnaaaaangaagatannaagaagattttcttngnnnnanggccnangggggggggngtggnggtgtcccnctnattaatanccnntnnngggactggtt

SEQ ID NO: 18542 - DNA, 684 bp, Oryza sativa
  Clone ID: PAT_MRT4530_24090C.1
agtgacactatagaatactcaagcttgcatgcctgcaggtcgactctgaggatccccttacattggtctatatctgttacttgaagatgattatgatagtgctctagatgcatttaatgctgttttagaacttgatcctcattacaattatacgtttttaaaccgtggcttagcattttattatagcgggcgttattctgaagctgaacgtgatttattacgcttttaccaagaagataaagcagatccctatcgtgtcttatggttatacttcaatgagctagaatttaaacctaatgaagcaaaagcaaatctaattacacgatcaaaagcattatctgctcactattggggcacaaatattattcattattttttaggggagttaactctcgcgcaacttcgtgatataatggataaagaagctcaaccaaatacagcttcatatgcagaaattttaactgaaacatatttctatttagcaaaacaacaactcaaattaaataaaacggatgaggcaattagtgctttccggctctctcttgcaaatcaagtgtttaactttgttgagtatcgttttgccctgtttgaattatcacagctaagagctatggaaaatcaaacttatcctgttgttgggataaattaggacgcaaacaagcggttaaaaatggcaaaattact

SEQ ID NO: 18543 - DNA, 333 bp, Oryza sativa
  Clone ID: PAT_MRT4530_24091C.1
atgacaacaacaacgaatctggcgctagccttgggagctgcagggacatctagcggcgatgacgacggcagaggcagatccggcgctcaggacctcagtggtgatgacaaggacagtggatccggcgctcaggagctcgtcaacggcagcgtcaggctcagaagttgcggggctttggtggcgacggcaatggcgccggtagcgaagatcacgcacttcgcgccggcggcgagggctgattctctgatggtgctgcacagcgcggcggtggacgctaggctgcgacagtgcatcgccgccgacttgtcctactggaggttcctcttccaatag

SEQ ID NO: 18544 - DNA, 558 bp, Oryza sativa
  Clone ID: PAT_MRT4530_24092C.1
cttccttcctcgacccacccgtcctttctttccgcttctctagtctagtccacaggctggttcccacccgataggcgctgcctggtgctgtgtggtgtggtgaggtgcggcggtcgaggactacctcaggagctcttcccatctcactcttcttcacacttctgtccttgtgcctctgcgtctctgtgcccctttcgctcctctgcctttttctcggcttctggcccgttcccttctcttctcctgttccctcctctctctttttccccctcttttttccttctcactctttctctcttcgcttccttccactctcctctcttattcctcttcttctttctctcctcttctttcctttcttcccttctcctcttccccttccctcccctctcctcctcttctctcctcttcttcccctctcccttcctcccttttcctctttttcccccttttccccttttctttttcctttctccccccttcccttttccccttctcttcttctctctcttccctctctcttctttcctttccctcctttttctcttttccctctct

SEQ ID NO: 18545 - DNA, 219 bp, Oryza sativa
  Clone ID: PAT_MRT4530_24093C.1
atggcgaaggagattcccggcctggattggcatttactcctgtgctgcacttcgcccaagctctccggtgacccccgcttccgaccgaacgagcatggagccggccggtcccgttcctcccttttctcgcaccggatggcggccatcgccgccccatccaagatgttgccccacgccgctctccactccaccctcaccacgatgtgcaacggcccttga

SEQ ID NO: 18546 - DNA, 1548 bp, Oryza sativa
  Clone ID: PAT_MRT4530_24094C.1
atgactgaagttgacaaggaagcactacatacactactaaagcttaaattcgatcttgatctcaatgaagaaaatgtaaaaggttgtgtggagttgatgttttcttctagttacaaaagtttccgccatagattctatgagcactatgtgaagcatggaggtggagagaacgcacgaatgaatcctcacaaagcacttgaagaccgtcttgctgactggttctggttgtgtgatcattttgagacagaagagtttcagaaacgatcaacaataggaaaggacaaccgttcaaatttgccatacatgcattggaagggaacaaaatcatttgtagcactccaacatgaacttggatgtggtgatataacattgtacaaagaatgttatagtaatgataaaggatgggcttcaagtgatgctagagaaaagcatgatcaaatggtaaggatgcaagaagaatccatgcaacaggatgaaatacctttgacagagccgcaaatatgtgagaaggtgctcgggaaggcatatgggtatattagagggagaggtcatggcccaaaacctaatagaagagctacatcaacttcaacaaggacctatcaacagatggaagaagagttggcttctacaaaacaaactgttgcagtacagcaaaaccaacttgctgtacaacaaaaccagcttgaatctcaacaaaaacaacttgattggttgcacagtgttgtgtctaaacttgctggtatcccaactccttgtatggatgctaatggtacatcagtgccggcttacacagctacaacctcaaatgatggatctaaaaggtcagtggcacactttaacttcaattggcaaaagttgatatctgattaccaccttgaagacaatgcctgggtacagaacttgtatgatttgcgtgagaagtgggccacaatatatcgccgtgattcattttgtgcagacatgacatccactcaaaggagtgaagaacttttggtacaatatgataagtgcattgcacgtcttcgccggaaagagttgtatgaagatcataaatcacggaattcagatccaattctttgtatcagtaacttgccaatgttgaagacagccgctgaatcatatacgagaaatatgtattctgcttttgaggaggaatttcagaaacaatttgttctatcatgcacattgataattcaagaggggacaatcaacacatacaaggtagtaactgtggatcacagtgaggacgaagcaagagtcatctttaattcagttcatatgaatatatcatgttcttgcaggaagtataattgtcttggagaagaaaccacacagccatcaaacataaatatagctggagcttcacagccaactgttcaggaaccacttgactcaaatactgtgatgccatttggtgacatttcaatgatatttgttccgccaattcgaggagaattcacaaatctattatttcaagctcatcatgaaactactgcagcagcatcagcttctcggtgtttagagtttgaaaatcaagaccccaattaa

SEQ ID NO: 18547 - DNA, 327 bp, Oryza sativa
  Clone ID: PAT_MRT4530_24095C.1
atggggcatcgatcatcatcctcgaagggccatgctggatgttgcctccatcctttatccatgtcatttttaaacgtttttgtccttcgtcttcctccagtgtcgttcttcaaggacaagtcaggaacaaagaactcacgtcataactcggccactgggatggatctaagtagggctcaaacctcggggagtatgtgtgctgcacaacctcattggaagcttcgaaacatatccgtggggacacctccatgtccaaaccttggagtctctagatggttatcatgtgtgagcatggcatgtggtggagttgaggaaattggcaagtaa

SEQ ID NO: 18548 - DNA, 999 bp, Oryza sativa
  Clone ID: PAT_MRT4530_24096C.1
atggctaataagctcgctgctctgctcgtctccttcgcgatgctcatggcggcggccgccggcttctacaccccgccaagcccttccacgtgcggactcaaggtcggttactaccacgacaagtgcccgcacgccgaggccatcgtcaggggcgccgtcggcgccgccatcctccgcgaccccggcgtcggcgccggcctcatccgcatgctcttccacgactgcttcgtcgagggatgtgatgcgtccgtgctgctcgacccgacgccggccaacccgcagccggagaagctcgccccgcccaacaaccccagcctccgcggcttcgaggtcatcgacgccgccaaaaccgccgtcgaggcggcatgcccgggcgtcgtctcctgcgccgacatcgtcgccttcgccgcgcgcgacgcctccttcttcctcagcaacagcagggtgtcgttcgacatgccgtcgggccgcctcgacgggcgctactccaacgcgtcgcgcaccctcgacttcctcccgccgcccaagttcaacctcggtcagctcgtcgccaacttcgccgccaaggggctcagcgtcgaggacatggtggtgctcgccggctcccacaccgtcggccgctcgcactgctcgtccttcgtccccgaccgcctcgccgtgccctccgacatcgacccgtcgttcgccgccacgctgaggggtcaatgcccggcgagcccgagctcaggcaacgatcccacggtggtgcaggacgtcgagacgccgaacaagctggacaaccagtactacaagaacgtgctcgctcacaaggggctcttcacctccgacgcgtcgctcctgacgtcgccggccacgatgaagatggtgctggacaacgccaacatccccgggtggtgggaggacaggttccagaaggcaatggtgaagttggccgccgtcgaggtgaagaccggcggcaatggcgaggtcaggaggaactgccgggctgtgaattactag

SEQ ID NO: 18549 - DNA, 1020 bp, Oryza sativa
  Clone ID: PAT_MRT4530_24097C.1
atggctaggctggctgctctgctcgtctccttagcgatgctcatggcggcggtgacggcagcccgggtagaaagagcgggcgccggcttctacacaccgccaagcccttccacctgcggcctcaagatcggctactaccacgacaagtgcccgcacgccgaggccatcgtcaagggcgtcgtcgccgccgccctccaccgcgaccccggcgtcggcgccggcctcatccgcatgctcttccacgactgcttcgtcgagggatgtgatgcctccgtgctgctcgacccgacgccggccaacccgcagccggagaagctcgccccgccaaacaaccccagcctccgcggcttcgaggtcatcgacgccgccaaggacgccgtcgaggcggcgtgcccgggcgtcgtctcctgcgccgacatcgtcgccttcgccgcgcgcgacgcctccttcttcctcagcgacagcagggtgtccttcgacattccgtcgggacgcctcgacgggcgctactccaacgcgtcgcgcgccctcgacttcctcccgccgccgaccttcaacctcggtcagctcgtcgccaacttcgccgccaaggggctcagcgtcgaggacatggtggtgctctccggcgcccacaccatcggcctctcacactgctcgtccttcgtctccgaccgcctcgccgtcgcctccgacatcgacccgtcgttcgccgctgtcctacgagcccaatgcccggcgagcccgagctcgagcaacgacccgacggtggtgcaggacgtggtgacgcccaacaagctggacaaccagtactacaagaacgtgctcgcgcacagggcgctcttcacctccgacgcgtcgctcctggcgtcgccggcgacggcaaagatggtggtggacaacgccaacatccccgggtggtgggaggacaggttcaagacggccatggtgaagatggccgccgtcgaggtgaagaccggcagcaacggcgaaatcaggagacactgccgggctgtcaattaa

SEQ ID NO: 18550 - DNA, 790 bp, Oryza sativa
  Clone ID: PAT_MRT4530_24098C.1
atgaatgatattatcattttcactgatattataagttctttaggcttagtggaatttcctataaaaggaaaatcttttacttgtagtaatatacaagctaacctcttgttagagcagcttgactagcttttaacttccaatgcttggacactaagatatccaaagtcctatgttcttaccctaacaagagcaatatcagttcaaatgattaaaatactcttctatccccatatccaatgtctttcattttgagaattattgggttgatatggaagggttttttttatcatggtgcttggatatggaacattgatccaggttttattgaccctgctagatgtatcatctataagccggagctactgagaaaattcttaaaataattgagtaagggtctctccaagctacttcagttaatctctatctataataagggtttagactttctatatctgatagaagaacgcagaagtctcactatcctaaaatggaattttagagaagtggtcaagaaacaaatctcaaagctctatctttttagaagattatattggaaaaggagatgcactaatagacggatcgagttgggggagaaaacacgaagttcttccatgcaatggctacaaaaagatttggatgatataattgctcaaatcaatgatgaaagagtaacgttggtgtcttctcaccaacataagacttctctattttttaattcttttcaaaacagaatgggagtttcttcacaccctgaaatggttttcaacctgactgaattatttccaagact

SEQ ID NO: 18551 - DNA, 3189 bp, Oryza sativa
  Clone ID: PAT_MRT4530_24099C.1
atggctactcctgctaggttttcaactaagaatcatgttttcgatggaacggatttttctcattggtgtagtaggatgcaatcttacattatggctgaagattatgatatttggagaaaagtttctcatccttatgtgattcctgaagctattaatactgctgctgaaaaaactgcttttgaacaaaattgcaaagctcgcaacattcttttgagtggtatttctcgttcggattatgatcgtgttacgcactttcgaactgctcatgaaatttggaatgttttgagtaactttcatcaaggaacaaataacattaaagaacttcgtcgtgatattttcaaaaaggagtacattaaatttgagatgaaacctggagaagctttgaatgactatctttctaggtttattaaaattttgagttatcttagatctgttgatttttcttatgatactaattatccacaatctgagatttctcgtcactttttgaatggtcttgacatgtctatttgggagatgaaagttacatctattcaaaagtctgttaacatgtctactttgactttggattcactttatagaaaattgaaaacacatgagatgaatgttctttctaggaaagttgattctaagtcaagcgctttggtttcttcttcttcttattctttggatgttgatgctttttcatctaagccttcttttcttgctgtttttaatgtcacatccgatgatcaactcgaacaaatcgaggaggaggatttggcttttgttgctaatagaattctcgagctacgaataatgccaggaacaggaaaagagcttgggagaggcaaaagagaagacaaagatggtgagaagaccaacaacaataagccgaagggttcatcccaagggaggaaactagagaatctcaggaaggcttttcaacaagtaagcgccgccttcgagccacaaaatgatgtagatggtgaaagtggagatgatgataagggaaagaacatctccgatgtttgcttcgtggcgcgtggtgaatctgacacagagtatgaagataatgagttaaaacaacctcatgatgttttggattgctcaacatgtaatttgaataagttgaaattgaaagatgctttaggtcgtgttgagttcatggaagatgttgtgaaaaataatgaagtgctttcttgccctaaatgtcgtaaaagcaaaggtgtcatggtagattatgcaaattgtgctaatttggaaaaagaggtttcttatttgaaaaattctttgttaagattttctgatggtaaaaagaacctcaatatgattttggatcaatcaaaggtgttggtgctagaagtggctttggtggcaaggaaggagaacgtgtggattgtggattccggttgttcgcagcacatgaccggtgataaaaattggttctcctcactcaaaaaggcatccaagactgaatcgattatctttggtgatgcttctacaagtgccgttctcgctacaggtttggttaaggttcactttaagaaaactggaagtaaagtttttgattcttgtggtgattctgtgttgaatatttctcgttatggaagagtgtttaaagctgattttgaaaatcctgtttcacctgtgataacatgtttggttgctaactttgataaagatatgatgttttggcatcgtagacttggacattttggttttgatcatctcactatgttaagtcgtttggatcttgttcgtggtttgcctaaacttatgaaagatcttgatttggtttatacaccgtgtcatcatgctaagatggttgcttattcacatgctcctattgtttctatgatgacggatgcacctggacagctattacacatggacactgttggtccagctagagtgcaatctgttggaggaaagtggtatgtgttggttattgttgaccatttttctcgatattcttgggttttctttatggcaactaaagacgaagcttttcaacactttcgtggtttgtttcttcgattggatcttgaatttcctagttctttgaaaagaattcgaagtgataatggtggagagtttaaaaatgcttcttttgaacaattttccaatgaaagaggtacactgtcacaggttcagggggaggatggtcgtatttttgaagacgagagcaatgacaacgacgacgacgagattacaacttcgaccagtactgacacagaacgtggatcaactttagaagtcgcttctcctttgcacattcaacgacgacatccactggaacaaataattggtaatataggtgagcggactacaaggtctaaggtggaagtttatgtcaaacaaccaccatgttttgaaaatcctgattttcccaaccatgttattaaattgtctaaagctttgtatggtttgaaacaagctcctagagcatggtatgataggcttaaaaactttttacttgtgaaaggttttacaatgggaaaggttgacaaaacgccttttgttcttaagcatggtgataatcaactttttgttcagatttatgtgaatgatatcatctttggttgttcgactcatgctttggttgtagattttgctgagactatgcacagggaatttgagatgagcatgatgggtgagttatcgtactttttgggattgcaaattaagcaaacacctcaaggtacttttgtgcatcaaacgaagtatacgaaggatcttttgagacggttcaagaaggagaactgcaagccaatttcaacaccaattggttctacagctgtgttggatcctgatgaagatggcgaagctattgatcaaaaggaatatagaagtatgattggatctttgttgtatctaactgcttctaggccagacatacaatttgctattctttggcttttatttactttgaaagattatggtcttatttttgagaaagtacctctcttttgtgataatactaatgctatcaatgttgctaagaatcgtgttcaacactcacgcacaaagcacattgatattcgttttcactttttgagggatcatgttgagaagggagatgtggaattgcagtttttggacacaaagttgcaacttgctgatattttcactaaacctttggattctaatcgctttgcttttctttgtggtgaattgggcataattcatccttttggcatggtttga

SEQ ID NO: 18552 - DNA, 330 bp, Oryza sativa
  Clone ID: PAT_MRT4530_2409C.1
atgggaagccgcggcaagaagcgtgagcccgtcggtgacctcctctacaacggtgtttctgcccttgccccgctccagccaccagcaaccatgctcgtccatggcgtttttgctgctcctcatatgcaagcaggcatgccgatgtacatccaaaccatgctgacggggagcaacacgccccgcgccgtcgctgtggtcgtcgccttcggtcgccgctgccgccgttgggttcgcgaggaggagaagaagaccggcctccacttccccgaagccgaaatccaccggagctccatcttcgccgtcaacccgaagttcgccgtcgcgttttga

SEQ ID NO: 18553 - DNA, 510 bp, Oryza sativa
  Clone ID: PAT_MRT4530_240C.1
atggagatccaatatgagcttaattcggatagggatccgaataggagtcctacgggccttggaggcccgagtgatggatcctatatattcgtgaggggtgtgaccggcggaggcattgcatcaccgtgggagtacggcgaggagaacgcacgaggtggagaaagtcgagccggtgcgattgactacttcctctacatcgacgcacgctacttcgcgagagttccttcgacttctcagcgtcttcttccgctgcgcagcgcgtcgagtgctaactgcaatatagcacaaacgaacaagcctatttatcatggcggtgccggcatctgcgtgggtgaccgtgatgtttattttggtgtctctcaatcaattcgtcatcgatctaccaacatcagtatgatggcatctaggcgtcgccaacggcccatcgctgtgggctttattgggctgacttggaggagcatgcgcatgccaaggccaaggccaaggccaaggccctcgctgtctctcgta

SEQ ID NO: 18554 - DNA, 3225 bp, Oryza sativa
  Clone ID: PAT_MRT4530_24100C.1
atgccggtggagctgctccggcctgtggtcgccgccgtcgcatcgctggctcgctgcgtgcgtgcatgtgctgaggaatcgaatcgaatcgagggaggaagtggctggtgcgtggcggcgatggacggggacgccagggtgaggagtggctatggcgcgagggcgggtcctggtgctactactagtgctacgacgtcgtcgtcgccgtcgtacatgagcattgacggcgacgacaatggtggtgccggcggggcgaaggtgtgggtgctcgtgctgctcttcttgctgatcgtgctcatgttcttgccgtcggtggtgcggcgaggcaggccatggggaggagggggaggagagcaccatcgaggagggggcgggcttagcctcaagagcggccgggatgttgtcaacctctgcctcgtggcgttcgccatcctgtgcgggctgcttggccgcgccagacgacttgctgcctcgccgccgagccggctggaaagaactagctcggcgccatacacgaaagggaattcactgttcaggaaaagaggtggtccaaatcattgctttgaatgtggttcaattgatcatcttcgttcgcattgttctaagcttgggagaggcaaaagagaagacaaagatgatgagaagaccaacgacaacaagcagaagggtacgttcaaaggaaggaagatcaaggagaatctcaagaaggcttttgatcaagtctacgctgcgtttgagccactaagcaacatagatggtgatagtggagatgaagctaagggaaagaacatctccggtgtttgcttcatggcatgtggtgaatcgtatttagagtgtgaaaacaatgaggtaagtgcttttgaggaagctattaatattttgagtgcaaaaaaaaagtgtgagaagatgtatagaaaacaggaatttatcattgaatctcttaattttgaaattgctagattaaaatctcttattcctaatgatgatgattgcaaaagttttgaggttttaatgaatgagatttcaaatattagagatgttaatgttgcacatgatttgaaaaataaatcttctcttgctcttagttttgctttgcacacacgcacttcggatgagttgtttttaactaaaaagttgttgcaaaaatatcaaattgattttcatgctagtttgatgtttaacatgatttctgctaaaaagttaaaacaacctcatgatgttttgaattgctcaacatgtaatttgaataagatgaaattgaaagatgctttaggtcgtgttgagtacatggaagatgttgtgaaaaacaatgaagtgctttcttgccccaaatatcttaaaagcaaaggtgtcatggtatattgtgaaaattgtgctaatttggaaaaagaggtttcttatttgaaaaattctttgcttagattttttgatagtaaaaagaacctcaacatgattttagatcaatctaaggtgctggtgctagaggtggctttggtggcgcggaaggagaacatgtggatcgtagattccggttgttcacggcacatgaccggtgataaaaattggttctcctccctcaaaaaggcatccaagactaaatcgattatctttggtgatgcttctacaagtctcgctacaggtttggttaaggtaaatgaaaattttgaattgaagaatgtagctttggttgaggacttaaagtacaatttgctttcagttttacaaattgttgatgaagattttgaggttcactttaagaaaactggaagtaaagtttttgattcttgtggtgattctgtgttgaatatttctcgatatggaagagtgtttaaagctgattttgataatcctgtttcacctgtgataatatgtttggtagctaagtttgataaagatatgatgttttggcatcgtagacttggacatgttggttttgatcatctcactaggttaagtggtttggatcttgttcgtggtttgcctaaacttaagaaagatcttgatttggtttgtacaccgtgtcatcatgctaagatggttgcttcttcacatgctcctattgtttctgtgatgacggatgcaccgggacagctattacatatggacactgttggtccagctagagtgcaatctgttggaggaaagtggtatgtgttggttattgttgacgatttttctcgatattcttgggttctctttatggcaactaaggacgaagcttttcaacactttcgtggtttgtttcttcgattggatcttgaatttcctggttccttgaaaagaattcgaagtgataatggtggtcttgaacatgaattttcttctcctcgtgttccgcaacaaaatggtgttgttgaaaggaaaaatcgtgttttggttgagatggctagaacaatgttggatgaatataaaactcctagaaaattttgggctgaggcgattaacactgcttgctatgtttcaaatcgagttttcttgagatcaaaacttggaaaaacttcttatgaactccgatttggacgtcaactcaaagtttcacatttgcgtgtttttggttgcaagtgctttatcttgaaatctggaaatttggataagtttgaggcacgttctaccgatggattgtttcttggttaccccgcacacactcgtggctatcgtgtacttattatggagactaacaaaatcattgagacttgcgaagtttcttttgatgaagctagtccagatggacctccagagattacaacttcgaccagtactgatacagaacgtggatcaacttcagaagtcgctgctcctttgcacattcaacgacaacatccgctggaacaaattattggtaatataggtgagcggactacaaggtctaaggaggaagtttatgtcaaaccactaggttttgaaaatcctaattttcccaaccatgtttttaaattgtctaaaactttgtatggtttgaaacaagctcctagggcatggtatgataggcttaagaactttttgcttgcgaaaggttttacaatgggaaagattctttgtcttttatctactttgaaagattatggtcttacttttgagaaagtaccactcttttgtgataatattagtgctactaacattgctaagaatcatgttcaacactcacgcacaaagcatattgatattcgtttttactttttgatggatcatgttgagaagggagatgttgaattgcagtttttttga

SEQ ID NO: 18555 - DNA, 2142 bp, Oryza sativa
  Clone ID: PAT_MRT4530_24101C.1
atggtgaggaccgggactatgctcagggaggagcagaggtctattgcggtcgggataccatgtgagaaggtgactagagtctggactcttggaggtcaactttggtcaacggtggggatcgggactagactcaaggaggagttgaggtccagacagtcaaggataccgggtgacgaagttggatacaagatggcatacgaccggcgggagcgaggcggtcagaccggcggcggcgacaggtgcggcaagcgacttcggcggtcagaccggagattcaacaccggtcagaccggcggcatccacttggtcagaccggcagatcaatctcggatgcaatcttacattatggctgaagattatgatatttggagaaaagtttctcatgcttatgtgattcctgaagctattaatactgctgctgaaaaaactgcttttgaacaaaattgcaaagctcgcaacattcttttgagcggtatttctcgttcggattatgatcgtgttgctcatcttcaaactgctcatgagatttgggttgctttgagtaattttcatcaaggaacaaataacattaaagagcttcgtcgagatctttttaaaaaggagtacattaaatttgagatgaaacctggagaagcttttgatgactatctttataggtttaataaaattttgagtgatcttagatctgttgattcttcttatgatgctaattatccacaatctgagatttctcgtcactttttgaatggtctcgacatatctatttgggagatgaaagttacatctattcaggagtctgttaacatgtctactttaactttggattcactttatacaaaattgaaaacacatgagatgaatgttctttctcgaaaagttgattctaagtcgaatgctttgatttcttcttcttcctctttggatgttgatgcttcttcatctaagtcgtcttttcttgctgtttttaatgccacatccgatgatcaactcgaacaaatcgaggaggaggatttggctttagttgctaacagaattgctcgagctatgaataatgccaggaacaggaaaagaggtggtccaaatcgttgctttgagtgtggttcaattgatcatcttcgttcgcattgtcctaagcttgggagaggcaaaagagaagacaaagatggtgagaagaccaacaacaataagtccaacaacaacaagtcaaagggttcataccaagggaggaagatggagaatcttaggaaggcttttcaacaagtttgcgccgccttcgagccactaagtgatgtagatggtgaaagtggagatgatgataagggaaataacgtctccgatgtttgcttcatggcgcgtggtgaatctgacatagagtatgaagataatgagggggaggatggtcgtatttttgaagatgagagcgacgacgactacgacgacgaggttggctcggccggtcagaccgggcgccaggccggtcagaccgccggcacacctccgatttatgtggatgatatcatctttggttgtttgactcatgctttggttgtagattttgctgagactatgcgcagggaattagagatgagcatgatgggtgagttatcgtactttttgggattgcaaattaagcaaacacctcaagctgtgttggatcctgatgaagatggtgaagctattgatcaaaaggagtatagaagtgacttgaggtcagccttggtcaatggtaaggaccgagactatgctcacggaggagcagaggtctattgcggtcgggataccatggaggagttgaggtccagacggtcaaggataccgggtgacgaagttggatacaagatggcatacggtggatggatatcgtgtgggagagatcttcgcaacgggcttcatgaggctaatgacacgcgggaggacatctggccaggcattggagtacatctggccaggcatgggagcaagagctccaggaagtggggcttggcgttcgtctcgctggcgattgagctcaacgtccccctcttcagtgctacttgtcgctttgtccacattcgcctcccactctccggcactaagagaacgacgaaatctacggccacgaggaggcacaagggcagtgagctcagaggcagggagatctag

SEQ ID NO: 18556 - DNA, 1194 bp, Oryza sativa
  Clone ID: PAT_MRT4530_24102C.1
atggggaagctgctgatggggaacacgctcaatgcatcagctcgatttgagtcggaaaattgtgccgtgaatagttttaaggccctcaaccggcggtctgatcggccaacatatggcggtgactcgatgcctcgggagagtatttgcggtgatggaccgggagtcggcttggggataagacgacgtctgtggaggctgcctacctcggagagaatcaataaagtcgtcatccactttaagagttcttcgatttgtgtttcaccgggtttcggcggtctaaccggcggtgcactggcggtcagaccggcagcgtcacagcggtcagaccggcggggacacggcggtcagaccggcttcggcaacaagcgacaagagctgatctcggcgcttgggagaggcaaaagagaagacaaagatggtgagaagaccaatgacaacaagccgaagggtacattcaaagggaggaagatcaaggagaatctcaagaaggcttttgatcaagtctacgccgcgtttgaagcactaagcgatgtagatggagagagtggagatgaagataagggaaagaacatctccggtgtttgcttcatggcgtgtggtgaatcggagtcagagtgtgaagacaatgagaccgggcaccagtcagactggcggtacagacgcggtcggaccggcccccggaaggagaacgtgcggatcgtggattccggttgttcgcggcacatgaccggtgataaaaattggttctcctccctcaaaaaggcatccaagactgaatcgattatctttggtgatgcttctactagtgccgttctcgctacaagtttggtaaaggttcagtgggaggatggtcgtatttttaaagacgagagcgacgatgacgacgaggttggctcggccggtcagactgggcgccaggccggtcagaccgccggcacaccgccgatcagaccgacacaggtgttgcgggaatttgagatgagcatgatgggtgagttatcgtactttttgggattgcaaattaagcaaacacctcaagctgtgttggatcctgatgaagatggtgaagctgttgatcaaaaggagtatagaagtgactcgatgcctcgggagagtatttgcggtaatggatcaggagtcggcttggggataagacgacgtccgtggtggtcagagatcatgcgggatacttag

SEQ ID NO: 18557 - DNA, 474 bp, Oryza sativa
  Clone ID: PAT_MRT4530_24103C.1
tgcgaggggtggagggggagaggcgtgctggcggcaggtagtttctttcttttccgacaaggactatatctccctatgggtataaatatgtacactcggggtcattgtaatctatcaatctcttgatcaatacaactactctcggcgcatcgccaccccctttcctgaggtttttacttataaaccagcggaatttggcacctgacgcggggctgcatcggttcagttcgatctccggcgaaggggtaataagtcctatgttccgccggccctggtgaatctattggctacgttggtgttgttcaaggctgcatcgtttcgatcccttggattgctctggtttggttgatatatttgcctacctgatatctcaattctatctctagttgcattgtgtttagagacgcatcggtttagtgctggcacttgcatgacttgtgacggaagggcttgcatcggcgcttgcgggtagac

SEQ ID NO: 18558 - DNA, 592 bp, Oryza sativa
  Clone ID: PAT_MRT4530_24104C.1
cgactactacaacaacggcctgccctccaacctgtccggtgggcgcaaccccagcctggactacgggttcaaggtgcgccgagatctgccatggcgtcgtactgctctgagctgcagttcctggtgcaacccggtcaccaaccacgtccagagcgccgagcagcacaaccaggacgtgaactccctcggactcatctcctccaggaagacggccgaggccatcgagatcctgaagctcatgtcctcgacgttcctgatcgcgctgtgccaggccgtggacctgcgccacatcgaggagaacgtcaagagcgccgtcaagagctgcgtgatgacggtggcgaagaagaccctgagcaccaactccaccggcggcctccacgtcgcccgcttctgcgaaaaggacctgctccaggagatcgagcgcgaggcggtgttcgcctacgccgacgacccctgcagcgccaactacccgctcatgaagaagctgcgcaacgtgctcgtggagcgcgccctcgccaacggcacggccgagttcgacgccgagacctccgtcttcgccaaggtcgcccggttcgaggaggagctccgcgcg

SEQ ID NO: 18559 - DNA, 8937 bp, Oryza sativa
  unsure (1)..(8937): unsure at all n locations
  Clone ID: PAT_MRT4530_24105C.1
atggattatcaacaatcagatggaatttatgacatgccagatgaaccattgtttacactaaatttgaggttgagccacagcaatgacctggatagagttcataaatctttcaccagcaagattgataaggcccgaacgtatctcacgggtaggttcagaaggattgtcaaggtcaaaggttctaagagaaaggagttcgttcttacccctgaaggccctgatgtttttaccattgctttcactgatggtactaacagagtaactgccataattgaagagagaaatatgtggttgagaggtttccaaactgcagacggacacatttttgagtttaatgatgaacacggcaatgaagggaaggatgctaatctggatgacaagactgatgaaatgaataatcagttcaatggtaatgacaaaacaagagatgaggaggtgaaggatgaggaagaggctataaaggaccaaaaactgaaggttataaaggacccaaagatgaaggctataaaggaccgagggatgaacaagcactgcaaacaaaaagaaaagagcaaagcagcatgtggatccaaaaagaagcaagtgaataggaaagaccaactcaatccaaaaaagtatattagaggatctgttctcttacggcatgatagcaattatggttctcttcttggacctaacagactgcctctgtttcaagtagtatacagtacaatgagggatatgctgcagaatttggctcactttgatccaaacaactattcagataaacacaagcgctcgatggctgcactgatcatccatacagctgagactttgaagaataaatatatatcaagtcttgtgttaaattctttcaatccacatattggtgcaaggcttcaagcactggatgatatgggagcagcacatattaacgggtggtctacagcctctgaattaattttgaaatccattcacctcccatcaaaggtttgggactttcaacagcaagaattttccaagtgcaatgaattttacaaaaatcagtgctggactacagatccaaatgtcgcaatgaagtcaattgtgtttttaaaaggcgatgcttacacggacactactgcctctactgtgatggcgccgccctcgggaaaaccgggtgccatttctcttctgaagcctccggtcatcttcaacggactcaacttccgggagtatgcattgcatatgcagatacacatgtgcagccagtggttgtggggctacctcatcggcgatcggccttgcccgccttgtccaaccttgcctgctgagcctgccatctcggcagatgctgatgagaacactaagcgtggtctccttgatgatcttgctgctgctatggaggcgtatcaaacagatctctctctatatgagacttggttagagcaggaggcctatgccaaggctattttggttgggagcatggagcagtacgagcctcgcaacgatgccatgtttcttgccgttgtgaatgaggcacaatctcttcgtcagcttgatgccactgtggatgagttctttcgcaagatgtctgcggtgtggcgtcaaatggacctacagggcgctgatgtttgtcgcacttgtacctgttgtcagcgccagagggtccagactgagaccactcgcctctatgagttcttgtctcgtttgaggcctgagtttgagcctgttcgagctcagctgttggcacgacgccctcgaccttcattgttggagaccttgcctgagctacgggctgaagagactcgttgtcgtgaggctggtataggcattgcacagcagtccacctctgtcttggttgcacagggcttgccttctcaggtccatgtctctgcccagcctgttgtggtgccatcacctttacctgttgcggctggtgctcctagtactccttcaggcattgtttgcgggtactgtagcaagacagggcacaccgcctctatgtgctacaagaagaagagagatcagagtcatcgcacctctcagggctctcgacagggctcttctcagtcaagctctcagcagatcacatcgaccgagcaagagcttgtaaggctccttcgtcgtcttatgactacagcctctacctccacccatgggtctgctgctcaggcttctagtcttccaccaccacctccatcctcttcaggtatattgtcctcgtggtttcttgattctggtgcttccttccatatgacacccgattccacacatctttcttctatgagtcctcctgatacccctctcacagttcagacagctaatggcacctcacttcctgttgttgatcgtggcacactttctacttcttcctttcgagttcctactgtctctcatgttcctaagttaaccatgcagcttatgtccgctggtcagatcactgatcatggttgtcggattatacttgaggctgactcttgttgtgtccaggatcgtcgcacagggctcctggtggggactggtcctaggcgccatgactctcagcgtctttgggagcttgattggctacatctcccttctgatgcttctaccagccagtcagtcggttccactgcttcagcgttagctacttcagccactactacttttgctcagtggcatcgttgtttaggtcatctatccggtgctagattatccacacttattggtagttggggtcttaggtcctgtttctggagacaccgctctacatttcaatttctttctatttatcagcagtttgctactatggttcgcactcagtacgattcttccatacgggtttttcgtgctgactctgttgctcctgctcctgcttctcggtatgatcttcgtgatcgccatgctattaggcctgcgcctaagtatggctttactgctgcggctattgttgagcccacgacttaccgagaggctattgcccaccaggagtggcaacaggcgatggcagaggagattgctgccttagagcgtaccaagacttgggatgttgttcctgcacctactcacgtcactcctatcacttgtaagtgggtctacaagataaagactcgctctgatggctctcttgagcggtacaaagctcgtcttgtagctcgtggttttcagcaagagcatggtcgtgactatggtgagacttttgctccagttgctcacatgaccaccattcggaccctgttagctgttgcctctattcgtcagtggtccatttctcagctcgatgtcaagaatgcctttctcaatggtgagctgcatgaggaggtctatatgcagccccctcctgggtattctgtccctgatggcatggttcttcgtctgtgtcgttctctttatggtctcaaacaggcccctcgtgcctggtttgagcgcttctcctcagttgtcactgatattggcttcaaagccagcgaccatgaccctgctctctttgttcacacttcttcttgtggtcggacccttcttcttctatatgttgatgacatgatcatcactggtgatgactctcggttcattaatcttgtgaagaagcgtcttagtgaccaattcttgatgtctgatttgggtcctctcaggtactttcttgggattgagttctcttccacgtcttctggtttctacctctcccaagagaagtatattcaggatctccttgctcgttcgggcctcactgataagcgtgtggttgacactcctatggagcttgggatacatctacggcccaatgatgctagtgaccactctgatcgtcgctctctctctgcttattgtgtctttcttggttcctctctgattgcatggaagaccaaaaagcagactgcagtttctcgttcaagtgcagaagctgagttacgagctatggcagccttgaccgctgagatcacttggctgcgttggctcctggaggattttggagtttttgtctctcccccgactccactcttgtcggacagtactggtgcaatcagcattgctcgagacccagtgaagcatgagctaaccaaacacatcggcgttgatgcctcatacatgagatcgcaggtgcaaaatgaggttgtggctcttcatctgaatgcatctgttggtgtggttgttatgggtggcattaaccatattctgatgcataattgggaggtaccatgtgcagctgaaatttccttaaaggcaagttcttactcagcaaagatccctatcgttgaaggagaggttaaagttttcaccgaccatcacaatcaactatacacctctcatctaaaactaagttcaaaagaaggtcagaaggaggttaaagtgcgtttgtatgttgatggctttttagcattaacagcgaagtcttgtcaagtggagaatgaagaagttttgcgggatgaaaagggcgaaacatgtacagataatgataaggtgactcgatgtctcgggagagtatttgcggtgatggaccgggagtcggcttggggattagacgacgtccgtggtggtcagagatcatgtgggatacttaggctagagttgatgcacgtggttgatggagattccatatggcatacgatggagttattgtgtgcgtatgggatgcggagtcgaatttggaaggagtccaaatttgagagaagtaataaagtcgtcatccactttaagagttcttcgatttatgtttcaccgggtttcggcggtctaactggcggcgcaccggcggagtacattaaatttgagatgaaatctggagaggctttggatgactatctttctagatttaataaaattttgagtaatcttagatctgttgattcttcttatgatgctaattatccacaatctaagatttctcgtcactttttgaatggtctcgacatgtctatttgggatatgaaagttacatctattcaggagtctgttaacatgtctactttgactttggattcactttatactaaattgaaaacacatgagatgaatattctttctcgcaaagttgattctaaatcgagtgctttggtttcttcttcttcttctttggttgttgatgtttcttcatctatgccttcttttcttgctgcttttaatgccacatccgatgatcaactcgaacaaatcgaggaggaggatttggctttggtcgctaacagaattgctcgagctatgaataatgccaggaacaggaaaagaggtggtccaaatcgttgctttgaatgtgattcaattgatcatcttcgttcgcattgtcctaagcttgggagaggcaaaagagaagacaaagatggtgagaagaccaataacaacaagcccaacaactacaacaagtcaaagggttctaaccaagggaggaagatggagaatcttaggaaggcttttcaacaagtttgcgccgctttcgagccactaagtgatgtagatggtgaaagtggagatgatgataatggaaagaatgtctctgatgtttgcttcatggcacgtggtgaatctgacacagaattaaaatctcttattccaaatgatgatgattgtgaaaattgtgaggttttaatgaatgatatttcaaaaattagagatgttaatgctgcacatgatttgaaaaatagatcttctcttgcttgtagttttgctttgcatacacgcactttggatgagttgtttttaactaaaaagttgttgcaaaaatatcaaattgcttttcatgctagtttgatgtttaacatgatttctgctaaaaagttaaaacaacctcatgatgttttggattgctcaacatgtaatttaaataaaatgaaactaaaagatgctttaggacgtgttgagtatatggaagatgttgtaaaaaacaatgaagtgctttctttccccaaatgtcgtaaaagcaaaggtgtaatggtagattgtgaaaattgtgctaatttggaaaaagaggtttcttatttgaaaaattccttgctaagattttctgatggcaaaaagaatctcaatatgattttggatcaattaaaggtgttggtgctagaggtggctttggtggcaaggaaggagaacgtgtggatcgtggattctggttgttcgcggcacatgaccggtgataaaaattggttctcctccctcaaaaaggcatccaagactgaatcaattgtctttgctgatgcttctactagtgccgttgtcgctataggtttggttaaggtaaatgaaaaatttgaattgaagaatgtagctttggttaaggatttaaaatacaatttgctttcagtttcacaaattgttgatgaaaattctgaggttcactttaagaaaactggaagtaaagtttttgattcttgtggtgattctgtgctgaatatttctcgctatggaagagcgtttaaagctgattttgaaaattctgtttcacctgtgacaacatgtttggttgctaagtttgataaagatgtgatgttttggcattgtagacttggacatgttggttttgatcatctcactaggttaagtggtttggatcttgttcgtggtttgcctaaacttaagaaagatcttgatttggttcagggggaggatggtcgtatttttgaagacgagagcgactacgacgacgacgacgaggtcggctcggccggtcagaccaggcaccaggccggtcagaccgccggcacacctccggtcagaccggcccatgaggagcggtcagaccggccaggtttgtcgggttcgggtactgttgatgtagatcgagatggtcctccagagaattcaacttcgaccagtactggaacaaaacgtggatcaacttcagaagttgctgctcctttgtacattcaacgacgacatccgccggaacaaattattggtaatataggtgagcggactacaaggtctaaggtaacgactcatgatgtttgtgcaaattctgcatttgttgcttcttttgaacccaaagatgtgtcacatgcattaactgatgaatcgtggattaacgccatgcatgaagaacttgaaaattttgagagaaacaaagtttggactttagttgaaccaccttctggacataatattattggaaccaagtgggttttcaaaaataaacaaaatgaggatggtttgattgtgagaaataaagctagacttgttgctcaaggttttactcaagttgagggtttggattttgatgaaacttttgctcctgttgctagaattgaggcaattagacttttgttggcttttgctgcttcaaaaggtttcaaattgtatcaaatggatgtgaaaagtgcttttctaaatggttttatactggaggaagtttctgtcaaacaaccaccgggttttgaaaatcctgattttcccaatcatgtttttaaattgtctatagctttgtatggtttgaaacaagctcttagggcatggtatgataggcttaagaactttttgcttgcgaaaggttttacaatgggaaaggttgacaaaacgctttttgttcttaagcatggtgataatcaacttttcgttcagatttatgtggatgatattatctttgtttgttcgactcacgccttggttgtagattttgctgagactatgcgcagggaatttgagatgagcatgatgggtgagttatcgtactttttgggattgcaaattaagcaaacacctcaaggtacttttgtgcatcaaacgaagtatacgaaggatcttttgcgacggttcaagatggagaatttgcagccaatttcaacaccaattggntctacagctgtgttggatcctgatgaagatggtgaagctgttgatcaaaaggaatatagaagtatgattggatctttgttgtatctaactgcttctaggcctcacatacaatttgctgtgtgtttgtgtgcgggctttcaagcttctcctcgtgcttcacatcgtcaagcggtcaaacgaataatgaggtatttgaatcatacacttgagtttggaatttggtcttctacttcatcttctatatgcttaagtggatattccgatgctgattttggaggttgtagaattgataggaaaagtactagtggaacatgtcattttcttggtacatcattgattgcatggtcttctaggaaacaatctagtgttgctcaatcaactgctgaatctgaatatgttgctgctgctagttgttgttcacagattctctggcttttatctactttgaaagattatgatcttacttttgagaaagtacatctcttttgtgataatactagtgctatcaatattgctaagaatcctgttcaacactcacgcacaaagcacattgatattcgttttcactttttgagggatcatgttgagaaaggagatgttgaattgcagtttttggacacaaagttgcaaattgctgatattttcactaaacctttggattctaatcgctttgcttttcttcgtggtgaattgggtataattcatccttttggcatggtgactcgatgtctcgggagagtatttgcggtgatggaccgggagtcggcttggggattagacgacgtccgtggtggtcagagatcatgtgggatacttaggctagagttgatgcacgtggttgatggagattccatatggcatacgatggagttattgtgtgcgtatgggatgcggagtcgaatttggaaggagtccaaatttgagagaagtaataaagtcgtcatccactttaagagttcttcgatttgtgtttcaccgggtttcggcggtctaaccggcggcgcaccggcggtcagaccggtggcatcgcggcagtccgaccggcgaacacacggcggtcagaccggcggcgacaggagtcgtcggcaggctttctcggcggttcgaccgatcaatctacatcggtcagaccgacgttcatcaggcggtcagaccggcgcaactacttcggttagaccgcgatccatcgatttcgagggtaacttttatttccgctaa

SEQ ID NO: 18560 - DNA, 2196 bp, Oryza sativa
  Clone ID: PAT_MRT4530_24106C.1
atggacgcgccagagtcggagctcgtgccagactccttcacactggagttgcaggagctcgcgccggactccatggacacgccggagttggagctcgtgctggactccttcacgccagatttgcaggagctcgcgccggattccgtggaagcgccggagtcagagctcgtgccggactcctttgcaccagagttggaggagctcgcgccggaatcggagatggtgccggattccttgccgccgggcgcttttgtatgcggtcgctgtcatctcgtccatgaggaccgccaagcatgggaccgtgctgactcgcggttctggccgtgctctcgctgcggtctcgtccacatggaatacatgctcggtgccaagctttacggcctcgacgagttcgactgcaaggttttcattcctgatctgaacaatgtcgtgatgcatggcaacagtatcgagttacctgcacacgtgctcaagatgctcgacgagaagcgcaaatgtgaactcactgccgagaaggatgacgcatttttgagagaggtagaaccatttttcatcaatgaacacaagataagggcaaaaacaaaaaccctaaaaaacatggcaaaatcaatattaaacatcgatgtaggggctttggtggcaagaaaggggaacgtgtgtatcgtggattccggttgttcacagcgcatgcccggtgataaaaattggttctcctcgctcgaacaggcatccaagactagtgccgtttttgctacaggtttggtcaaggtaaatgacaagtttgaattgaaaaacgtagctttggttgaggacttaaattataatttgctttcagtttcacaaattgttgatgaaaattttgaggttcactttaagaaaactagaagtaaagtatttgattcttgtggtgattctgtgctaaatatttctcgctatggaagagtgtttaaagctgattttaaaaatcctgtttcacctatgataacatgtttggttgctaagtttgataaggatgtcatgttttggcatcgtagacctggacatgttggttttgatcatctcatgaggttaagtggtttgcatcttattcgtggtttgcctaaacttaagaaagatcttgatttggtttgtacatcgtgtcatcatgctaagatggttgcttcttcacatgctcctattgtttctgtgatgacggatgcaccgggacagctattacacatggacactgtaggtccagctagagtgcaaactgttggaggaaagtgttaccccgcacaccctcgtggctatcgtgtacttattttggaaactaacaaaattgttgagacttccgaagtttcttttgatgagactagtcctggtactagaccagaaattgcaagtacattgtcacaggtgcaggaggaggatggtcatatatttgaagacgagagtgacgacgacgacgaggtcgactcggccgaggctacaacttcgaccaatactggtacagaacgtgaaacaacttcagaagtcgctgctcctttgcatattcaacgacgacatccgccggaacaaatcactggtaatctaggtgagcagactataaggtctaaggaggaagtttatgtcaaacaaccaccaggttttgaaaatcctgattttcccaaccatgtttttaaattgtctaaagctttgtatggcttgaaacaagcaactagagcatggtatgataggcttaagaattttttgcttgcgaaatgttttacaattggaaaggttgacaaaacacttttagttcttaagcatggtgataatcaactgttcgttcagatttatgtggatgatatcatctttggttgttcaactcacgctttggttgtggagtttgctgagactatgcgcagggagtttaagataagcatgatgggtgagttatcgtactttttgggattgcaaattaagcaaacacctcaagctgtgttggatcctgatgaagatggtgaagctgtaactaacaacatgattgaatctttatcatatctgattgcttctaggccagacatacaatttgctgatcgtaaagggcctttacaaccccaaaagctagccattgaggtgaggggctcccccacttatatcttaggtcatttgcccttccacattcaatgtgggactattcaacaatctcgcccttcacacattggtgccccttag

SEQ ID NO: 18561 - DNA, 4528 bp, Oryza sativa
  Clone ID: PAT_MRT4530_24107C.1
agatcaatcttggtcagaccgacttccatcgatttcgaggctcgcaacattcttttgagtggtatttctcgttcggattatgatcgtgttgcgcactttcgaactgctcatgaaatttggaatgctttgagtaacttttatcaaggaacaaataacattaaagaacttcatcgtgatattttcaaaaaggagtatattaaatttgagatgaaacctgaagaagctttggatgactatctctctaggtttaataaaattttgagtgatcttagatctgttgattcttcttatgatgctaattatccacaatctgagatttctcgtcactttttgaatggtcttgatatgtctatttgggagatgaaagttacatatattcaggagtctgttgacatgtctagtttgactttggattcactttatacaaaattgaaaacacatgagatgaatgttctttctcgaaaagttgattctaagtcgagtgttttggtttcttcttcttcctctttggatgttgatgtttctttatctaagtcttcttttcttgctgtttttaatgccacatccgatgatcaactcgaacaaatcgaggaggaggatttggctttagttgctaacaaaattgctcgagctatgaataatgccaggaacaagaaaagaggtggtccaaatcgttgctttgaatgtggttcaattgatcatcttcgttcgcattgtcctaagcttgggagaggctaacgagaagacaaagatggtgagaagaccaacaacaacaagccgaagggttcatcccaagggaggaagctggacaatctcaggaaggcttttcaacaagtttgtgctgccttcgagccactaagtgatgtagatggcgaaagtggagatgatgataagggaaacaacatctccgatgtttgcttcatggcgcgtggtgaatctgacacagagtatgaagataatgaggtaagtgcttttgaggaagctattaatattttgagtgaaaaaaataagaagtgtgagaagatgtatagaaaacaggaatttatcattgaatctcttaaatctgaaattgctagattaaaatctcttattcctaatgatgatgattgctcaaattgtgaggttttaatgaatgagatttcaaaaattagagatgttaatgctgcacatgatttgaaaaataaatcttctcttgcttgtagttttgctttgcacacacgtactttggatgagttgtttttaacgaaaaagttgttgcaaaaatatcaaattgcttttcatactagtttgatgtttaacatgatttctgctaaaaagttaaaacaacctcatgatgttttggattgcttaacatgtaatttgaataagttgaaattgaaagatgctttaggtcgtgttgagttcatggaagatgttgtgaaaaacaatgaagtgctttcttgcgctaaatgtcgtaaaagcaatggtgtcatggtagattgtgaaaattgtgctaatttggaaaaagaggtttcttatttgaaaaattctttgctaagattttctgatggtaaaaagaacctcaacatgattttggatcaataaaaggttatctgcttgtgtgtaggctttgtggcaaggaaggagaacgtgtggatcgtggattccggttgttcgcggcacatgaccggtgataaaaattggttctcctccctcaagaaggcatccaagactgaatcgattatctttggtgatgcttctacaagtgtcgttttcgctacacgtttggttaaggtaaatgaaaattttgaattgaagaatgtagcgttggttgaggacttaaagtacaatttgctttcagtttcacaaattgttgatgaaaattttgaggttcactttaagaaaactggaagtaaagtttttgattcttatggtgattctgtgttgaatatttctcgctatggaagagtgtttaaagctgattttgaaaatcctgtttcacctgtgataacatgtttggttgctaagtttgataaagatgtgatgttttggcatcgtagacttggacatgttggttttgatcatctcactaggttaagtggtttggatcatgttcgtggtttgcctaaacttaagaaagatcttgatttggtttgtacaccgtgtcgtcatgctaagatggttgctacttcacatgctcctgttgtttctgtgatgacggatgcaccgggacagctattacatatggacactgttggtccagctagagtgcaattcgttggaggaaagtggtatgtgttggttattgttgacgatttttctcgatattcttgggttttctttatggcaactaaggacgaagcttttcaacactttcgtggtttgtttgttcgattggatcttgaatttcccggttctttgaaaagaattcgaagtgataatggtgtttcacatttgcgtgtttttggttgcaagtgctttgtcttgaaatctggaaatttggataagtttgaggcacgttctaccgatggattgtttcttggttaccccgcacatactcgtggctatcgtgtacttattttggagactaacaaaatcgttgagacttgcgaagtttctttcgatgaggctagtccaggtagtagacccgatattgcaggtacactatcacaggttcaggggaaggatggtcgtatttttgaagacgagagcgacgacaacgacgacgacgaggtcagctcggccggacagaccgagcgccaagccggtcagaccgccggtacacctccggtcagaccggcacaggaggtgcggttagaccggccagggtcgtcagctgagggttctattaatgctgttcgagatggtcctccggagactacaactttgaccagtactgatacagaacgtgggtcaacttcagaagttgctactcctttgcacattcaacgacgacatccgccggaacaaatcattggtaatataggtgagcggactacaaggtctaaggtaacgactcatgatgtttgtgcaaattctgcatttgttgcttcttttgaacccaaagatgtgtcacatgcattaactgatgaatcgtggattaacgccatgcatgaagaacttgaaaattttgagagaaacaaagtttggactttagttgaaccaccttctggacataatattattggaaccaagtgggtattcaaaaataaacaaaatgaggatggtttgattgtgagaaataaagctagacttgttgctcaaggttttactcaagttgagggtttggattttgttgaaacttttgctcctgttgctagaattgaggcaattagacttttgtttgcttttgctgcttcaaaaggttttaaattgtatcaaatggatgtgaaaagtgcttttctaaatggttttatacaggaggaagtttatgtcaaacaaccaccaggttttgaaaatcctgattttcccaaccatgtttttaaattgtctaaagctttgtatggcttgaaacaagctcctagagcatggtatataggcttaagaactttttgcttgcgaaaggttttacaatgggaaagattgacaaaacactttttgttcttaagcatggtgataatcaactttttgttcagatttatgtggatgatatcatctttggttgttcgactcacgctttggttgtagattttgctgagactatacgcagggaatttgagatgagcatgatgggtgagttatcgtactttttgggattgcaaattaagcaaacacctcaaggtacctttgtgcatcaaacgaagtatacgaaggatctttaattttgagaaggttcaagatggagaattgcaagccaattttaacaccaattgattctacagctgtgttggatcctgatgaagatggtgaagccgttgatcaaaaagagtatagaagtatgattggatctttgttgtatctaactgcttctaggccagacatacaatttgctatgtgtttgtgtgcacgctttcaagcttctcctcgtgcttcacatcgtcaagcggtcaagcgaataatgaggtatttgaatcatacacttgagtttggaatttggtattctacttcatcttctatatgtttaagtggatattccgatgctgattttagtggttgtagaattaataggaaaagtactagtagaacatgttattttcttggtacatcattgattgcatggtcttctaggaaacaatctagtgttgcttaatcaaatgctgaatctgaatatgttgctgctgctagttgttgttcacagattctttggcttttatctactttgaaagattatggtcttacttttgagaaagtacctctcttttgtgataatactagtgctatcaatattgctaagaatcatgttcaacactcacgcacaaagcacattgatattcgttttcacatggacaccaagttgcaaattgctgatattttcactaaacctttggattctattcgctttgcttttcttcgtggtgaattgggcataattcatccttttggcatggtt

SEQ ID NO: 18562 - DNA, 240 bp, Oryza sativa
  Clone ID: PAT_MRT4530_24108C.1
atggccgtcgatttgacggtggtagagcctgggcggtgcgcggcgactatggttgtgctgcagatgcgcgcggtggaagagcttgcatttggccggctccgcccgtggtcgctagggtgtgaactgttcactgtggaggcggctacgggctacggcatcgttagtttggggcaactgccgtgtgccttggcggacacgagggtgaggatcctgagacgaaggccggaaggggtgaactga

SEQ ID NO: 18563 - DNA, 2112 bp, Oryza sativa
  Clone ID: PAT_MRT4530_24109C.1
atgggggacagccctgtcattccctcattaatagggggcagttggggcactgtgcgcattaaaggaagttcagcctgggccccctcctcgcttgctccccctgccaaacggcagctgggcgagggcctcggggcaaagcagtgcaagggcccgaggggcataacgtggcaccctgaggccccgaccccccggccgctcctgcggaacaggaaaagaggtggtccaaatcgttgctttgagtgtggttcaattgatcatcttcgttcgcattgtcctaagcttgggagaggcaaaagagaagacaaagatggtgagaataccaacaacaacaacaacaacaagccgaagggttcatcccaagggaggaagctagagaatctcaggaaggcttttcaacaagtttgcgccgccttcgagccactaagtgatgtagatggtgaaagtggagatgatgataagggaaagagcatctccaatgtttgcttcatggcgcgtggtgaatctgacacagagtttgaggaagctattaatattttgagtgaaaagaataagaagtgtgagaagatgtctagaaaacataaatttatcattgaatctcttaaatctgaaattgctagattaaaatctcttattcctaatgatgatgattacgaaaattgtgaggttttaatgaatgagatttcaaaaattagagatgttaatgctgtacatgatttgaaaaatagatcttctcttgcttgtagttttgctttgcacacacgcactttggatgagttatttttaactaaaaagttgttgcaaaaatatcaaattgcttttcatgctagtttgatgtttaacatgatttctgttaaaaagttaaaacaacctcatgatattttggattgctcaacatgtaatttgaataagttgaaattgaaagatgctttaggtcatgttgagttcatggaagatgttgtgaaaaacaatgaagttctttcttgccctaaatgtcgtaaaagcaaatgtgtcatggtagattgtgaaaattgtgctaatttggataaagaggtttcttatttgaaaaattctttactaagattttctgatggtaaaaagaacctcaacatgattttggatcaatcaaaggtgttggtgctagaagtggctttggtggcaaggaaggagaacgtgtggatcgtggattccggttgttcgcggcacatgaccggtgataaaaattggttctcctcactcaagaaggcatccaagactgaatcgattatctttggtgatgcttctacaagtgtcgttctcgctataggtttggttaaggtaaatgaaaaatttgaattaaagaatgtagatttggttgaggacttaaagtacaatttgctttcggtttcacaaattgttgatgaaaattttgaggttcactttaagaaaactggaagtaaagtttttgattcttgtggtgattctgtgttgaatatttctcgctatggaagagtgtttaaagctgattttgaaaatcctggttcacctgtgataacatgtttggttgctaagtttgataaagatgtgatgttttggcatcgtagacttggacatgttggttttgatcatctcactaggttaagtggtttggatcttgttcgtggtttgcctaaacttaagaaagatcttcatttggtttgtacaccatgtcatcatgctaagatggttgcttcttcacatgctcctattgtttctgtgatgacggatgcaccgggacaactattacacatggacactgttggtccagctagagtgcaatcagttggaggaaagtggtatgtgttggttattgttgacgatttttctcgatattcttgggttttccttatggcaactaaggacgaagcttttcaacactttcgtggtttgtttcttcgattggatcttgaatttcctggttctttgaaaagaattcgaagtgataatggtggtacactgtcacaggttcaggaggaggatggtcgtatttttgaagacgagagcgacgacaacgacgatgaggaggtcggctcggctggtcagaccgggcgccaggccggtcagaccaccggcacacctccggtcagaccggcatag

SEQ ID NO: 18564 - DNA, 236 bp, Oryza sativa
  unsure (1)..(236): unsure at all n locations
  Clone ID: PAT_MRT4530_2410C.1
acttgaccccttgggaatcatgcttcttggatgctggactggaaacgtagttgctccccgtggttaacaatggcccaaagacctccggttcctttatgtctgctgtgcataancagtagtctcctagatgttttttgttacagcttcatcccncttggcatttaggaattcttattgtctccatgtataattncnaataccaatccatggtttgaatatttggtaaaaaaaaaaaa

SEQ ID NO: 18565 - DNA, 3561 bp, Oryza sativa
  Clone ID: PAT_MRT4530_24110C.1
atggcgcgtggtgaatcggatacagagtatgaagataatgaggtaagtgcttttgaggaagctattaatattttgagtgcaaaaaataagaagtgtgagaagatgtatagaaaacaggaatttatcattgaatctcttaaatctgaaattgataggttaaaatctcttattcctaatgatgatgattgctcaaattgtgtggttttaatgaatgagatttcaaaaattaaagatgttaatgctgcacatgatttgaaaaatagatcttctcttgcttgtagttttgccttgcatacacgcactttggatgagttgtttttaactaaaaagttgttgcaaaaatatcaaattgcttttcatgctagtttgatgtttaacatgatttttgctaagaagttaaaacaacctcatgatgttttggattgctcaacatgtaatttgaataagttgaaattgaaagatgctttaggtcgtgtcgagttcatggaagatgttgtgaaaaacaatgaagtgctttcttgccctaaatgtcgtaaaagcaaaggtgtcatggtagattgtgaaaattgtgctaatttggaaaaagagttttcttgtttgaaaaattatttgctaagattttctgatggtgttggtgctagaagtggtgagattttggttaaacctgatactaacaaaactgtgtttaaatctgctggtatcatgtttaccttgaatgcatcttcttcaaaatccaatgttgtgcatgcaaaatctcctgttgttgctggtattgctaaatcttctaatgctaccaatattagctcacaaacagaaaaaggagagagagattgcttttgcaaaattaaagtggcaaaaatcgggttttccctcgaggaaacaggtcagatcgcagtgtgtcccgcggtcagaccggcgaccggtcagaccggtactgagcgttggtcagaccgggcaccggctttggtggcaaggaaggaaaacgtgtggatcgtggattccggttgttcgcggcacatgaccggtgataaaaattggttctcctcacttcagaaggcatcaaagactgaattgatcatctttggtgatgcctctacaagtgccattctcgctacaggtttggttaagatgtttgcttcttcacatgctcctactgtttctgtgataatggatgcaccaggacaactattacatatggacactgttggtccagctagagtgcaatctgttggaggaaagtggtatgtgttggttattgttgacgatttttctagatactcttgggttttctttatggcaactaaggacgaagcttttcaatactttcgtggtttgtttcttcgattgaatcttgaatttcctggttctttgaaaagaattcgaagtgataatggtggtgagtttaaaaatgtttcttttgaacaatttcgcaccgaaaaaggtcttgaacacgaattttcttctccacgtgttcctcaacaaaacggtgttgttgaaaggaaaaaccgtgttttggttgagatggctagaacgatgttggatgaatataaaactcctaaaaaattttgggctgaggctattaacgttgcttgttatatttcaaaccgggttttcttgagatctaaacttggaaaaaattcttatgaacttcgatttggacatcaacccaaagtttcacatttgcgtgtttttggttgcaagtactttttcttgaaatctggaaatttggataagtttgaggcacgttctaccgatggattgtttcttggttaccccgcacatattcgtggctatcatgtacttattttggagactaacaaaatcattgagatttgcgaagttttttttgatgaggctagtccaggaactagacccgatattgcaggtacacagtcacaggttcagggggaggatggtcgtatttttgaagacgagagcgacgacaacgacgacgacgaggtcggctcggccggtcagaccgggcgtcaggccagtcagaccgccggcaaaactccggtcagaccgcctcaggaggagcggtcagaccggccagggacgtcgggttcaggtactgttgatgctgatcgagatggtcctccagagattactacttcgaccagtactgatacagaacgtggatcaacttcagaagtcgctgctcctttgcacattcaacgacaacatccgccggaacaaattattggtaatataggtgagcggactacaaggtctaaggtaacaactcatgatgtttgtgcaaattctgcatttgttgctttttttgaacccaaagatgtgtcacatgcattaactgatgaatcgtggattaacgccatgcatgaagaacgtgaaaattttgagagaaacaaagtttggactttagttgaaccaccttctagacataatattattggaaccaagtgtgttttcaaagataaacaaaatgaggatggtttaattgtgagaaataaatctagatttgttgctcaaggttttactcaggtggagggtttggattttgatgaaacttttgttcctgttgctagaattgaggcaattagacttttgttggcttttgctgcttcaaaaggttttaaattgtatcaaatggatgtgaaaagtgcttttctaaatggttttatacaggaggaagtttatgtcaaacaaccaccaggttttgaaaatcctgatttttccaaccatgttttcaaattgtctaaagctttgtatggcttgaaacaagctcctagagcatggtatgatagacttaagaactttttgcttgtgaaaggttttacaatgggaaaggttgacaaaacgctttttgttcttaagcatggtgataatcaactttttgttcagatttatgtggatgatattatctttggttgttcaactcacgctttggttgtagagtttgctgagactatgcgcagggaatttgagatgagcatgatgagtgagttatcgtactttttgggattgcaaattaagcaaacatctcaaggtacatttgtgcatcaaacgaagtatacgaaggatcttttgaggcggttcaagatggagaattgcaagccaatttcaacaccaattggttctacagctgtattggatcctgatgaagatggtgaagctgttgatcaaaaggaatatagaagtatgattggatctttgttgtatctaactgcttctaggccagacatacaatttgttgtgtgtttgtgtgcacgctttcaagcttctcctcgtgcttcacatcgtcaagcggtcaagcgaataatgaggaaacaatctagtgttgctcaatcaactgctgaatctgaatatgttgttgctgctagttgttgttcacagattctttggcttttatctactttgaaagattatggtcttacttttgagaaagtacctctcttttgtgataatacaagtgctattaactttgctaagaatcctgttcaacattcacacacaaagcacattgatattcgttttcactttttgagggatcatgttgagaaaggagatgttgaattgcagtttttggacacaaagttgtaa

SEQ ID NO: 18566 - DNA, 339 bp, Oryza sativa
  Clone ID: PAT_MRT4530_24111C.1
atggaggttgaggtggggagggagggggacggcgtaacggcgacggccagcgagggcgacgttccacgccggggacgaagagaaacggccttgagacgccggcctggacgcgccaccgacgaggggtcacgagacgaagcgaggcggcggtggcacgccggcgatggtggacgaccggcggcggcggcggcttgccgcgccggcctgggcacgccagcttgggcgcgccgccggatctggcgaggcgagacgaccggcggcggcgcgccggcgatggcgacgaccggcggtggcgcgccggcgacggagacggagacgaccggcggcggcggcagctag

SEQ ID NO: 18567 - DNA, 564 bp, Oryza sativa
  unsure (1)..(564): unsure at all n locations
  Clone ID: PAT_MRT4530_24112C.1
ttttttttttttttttttttttttttttttttttgaaaacacaaacaggttatatnttcccaaaagtacatttggacatgcgcactcatcaaatgcatacctactcacacaggtgagttctntccacatgcttaaaaactcggtgtacaccagaaccaaatcaagnggattttacaaccacaccgcataaaccatgtgccctctttcctgcctgctagtgtgaaagaaacaacgttgttactgtaactttcatggttatttacaccttaatttgaagcgcacacacacttcctcgacgtgcgctttacaccaacgtggtgcaacgggatgtcgccggatcgtacacggcggggagaaggtacttccggccatgggcgccgacggcgttgtagctgccaccggtcgtctcgtcgacgagcaccttcccggcgtacccggggtacgagtcgctcccgtacgcgccggcgcacgccgagcacgcctcgagcgccgcgtccttgtcgccgaggtagtagccgtcgccgaacggnttggtcacggcgccggccancacgccggcgagcg

SEQ ID NO: 18568 - DNA, 2508 bp, Oryza sativa
  Clone ID: PAT_MRT4530_24113C.1
atgccaggaactggaaaagaggtggtccaaatcgttgctttgaatgtggttcaattgatcatcttcgttcgcattgtcctaagcttgggagaggcaaaaagagaagacaaagatggtgagaagaccaacaacaacaagcccaacaactacaagtcgaagggttctaaccaagggaggaagatggagaatcttaggaaggcttttcagcaagtttgcgccgccttcgagccactaagtgatgtagatggtgaaagtggagatgatggtaagggaaagaacgtctccgatgtttgcttcatggctcgtggtgaatctgacacagactatgaagataatgaggtgagtacttttgaggaagctattaatattttgagtgctaaaaataaaaagtgtgagaagatgtataaaaaacaggaatttatcattgaatctcttaaatctgaaattgataggttaaaatctcttattcctaatgatgatgattgtgaaaattattgcttaacatgtaatttgaataagatgaaactaaaagatgctttaggtcgtgttgagtacatggaagatattgtgaaaaacaatgaagtgctttcttgccccaaatgtcgtaaaggcgaatgtgtcatggtagattgtgaaaattgtgctaatttggaaaaagaggtttcttatttgaaaaattctttgctaagattttctgatggtaaaaagaacctcaacatgattttggatcaatcaaaggtgttggtgttagaagtggctttggtggcaaggaaggagaacgtgtggatcgttgattccggttgttcgcggcacatgaccggtaataaaaattggttctcctccctaaagaaggcatctaagactgaatcgattatttttggtgatgctgctacaagtgccgttctcgctacaggtatggttaagttgatgaaaattttgaggttcactttaagaaaactggaagtttttgattcttgtggtgattctgtgttgaatatttctcgctatggaagagtgtttaaagctgattttgaaaatcctgtttcacctgtgataacatgtttggttgctaagtttgataaagatgtgatgttttggcatcgtagacttggacatgttagttttgatcatctcactaggttaagtggtttggatcttgttcgtggtttgcctaaacttaagaaagatcatgatttggtttgtacacgatgccgtcatgctaagatggtttctacttcacatgctcctattgtttctgtgatgacggatgcaccgggacagttattacatatggacaccgttggtccagctagagtgcaatctgttggaggaaagtggtatgtattggttattgttgatgatttttctcgatattcttgggttttctttatggcaactaaggacgaagcttttcaacacttccgtggtttgtttcttcgattggagcttgagtttcaaggttctttgaaaagaattcgaagtgataatggtaatcgtcacctccacaaagagcgactcgctgtataccgttggcatgctagctttatctgttcgggcaatacgatgcccattgtacttgttgactggtctgatatccgtgagcaaaaacggcttatggtattgcgagcttcagtcgcactacacggtcgttctgttactctttatgagaaagcgttcccgctttcagagcaatgttcaaagaaagctcatgaccaatttctagccgaccttgcgagcattctaccgagtaacaccacaccgctcattgtcagtgatgctggctttaaagtgccatggtataaatccgttgagaagctgggttggtactggttaagtcgagttcagggggaggatggtcgtatttttgaagacgagagcgactacgacgacgacgaggtcggctcggctggtcagaccgggcgccaagccggtcagaccgccggcacacctccggtcagaccggcgcatgacgtgcggttagaccagccagggtcgtcaggttcgggtactgttgatgctgatcgagatggtcctccggaaattactacttcgaccagtactgatacagaacatggatcaacttcagaagtcgctgctcctttgcacattcaacgacgacatccgccggaacaaattattggtaatataggtgagcggactacaaggtctaaggaggaagtttatgtcaaacaaccaccaagttttgaaaatcttgattttcccaaccatgtttttaaattgtctaaagctttgtatggtttgaaacaagctcctaggcatggtgtgataggcttaagaactttttgcttgcgaaagatatatgtggatgatatcatctttggttgttcgactcacgctttggttgtagattttgctgagaccatgcgcagggaatttgagatgagcatgatgggtgagttatcgtactttttgggattgcaaattaagcaaacacctcaagattctttggtttttatctactttgaaagattatggtcttacttttga

SEQ ID NO: 18569 - DNA, 350 bp, Oryza sativa
  Clone ID: PAT_MRT4530_24114C.1
cccacgcgtccgcccacgcgtccggaagatagctaaagcttatgacacaatatacttacgtggggcctcgaacaatctgtgtggcaaggataaacacctgaatggctgaagtactataacttgtactaaaaggtcataatgtagcaaatggtccaggatcttctagagctactatcatatgctgcattattcgaggataccccctatactgaatatgccgaaaaatatgcagatgttcaagtagccttctacaaagactacgctcaaaattatgcttagctgaggcacgttcgtgctaatgtacattcaccttggggattgttactggacaatttaccgatccatgctta

SEQ ID NO: 18570 - DNA, 575 bp, Oryza sativa
  Clone ID: PAT_MRT4530_24115C.1
ctgcaggaatcggcacgagggagagaactagtctcgagtttttttttttttttttttgaaagtggaaagttcatgccaaaattcctatgaacaattttcatgttaggtagtggaaaacaaactaatccagagttggtggagaaacaaaacattacagtacaatccagtgaggaagcctgacgctaacagaggtcagactcctaataagttttcaaaaaaaaaagggggactcctaatagtacaacaaaaaagttcaggtgatagtcacacaacctgattggaacatatatcgggggccacacataaatttcagagcaaaacgcagaactttggctttacccgtggtttgaaggtattctcttaatcattgccacaagaatttcgtttgaaagggtgctattatgctccttaccgagtcgcgaaactgcaactttgaccataaaaatggagttctctgaaatttactctacatatatttgtgccaccctggaaaagagaaaccagtgctggatattgtgctgtatgtggtattgcaaattagtttcatccctcaaccaatgcagagactggattgg

SEQ ID NO: 18571 - DNA, 122 bp, Oryza sativa
  Clone ID: PAT_MRT4530_24116C.1
atggcttcatccatctccatccgtgcctttttgtgttatactcagcctgagcctcaaactaagcctaacccactagtcatgtgcaagtcaggtagtgctttgcatcagaggttcgaagacag

SEQ ID NO: 18572 - DNA, 609 bp, Oryza sativa
  Clone ID: PAT_MRT4530_24117C.1
atggtgaattgggtgcaccaaaatggcgaccgagttaaaggtgctggccccactcgtgaacccccatgggtgtccacgtgtgggccccacatgacgtgcctgaatgcgacaaccatggcaaggaaacaacggcgcgatggtgaaagaaggcgacgaggccccgtggctcaccatggtgaattggtgaagaggaggcgacgaaggacgatgaccggtgaagacttggcaatggaggtcttgaggtggatggggtggcggagtttctgtgggctccgggctcgacgaggcatggacaaggcgcaggacgatgtggcgaagataatggtggtaattatggatgaaaatgcactcgccaagcaaaggaaagcacctccaacggatcagacacgagtacacggattgaagggtccacaagctgaccaaatcacctcaaaatgggccaaccactttgtatccacaccagggcccaaggaacatcatcctagacaaaggggaggaagaaaggaggcaaaggaggatcagccaaaccatagtatgtctgagttctctcccgggaggttccggaggagtgttggagatgttggcattctcttcatgggagtcccgtag

SEQ ID NO: 18573 - DNA, 1993 bp, Oryza sativa
  Clone ID: PAT_MRT4530_24118C.1
gcacgaggggcatctccatggcgggcggttcttgatggagatcgaccgcgtgctccggccaggcggctactgggtccactccggcgcgccggcgaacggcacgcatgagcgcgccgccatcgaggccgccgcggcgagcatgtgctggaggagcgtcgcgtaaaggccaccaggaggacaataccaatcccatctctgaagaacaagaaaatcttgtgtgcgtggcagatttcggcttgcatcatggctgccaccaccaccgccagacgccgccaccgccgccaccaccactcagccccgccgccagctgcctccccgccgtccagctactaacgccattgttgttgcaccgccatcggcaagattcaacgcaggagcttcggatccggccacaggacggatccgccagctgcctccctgccatccggtgaacagatccgtgtcctccaccgccgccgccgaaggcccgtcgtcgttcatgccgtcgccggccaccgtcgcctgcggcctgcttgacattgcccaccgttcgcccgccggtgcgcctcgccggatccagccgggtaccgcgccccgttcccgtggccggcgagccgcggcgtggtttgggcggggaactcggcccgcggcgccaaggccgccgccgacgccgccgccgccgccaacaagtgggcgcgcgtcgacggcgacatgctccggttcaccgacgccgccgccgtccgcgcgtacgcctacgtcgtgctccggctagtcgccgcgcccgtgcgcgccgccgtcgacgtcggggccatggtgagtgccgcctcgcccgcgccctcgccctcgacgttgggagctgggcggcggagctgatgtcccgcggcgtggtcaccgtgtccgtggcggcgccatggggcgcgtccgatggcgcggcgctcgtcgagctcgcgctggagagaggcgtcccggccgtgctcgccgccgcggggggcgcgcccagccgccggctcccgttcccggccggcgcgttcgacatggcgcactgcggtcgctgcctcgtgccgtggcatctccatggcgggcggttcttgatggagatcgaccgcgtgctccggccaggcggctactgggtccactcggcgcgccggcgaacggcacgcatgagcgcgccgccatcgaggccgccgcggcgagcatgtgctggaggagcgtcgcggaccagaacggcttcaccgtgtggcagaagccggtgggccacgtcggctgcgacgccggcgaaaactctccccggttctgcgccggccaaaacaagaagttcaaatggtgcgtgtcgccgtcgccgggaaggcactgctcaaacgcttcttcttcgccatgacaaacgctgtgcgatttcagggacagcgacgtcgagccgtgcatcacgccgatccaagaaggcgcggcgccgccacgggaagcctcggcggcggaggcgctccgtcgcgacagcgagacgtggacgcggagggtggcgcggtacaaggcggtggccacccagctggggcagaagggcaggctccgcaacctgctcgacatgaacgcccgccgcggcgggttcgccgcggcgctggccgacgaccccgtctgggtcatgagcgtcgtcccggcgaccggcggcggcgacacggacacggacacgctcccggcgatctacgaccgcggcctcatcggcgcctaccatgactggtgtgagccattgccgactcccgccttgagctacgacctcctacacgccgactccctcttcaccatgtacagagacaggtgcgacatggaggatatcctgctggagatggacaggatcctgcggcccgggcgcgccgtgatcatccgcgacgacatcgccattttagcaaggatcaagaacttcttaactgatcggatgaggtgggattgccagattttcgacggcgaggatggctcggacgatcgtgagaagatcctgtttgcagcgaagacgtgctgtaacgat

SEQ ID NO: 18574 - DNA, 417 bp, Oryza sativa
  Clone ID: PAT_MRT4530_24119C.1
ccacaaaaaaacaacccttgcaggcgggggaaaacgagggacccccccctctcctaaactgggtctaaattcccaggccccatcaaagaaacccccccccccccccaggcgggccctgcatttttttgggcaaccaccccgatggattggatttggatcccctggggataaaagaaaacctgaaaaagaaatttcgccaaccatgcaaccctaaaggggctggttgccctttcaacaaacttccgggcccccttgaccccccttttggccccggcctgccccttgaaaatgaccagcttgccctctttgacgggggccggaaccaggtggggcttgccccccttgtggccgcccgccgtccttgtaagccccggtacgctgaagaactgtttcccccccacccccggggccgggttt

SEQ ID NO: 18575 - DNA, 375 bp, Oryza sativa
  Clone ID: PAT_MRT4530_2411C.1
atggccgtcgcctccgccgccgcgctggcgctggcgctgtggcggcagcagccgggaggcagaggcggcagcggcgggccggcggcgatcctcctcgccgcggcgccgtacgcactcctcctcctgctgctctggtgcctccgcgcgttcgagcgggcggccggcgccggcgacgcggccgcgcaggggaggctcaggctcgccgtgtggctgctcagcagcgcgctcaccgtcacgttcgccgccagggtcgcgccgctgatgcacggcgcggcggcggtcctcgtctgggccatgtcggcggcgaccatttgcggtggtttctacatgctcgatttgtttcctctccatcgtcgactagatagaatcaattga

SEQ ID NO: 18576 - DNA, 175 bp, Oryza sativa
  Clone ID: PAT_MRT4530_24120C.1
gcacgagggagctgccaatgtcgtctggtggtggctgctacttttatgcagttaggcatcgatctgcgttctgtctcactctctctgaagcaaatgcttattgggcgcaaatagctagagtatggatgcattcctttattgcggttggcctctgatttattactagtgtttgtgc

SEQ ID NO: 18577 - DNA, 291 bp, Oryza sativa
  Clone ID: PAT_MRT4530_24121C.1
atagagatccaatatgagcttaattcggatagggatccgaataggagtcctacgggccttggaggcccgagtgatggatcctatatattcgtgagaggtgtgaccggcggaggcatttgcatcaccgtgggagtacggcgaggagaacgcacgaggaggagaaggtcgagccggtgcgatcgactacttcatctacatcgacgcgcgctacttcgcgagagttccttcgacttctcaacgtctttttccgctgctcaacgcgtctagtggtaacgatctatgatctaatac

SEQ ID NO: 18578 - DNA, 435 bp, Oryza sativa
  Clone ID: PAT_MRT4530_24122C.1
cgggctgcaggaattcggcacgaggtgaaaggacagacattatggcttcagccatggccagttaacttgaagtctgtcttatgagcaacgggtgggaatatgggagaaagttaataattacttggcttctcgactggagtttaatctacttggcatattgattttatattaggcgagcaccctctaaatttggtgaaggtgagagatgaagcagccaccgagcttagcgtgaacggggctaagcaaaaggggaaagcactatgaaaaagcaccagcaagcagcaacagctctgcatggagagggcatattgtattttcttagcctcttaggtgtcgactgagttgcgcatgctattgtgggcaagttgtttatgtttgagacaatgaatttcgcttctatagttccacctgatggaagactacactttgatctcg

SEQ ID NO: 18579 - DNA, 297 bp, Oryza sativa
  Clone ID: PAT_MRT4530_24123C.1
tcggacgcgtgggcgactccaccactcacattcattgcctagtatatcctgcctgactccaccgacgatatggtccgcacgccgacgagcccaaaggcggagagcgccgtagacttagcctggcagggcctcaccgccagctccaccgaggaccaggtcggcacacgtggcacctgtctcctacacgagaccgaatgaacctctccggactcccctccactccgctttgagcgcgacagacactacggcaagtacaggatccagaggaagagcagtaccgcttcataccagaataga

SEQ ID NO: 18580 - DNA, 480 bp, Oryza sativa
  Clone ID: PAT_MRT4530_24124C.1
ccagcaaagcaaaattgtcatgtggcattttgcaaactagaattcatgttcgcatccaccacaggaccatcataacaacggcatttggaagcatacaaatttaagcaatagcacataatttttttcctgtagtttaaacaacagaagaatgggagagtaaaaactaaaaaacaaatggaaaagggaacaggataccatcaataaaagcagaaagagctaaattctgctaaagttttagcatacctccagagaagttatatttcatgcgaactatgtaattaccaccatcactcatcatccttatcttttgcaccagagatgtctttgaattcagggttttcattctttgtctgcttctttgaattcctcttgctatactttctcttatatcgatccaccaagtcattctgcttcttagtcacaagatgacctttccttttacctttcatactctccttgacatgtttaccatccacatac

SEQ ID NO: 18581 - DNA, 276 bp, Oryza sativa
  Clone ID: PAT_MRT4530_24125C.1
tcagtaaaagaggttagcggcgaagttagcccggccgccccagacattggcgcggaggccacaaaggcagaacgcgccgttgccgatatcgagatcacagatgactggcacatcccacttatgaaattcatcaacagcgaggagttgcccgaggacgatacagaggccgagaaaataacccgtaaagcaaaaatctaaagtgtggtcagcaacgatcacaccgacaacatctaacaaggaaacacccttcttcctcatgtacggttccgaggccat

SEQ ID NO: 18582 - DNA, 270 bp, Oryza sativa
  Clone ID: PAT_MRT4530_24126C.1
tgtgttggatggaatttactgctggtggtgtcccactcgtattatctgttaaaacctgtgattgggtgtcacgagagccctcgagagccttggtgtgtccacccctttttttttttgcacctctcttttggtgtgtgaatgatttctaggtaaaaggtgttgtaacccctaccacgatagtcacgacccactaccctggggttagaagaaagtcttgtataatagataatgtaacccgagaagtctgggtccccttgataaaaaaaaaaa

SEQ ID NO: 18583 - DNA, 1954 bp, Oryza sativa
  Clone ID: PAT_MRT4530_24127C.1
ggagcaaagctaccagaaaggcagaaagttggcagtagcagctcacagtaacaacacacaattcaactttcactctagagacagcactacagcaggcaactcctccagtattctaaattagcagttagcacttcgatagtaatcgccaatctcaaagagctgtctaatgtacatgactcgcatacaagcttttggtcagtggccatcccatgattgtgatttgtgaacacatgaatgcagctagccgcacaaactcgcgagctgctgttggatacaatgtacaaactctttggttattaacagtaactaggtggagacggcggtgaacgattcctgaatcgataagcgaaacctagttagttctgcccattttcttcctccagtacaacgttgcggtacagtagtgctcattgcgtattgtcttcgaggctgctctccagtcacacttctccatctcctccctagcagcccttccaatggattctcttagaaccttcgacgaaaggagctgttcgatcttcctcacacactcgtcgagatccccgggtgtaaacaagaaactggttttaccctccttgtccttgggtattatatcaggtatacctccagcacgagcagcgacaactgggactccagaagccatggactccagcactacttgaccaagtgtctcagattctgaaggcattgcaaacaagtcgccactggcatatgcttgtgagagctcctcgccttggagcattccagtgaatactgcaggcatgccagtaaacattctttccagctcagccctgtatggtccgtcaccaacaaaagcaattcttactcctgggagcctttccataacccttttcagaaaatccaaattcttttcacgcccgaaacgacccacatgtattatgagtggtttttctggttcaccaccactcaatttaatgcgcatttcatgcttccgaaatttaggatggaaactttcagaatcaacacctttgttccaaagccgaactctatttgctgatactactttcgcagtttcaaagtcctcggcaatagctactgacggaactagagtaagatctgcagacctatgaagacatcttataagactccatgtgggtccaagtaaccaatttaaattgtatcttggtatatacgctggaaggtgggtatgatatgacatcaccattgggactgaaagcatctttgcgataaagcgagcaccaaaaaccataactccaggtgaagtagcatggattatgtccggcttaaatttagccaccgccgaaaatatcctagggctcaacgccagcgagagtggaacattttggtataacggacatggaaaactccacgaaccaatgactttagctccatggaactcctcgggagctcccttgtgcgtggtcaccaccaacatctcatcgcccatctctcgcagatgcttgatgaagttctggaagcgattcttgtacccagagatgtaagcgaagggcgacggctcgacgaaaagtacaatgcggtgcggcctgcagccccactcggcgtccacctggtccccctgcagcagtagcggctgcgcctccgccgcctgctgccccatcctcctcctcctctggcccgcgtcgccgattccccgatccaacccgccgccgccgccgcccgaattatacacggggacctgcttgccttgcactactgccacccgtgccgtgccccctatccttcctcctccaactcccaagccccgccttcgcgcccacgcggcgtggaaggcggaggcagcggcgctgggaagcagcgtcacggggacgcgagcggcgctcgcccggcacaccaccaccaccaccaacacgacggcgcgcgacggtgacggcgacgaggagaggaggagcccaggtgcagctgttgactggcagtgccgcggcggccgtgggagagaaaaaattgcctgcag

SEQ ID NO: 18584 - DNA, 459 bp, Oryza sativa
  unsure (1)..(459): unsure at all n locations
  Clone ID: PAT_MRT4530_24128C.1
agcccttcatcaaatttttgactaagcaagagcttcctcaagataaagacgaaaccaagcggatttctcgacgcggcaatctttatgtcatggtcaaggctaagttgtacaagaaaagtcccttaggaattctgcaacgctgtgtttctttggaggagggaagacaattgctacaagacattcactctggcatttgtggaaatcatgctgccgtgcgaacaattgttggtaaggcttatcgataggggttttnctggcccacgnagtatccgatgccgagaaagttatgcgaacatgtgaaggttgtcaattctttgacagacaaattcacttaccagctcaggagttgcaaactatccctctttcttggccgttcgcggtgtngggggcttgatatggtcggtcctttcaaaagggctacccgtngggttcacccttctttttgtacnttggacaagt

SEQ ID NO: 18585 - DNA, 396 bp, Oryza sativa
  Clone ID: PAT_MRT4530_24129C.1
agtggattatgcatgactggggcgatgatgaatgtgtcatgcaggtgacttaaggtcagccttggtcaatggtgaggaccgggactatactaagggagaagagatctagtgtggttaggataccatgtgagaaggtgactagagtcaggattcttagaggttaacttcgcccaacgatggggatcgggactagactcagggaggagttaaggtcttgacggtcaaggataccgggtgacgaacttggatacgagatgtcacatgatagatggacaccgtgtgaaaaagatcttcgtaacgggtttcacaatgtgtgtgtagaagtgtcgttgttgccgaaggaaattggaagatactagagaggagtatgtggtgctacagtacggcgaggtactg

SEQ ID NO: 18586 - DNA, 193 bp, Oryza sativa
  Clone ID: PAT_MRT4530_2412C.1
atcgagccgatatgccggggggcacgtgttggcttgcttacgagatcatcgcccgcacctggacctcgaacatcttcgtgagggttttgctcgttctcggaggactccggcggagatagaccatctggcaaggtcaatgtcaccgttggccaagaagatcttccagtctatggactggcgttggccttcttgg

SEQ ID NO: 18587 - DNA, 3387 bp, Oryza sativa
  Clone ID: PAT_MRT4530_24130C.1
atggatgatctcactgctcgacccctgcttgactctgtagtcatctctgctaccggtgaaatcgagaggcacagagaacgtttctctgcccgctccctggtagcctggcaagttggggcccttggggacaaggttgaaattggagtgtttgctgatgacatgcgttctgccttccacatcaggagagctgacattcagttcaccaaattccaccccgaagttttcttcatcacctgctcaaatcaaagtgatcgtgatgccatcctccgtcagccaaggctcactgctccttctggcagggtataccttttccgcccctgggatgaaagcctgcatggcatcccagctcgctaccgctaccgtgcccggctctgcattgagggcgttcccatgcacaggcgaactgatgaagcggcggcgaaggtgattggccgcaaatgtgctatccactatgtggaggagtactctaggcgcggcaactacaaccgcacctatgacatgtgggtgtggacgggcgagccaagggccattccccgtggtggcaccttcgccatcactgacgccgatgaggaaggactgcccacggacatccccttgccagagctagatcccctccgcaaccccctaccttccgagccaaagaagggctggacctacaatgtcctggtccacgttgatactctagaagacctccacacccgcaaggctcgtgcttacaaatgggactatgaagttcaggatgatggtatccgcttcaaggagtaccctctcccctgcagagctgagccagaccttgcccggggcccgacgatgacgatgatgatagagaggaccactccaaaagccgtcatagaagccgttcactctgggacaggatcagtggctgctcttccggtcggaatcgtgagccagaccggcgcgatggccagtgccgcgaccaggaaagaaggggaagatcgcgagacaaggaacgatatgaccatagaagccgctcccaccattcttgtgaaccaagcgagaccggcatcggctccaactctgacacctctggctgcagcaaaggattcacagatcactgagttcatcaatgacatcgcaacgtcgatccagccacctcttctcccagctccggatgtgaatgtgaggaagccttcccgcgttaaggataatgtgtatctgttcaattggaatgtaagaggcttgaatgtcaaggccaagcaagatttcgtgaaagtctgtattcaacaacatagcgctactattgtttgcttacaagaaaccaagcttgctgttgtgtctgaccaaataattctaaacactctcggccaacgttttgcgcgtcaggttgctgtcctaccagctgaaggcacaagaggtggagtgattcttgcctgtgatgacaacttcttttcaatctctgatgttcatctgggacgtttctctgtctctgcaaccataactatgcgagaagaagctcaacaatggtcaattatagtggtttatgggctgcaattagaaactgaaaaaattgctttccttgctgaattagaaggccttcaatctttaatgaaaccggcctggctcatcattggagattttaacctcatttataaagcttcggacaaaaacaacgatcgcttaaacagaagaatgatgcagcgtttcaggggactcatagataaaatccaaattaaagagctgaatctcccaggtcggcgctttacttgggtaggtgatggttcaaaccccactcaaaccaaaattgaccgtgcttttgcgactacggactgggattccttgtttgcaaattcatgtctttatcctctatcctcagcgtgttctgatcatgcccccattttccttgttggaaatgaacaaaggaaaaattttccaaatttcagatttgaatctttttggctccgtatccctggcttcttggaggaagtccaaagttcctggcaaaaaccaattcttgccacgaatagtctcgtgattttgcgtctgaaacttcgtcgcctagcccgtgaccttagaagatggagccgctctcaggtaggggacattaaactacagctagcaatagcatcggaagtcatccttcgtctagagatagctcaagaaacaagactgctgagcgatgacgggttcattggagcttttttcaaagctgcatgggacataataaaagatgaccttctagcagcaattatatccttcatgcacctcaacacctcgcagttagctgacttgaatttagcctatatctgtcttatcccacagaaagatgatgcttccggtgctgaacacttctgtcccattagcctcatccacagctttgccaaaattattgccaagatcatggcaaacagactagcccctcggctcaacgaaatgatttcccaaaatcaaagcgcttttgttcacaaaagagcaattcatgacaacttcctttatgtgcaaaacatgatagacatagcgaaggcttttgacactgtgaactggtcctacctcctagagatccttcgacaatttggttttggtaatcgatggttaaattggatcgctaatcttttctctacctccacatcccaggtgctcttaaatgggtccccagggcaaaaaatcaaccatgccaggggcctgcgacagggtgatccgctatccccaatgcttttcatcttggctatcgaaccttttcatcgaattctaaaagaagcagaaaatgttaatgtcctcgctccccttggggtaagaaatggaagattcagatgctcactatatgctgacgatgttgcggtttttgcaagcccgaaccaagaagatttgtcagccctttcacatattcaggtatgctttgcgcaagcatctgggctacatacaaatatcaacaaaactgaaatctaccccatcaaatgcgaagacattgatctgcaaaatcttcttgttggatggccgggccaaataaaacaattcccctgcagataccttggcctacctcttcatctcggaaaactaaggaaaattgatttccttcctttaatagacaagattgggtctagactgccaggttggaaagggcgactattcacttctgccggacgtcaagccctagtttcatctattctaagtgctatgccaactcatcatcttactgtcctacaagctccaaagtgggttttcaaaagaattgatcgtttcaggagatcttttctatggaagggtgaagatccagaccattcaaacccgggagatagtctgatcaactggcaaaccgtatgtaaaccaaagggtctgggaggtgctggtcttctcgaactagagcatttttccagggcattgcgccttcgttggttatggttcaattggaaggatgaagaaaagctttga

SEQ ID NO: 18588 - DNA, 901 bp, Oryza sativa
  Clone ID: PAT_MRT4530_24131C.1
atgcaatctgttggaggtaagtggtatgtgttggttattgttgatgatttttctcgatattcttgggttttctttatggcaactaaggacgaagcttttcaacactttcgtggtttgtttcttcgattggatcttgaatttcctggttctttgaaaagaattcgaagtgataatggtggtacattgtcacaggttcagagggaggatggtcgtatttttgaagacaagagcgacgacaacaacgatgacgaggtcggctcggccggtcaaaccgggcgccaggccggtcagaccgccggcacacctccggtcagaccggctcatgaggagcggtcagaccggctcatgaggagcgatgtgccacatgcattaactgatgaatcgtggattatcgccatgcatgaagaacttgaaaattttgagagaaacaaagtttggactttagttgaaccaccttctggacttaatattattggaaccaagtgggttttcaaaaataaacaaaatgaggatggtttgattgtgagaaataaagctagacttgttgctcaaggttttacccaggtggagggtttggattttgatgaaacttttgctcctgttgctagagttgaggcaattagacttttgttgtcttttgctgcttcaaaaggttttaaattgtatcaaatggatgtgaaaagtgcttttctaaatggttttatacaggagaaagtttatgtcaaacaaccaccaggttttgaaaatcctgattttcccaaccatgtttttaaattgtctaaagctttgtatggtttgaaagaagctcctagggcatggtatgataggcttaagaacttttttcttacgaaaggttttacaatgggaaaggttgacaaaatgctttttgttcttaagcatg

SEQ ID NO: 18589 - DNA, 185 bp, Oryza sativa
  Clone ID: PAT_MRT4530_24132C.1
gccctctttttttttttttgggaaataaaaacgagtgtgttattcttttggattaacatgtaatcgtcctgctgtatacacgacccaaataacagccatataccttcggtttgaccttatgaaaacatagccttgcgcagcacgagacgggacttggatccagcaactctccatggtggctcaac

SEQ ID NO: 18590 - DNA, 4392 bp, Oryza sativa
  Clone ID: PAT_MRT4530_24133C.1
atggatagcaactttggggcctctcgaccgacatcgttgacaggatcagccggtgatcctccccttggagttctttcagacattactaatctcagtgctgctgaattaagaaggaaacgtgctagagagaggtacgctttgttgagtgtggacgagaaggaggcgaggaataaaaaggcccgtgagaagaggcgccaaaagaaggaggaatgccaaggaggaaatcaatctggtgctgctgtgaaaggaagtgaaactcattatgatccaatcctaacaagtggaaaccaaaatacacatagcccaatgcatgaatgtggtatatttgaaggcaatgatcagaatgacgacatctctctagataatgaagtggtgtgtgcgccatccagtattacaaaagaccatctacagtcaaagctacctcaatgtagcgacaagcctgcgactcttacaacggagcagaagcaagctaaggtgaaccggcagagatcacgacatcaatcactaacaaaagaacaaagattagatatgaacgcccgacgtagggtagcaaggcaaaatatgccagatgtggaaatacatgatatgaatgcccgccttaggtcaagacgacaaagtgttactccaggggaaaggtctgctcttttggcacgacgtaatgcactctatgcagctaggcgtgacaaaccatgtgctgaatcaattgcattggagtgccctgagggtagcagcccgtcgttgctagatccaacgccttgcttggaaacaaccggtgatgtgccagctacatcgaacctgcaagctgagcatgctgcagatcatcttgcacgatcgagcaccttcgaggatggtatcatatatatatgttatcgttcatacttgcaatttgtaaccttccgcatactaacttttcattccactatagatgatatggattccttcatggatgatgacaccgacgatgaatactacttgtttgctaggctaggcgatgatgaggatgacgatatggtacaatccgatgacgacgacacgcaagcaccgacctcttcgattcctgatccatttgactgtgtgtatagcaacatcccacaaagcacaaatgttctgaagcctgagcctgactgtaaacattgtggcgccaagaggttccaagagtctagtccagagcatctcgagttgtatttctacgatgacgatccaaccttgagtcacagattccgtcgttctccgagccttgaccaggatgtgatcaggactgtttcagacgtcctttggaacaacccgtactcggagacatttagaagtctggggcaggctgatgacctcgcgaactaccgcgtgacactaaatctagatcataggttggaccaaaggcgttacaatgtgccggtgacaactgaggtcgctgctgtctgggttgaaggaaacgagagaaggaagtttgagcctagcgtgacaatatacggtaacgaccgtacccgtaaatgcatccaacctttctacggatgttacgatccactctcgtatcctttgttcttccctagaggagagagtggttggcatcaaggtcttccaaaggacaaaataaccatggaggctgcaaacacgcgtcatggcgatgatcctaattgtaacagcgggatacgagtttctgtaagggactactactgctacaaattccagatgcgtcgtgggattttcaatcctatacttcacgggggacgcctgttccagcagttcgctgttgacatgtacatcaaggttgagagctcccgtctggactatgtgaggaacaaccagaaggagataagggccgacctatatcaagggttaatggacagcatccaggctggggagagtcgagcaagcgcggtcggcaaacggactgtgttgccagcgtcgttcgtaggtggtggccgaaatatgaagcgccgctacatggatgccatggccttagtacagaagtatgggaagccagatgtattccttacaatgacaagcaacccaaagtgggatgaaattactcgtgagcttgagcctggccagacaccacaagatcgtcctgatcttgtggtctgtgtctttcgagccaagttagaggacctaaagaagcagttgttcgagaaacacattcttggcaaggttattgcacatgtttatgttgagttccagaagaggggtctgccgcatgcacacttcttgttgatcatgagtagtcgatacaagctaacatctgcggaccaatatgactgcatcatctcggctgagcttcccgataagaaaaagtatagagagctgtacgatatggttgttaagcatatgatgcatggcccttgtggtccactcaatggtaaatgccaatgcatgcgagatggaaagtgtaggaacaactacccacgagagttcaaccctacaacctcgcaaggcaaggattcatacccgttgtataggagacgtaatgacggcaagagtaggatggttagaggccaccctctcgataataggtgggttgtcccgtacaatccatatcttctaaggatgtacaactgttacatgaatgtcgaggtttgttcaagtatcaaggcaataaagtacctctttaaatacctatacaagggacacgagagggcctcgatatccataaacgaggcagataacaacggcgaaatcgatgagattcagcgctacagggatgcgaggtgggtgacccctccagaagccttgtggcgtatatatgggtttgacatatgccacatctcgccgtctgtgaggcagttgcaacttcatctgccaaacatgcacatgttggcttccgatgcagacaaggatctccgtgatgttcttgataaggaagacgcaggcaggtcgatgcttacagcgtatttcgaggcaaacaggcagcatgtctgggctcgagatatcctttatagggatttcccaatgtggtttacttggcagacgccaggctccacctcattcgaagacctacgtattgttgatggcgtggtcatgccttcgttccgtgctgcagctgaaagaaggggtcttatagaggcagacaacaccctcgacgagtgccttacggaggccggggtcttccagatgccactgtcgctacgcaggttattcgctaccatattggtgtattgcgaacctagcgatgtccgtggtctttgggacaaacatctagatgccatgtctgatgactacaagcgtaacaacacatgccctcatgttgtccaacagatggtgctgatagatatccgaggcatgctacaatcaatgggaaaggaaatcacatcgtttccgctccctgaaattgacgaatcacatgatagtaccagaggagatcccagagagattattgaggagtcatccattggtgtggagacggacgatatgaacctctcagaccagctcaatgatgagcaaaggtctgcattcaacaaaatcatgaatgcagttggcagtgctcaggggggtgttttcttcgtagatggcccaggaggcacgaggaagactttcctgtatagggcgctgctagctacggttcgcggcaaaggagatatagcggtggcaaccgcgacgtcgggtgttgcagcttctataatgcctggaggccggaccgcacattcgcggttcaagatccccctcaacattgaggaagggtcttattgcagcttcaccaaacaaagtgggacggcgaagcttctccagatggcgtcgcttataatatgggatgagacctccatgacaaagaggcaagcggttgaggccctcaatatgagcatgagagatataatgggttgcccgcattctccgtttggagggaagacgattgtgtttggaggggatttcaggcaggtgctcccggtcattaggaagggcactaggtctcagataacagatgccactctacgcaggaacattgacccagccaacgggctttgcaatgggacaaggctggtggttcgtcagttcggaaaaaatgctattgacgcggagattgttgtagggcagcatgctggaaagagagttttccttcctcggatacctctatgtccttctgatgatgagatgtttccgtttcgcttcaagaggaagcaatttccggttagattgagctttgcattgaccatcaataaggcgcagggtcaaaccattccaaatgcaggcgtctacttaccacagcctgtcttctctcatggtcaactatacgtcgcgctgtctagagcaacctctagaacaaacataaaaatactatcgatgccggtagaagacaagaaacaaaataaaaagtctaagcgtactggcgtgaaggacaatgagaagaaaggaaaggaattgtctaaacaggctgcaacatacacaaaaaaatattgtgtttag

SEQ ID NO: 18591 - DNA, 894 bp, Oryza sativa
  Clone ID: PAT_MRT4530_24134C.1
atgctggagaatcttaggaaggcttttcaacaagtttgtgccgcctttgagccactaagtgatgtagatggtggaagtggagatgatgataagggaaagaacatctccgatgtttgcttcatggcacgtggtgaatctgacacagagtatgaagataatgagttaaaacaacctcatgatgttttggattgctcaacatgtaatttgaataagttgaaattgaaagatgttttaggtcgtgttgagttcatggaagatgttgtgaaaaacaatgaagtgctttcttgccctaaatgtcgtaaaagcaaatgtgttatggtagattgtgaaaattgtgctaatttggaaaaggaggtttcttatttgaaaaattccttgttaagattttctgatggtaaaaagaacttcaacatgattttggatcaatcaaaggtgttgatgctagaagtggctttggtggcaaggaaggagaacgtgtggatagtggattccggttgttcgcggcacatgaccggtgataaaaattggttctcctcactcaagaaggcatccaagactgaatcgattatctttggtgatgcttctacaagtgtcgttctcgctacaggtttggttaagtgctttgtcttgaaatctggaaatttggataagtttgaggcacattctaccgatggattgtttcttggttaccccgcacatactcgtggctatcatgtacttattttggagactaacaaaattgttgagacttgcaaagtttcttttgatgaggctagtccaggtactagacccgatattgcaggtacactgtcacaggttcagggggaggatgattgtatttttgaagacgagagcaacgacaacgacaacgacaaggtcggctcggccggttag

SEQ ID NO: 18592 - DNA, 4794 bp, Oryza sativa
  Clone ID: PAT_MRT4530_24135C.1
atggagcggcgtaagggcggtcagaccggcggcggcggcagacgacaggagctgatccaggcggtgagaccggagttactacctctgtcagactggagcgcgcttcacatcacgacggcgagcagcagcagcaccacccaagccgcagataggaagacggagggcgtcagcgccgccgccgaggaccgcgacgccgttggtgacagcgacgacgactaccgcaaggaggacgacggtgtctcgaagtcgaacgtaagcgtgttctcgtcgaggtcgtacgccatcttcctgccggcctgcagcatgctgccgaaggggcgggcccacttcaattcatgggtattcaatgaatacctaagatttttccccgtgccccgcgccccgcgtcccgcgtcccgcgccgccctcgaccgccgacgctgcgacccgcgccgtctcctcgctgccgtcgccgcgccccgagtcccgcgtcccgcgccgccctcgaccgccaacgcgggagcaggaggtcacgccgcgtcaacaccgccgaggagccgcttcctcgccgccgtcgcgacgacccacgccgccctcgactgccgccacctccgccggtcacgatcgccgtcatctgaaggtcaggatacacaaagtcgtagaacatcattagagaattcacgaaatcctgtatcccggagcctttcacaagaccagttgcagtcacgtcgtgctggggatagggccaagtatgctgctaaaacaccagaacagaagcaagttatgctagaacgtcagagatcacgacgtcagtctatgacagcggaacaaaaacaagagatgaatgcacgccttagggttgcaaggcaaaatttacctgatgtggacattcatgaaatgaatgcccgtcgtagatcaagacggcaaaatgtcactcctggagaaaggactgctcatctcgcacgacgtaatgcacgctacgctgctcggcgtgacaaaccatgcgctgaatcaattgcgttggagtgccctgagggtagcagcccgtcgttattaaatccaacgccttgcttggaaacaaccgatgatgtgccagctacatcgagccggccaactgagcatgctgcagatcatcttgcacgatcatgcacttttgatgatgatgatatggattccttcatggatgatgacacggacgatgaatactacatgtttgctgggctaggcgatgatgacgatgacgagatggtacaatctgatgacgacgacacgcaatcaccgacctcttcagttcctgatccgttcgactgtgtgtatagcaacattccacaaagcacaaatgttctgaaggctgagcctgactgtaaacactgtggcgccaagaggttccagtacgaaccgccaggcttctgttgtcgggatggaaagatcaagcttgtagaaaatgaaacaccccctgaactgatgaggctctggacaagctcggatccagacgccaagcatttccgggataacattagatattttaacggccacttctcattcactacccttggtgtaagccttgacaaggcctttgcaaacatgagctcgggcgtgtttcgtcgttctccgagccttgaccaggatgtgatcaggactgtttcagacgtccttcggaacaacccgtactcagagacatttagaagtctagggcaggctgatgacctcgcgaactaccgcgtgacactaaatttggatcataggttggaccaaaggcgttacaatgtgccggtgacaactgaggtcgccgctgtctgggttgaaggaaacgagagaaggaaatttgagcctagcgtgacaatatacggtaacgactgtacccgtaaatgcatccagcctttctacggatgttacgatccactctcgtatcctttgttcttccctagaggagagagtggttggcatcaaggtcttccaaaggacaaaataaccatgaaggctgcaaacgagcgtcatggcgatgatcctgattgtaacagcaggatacgggtctctgtaagggactactactgctacaaattccagatgcgccgtgggattttcaatcctatacttcacggcggacgcctattccagcagttcgctgttgacatgtacatcaaggttgagagctcccgtctggactatgtgaggaacaaccagaaggagataagggccgacctgtatcaaggtttaatggacagcatccaggctggggagagtcgagcaagcgcggtcggcaaacggactgtgttgccagcgtcgttcgtaggtggtggccgaaatatgaagcgccgatacatggatgccatggccttagtacagaagtatgggaagccagatgtattccttacaatgaccagcaacccaaagtgggatgagattactcgagagcttgagcctggccagacaccacaagatcgtcctgatcttgtggtccgtgtctttcgagccaagttagaggacctaaagaagcagttgtttgagaaacatattcttggcaaggtcattgcacatgtttatgttgttgagttccagaagaggggtctgccgcacgcacacttcttgttgatcatgagtggtagatacaagctaacatctgcggaccaatatgactgcatcgtctcggctgagcttcccgacaagaagaagaacaactacccacgacagttcaaccctacaacctcacaaggcaaggattcatacccattgtataggagacgtaatgacgacaaggatcttcgtgatgttcttgataaggaagacgcaggcaggtcgatgcttacagcgtatttcgaggctaaccggcagcatgtctgggctcgagatatcctttatagggatttcccaatgtggtttacttggcagacagcagagggggagcgttactatcttcgggtgctgctaaaccatgtggcgggctccacctcattcgaagacctacgcactgttgatggcgtggtcatgccttcgttccgtgctgcagctgaaagaaggggtcttatagaggcagacaacaccctcgacgagtgccttatggaggctgcggtcttccagatgccagcgtcgctatgcagaggagatcccagagagattattgaggagtcatccattggtgtggagacggacgatatgaacctctcagaccagctgaatgatgagcaaaggtccgcattcaacaaaatcatgaatgcagttggcagtgctcaggggggtgttttcttcgtagatggcccaggaggcacgggaaagactttcctgtatagggcgctgctagctacggttcgcggcaaaggagatatagcggtggcaaccgcgacgtcgggtgttgcagcttctataatgcctggaggccggaccgcacattcgcggttcaagatccccctcaacattgacgaagggtcttattgcagcttcaccaaacaaagtgggacggcgaagcttctccagatggcgtcacttataatatgggatgaggcctccatgacaaagaggcaggcggttgaggccctcgatatgagcatgagagatataatgggttgtccgcgttctccgtttggagggaagacgattgtgtttggaggggattttaggcaggtgctcccagtcatcaggaagggcactaggtctcagataacagatgccactctacgcaggtcctatctttgggattgtatggttcaattaaagcttgttcgcaatatgagggcgcagagcgacacgtggtttgcggactacctccttcgagttgggaatggaaccgaggaggtgaacaaggaaggactcataggccttccttcggatatttgcgtgtcgtgcaaagggaatgaaacggacctcgaaaggctcatcgataccgtgttccccaacctaaacgataacctgacggacccaaactacatcacatgtagggccatattgtccactcggaatgagttcgtcgatcgaataaacatgaagatgattgagcggtttagaggggatgtgatgacatatcatagttttgaccgagcagatgatgaccctcataactattacccgccggaattcttgaactctctaactccaaatggcctacctccgcatgtgcttaagctgaagataaactgccccatcatgcttttgaggaacattgacccagccaacgggctttgcaatgggacaaggctggtggttcgtcagtttggaaaaaatgctattgacgcggagattgttgtagggcagcatgctggaaagagagttttccttcctcggatacctctatgtccttctgatgatgagatgttcccgtttcgcttcaagaggaagcaatttccggttagattgagctttgcattgaccatcaataaggcacagggtcaaaccattccaaatgcaggcatctacttaccagagcctgtcttctctcatgatgtcattggattagttgtgcatgtcggggacattgagttcaggagtttgtatttgcgtcagacgccgacaaggataatcgcgctggttaatcctaggtcagtagagttcgatgagattaagatggaacacgtcttccgaacatgctggaagtttgatctgctcgtcgtatcgccgccgcacaactcgccgaataccaaggctgactcctccgccactactgttgttgacgacgccgccgccgccgccagtcccgtcgtcgccggctccgccgccgtcgccgccgctgccgccgtcgccgccgccgccattgccgtcgccggctcctcctccgccgcccttgccgtcatcttcggcgccaagcaatgtcagcacagatattga

SEQ ID NO: 18593 - DNA, 1468 bp, Oryza sativa
  Clone ID: PAT_MRT4530_24136C.1
atgccgaccagccggtgcactgatgctgctctctgcgcgagccccttcctgcggggcattttcacacgttgggccgtcgacgcgatgggtgacagactagagctgtgggagatatcctcgtcagcgaggaggcggaggtcgggtgctgaggagacagctggtgacttggtgcaccctccacaggcggtgtacattgagaacttgttcatcaatgacatctttgagaagcttatccgaactctgacaatctcatcaccggaagaagaacgcaagtccaacggcatcatagctggcactgcaagcgcacgcctcgccaatgggatcaacccgtctgatcctatgtgtgggatgctgccaaagtcgcttggggtcgttgtgttcatctcgacggaccagcttgactgtgacctgtccttcaacggcgttggtcagcacagcgtagctcacctcagcgggaccatacccagtgttgactgtctcgattatggtactgttgtagttgttgaagagaccgttgcaggtattgtatattacctccacctcattctcattgttatcctcttcttggctaccgtcatggagacaaagggctgcctacctcggggaatgctgttggtgcactttgtaaacacagagagaatcaataaagtcgtcaactactttaagagttcttcgatttgtgtttcaccgggtttcggcggtctaaccggcgatataccggcggtcagaccggcggcaagcagcagtcagaacggcggtggcgaggcggagtacattaaatttgagatgaaacctggagaagctttggatgactatctttctaggtttaataaaattttgagtgatcttagatctgttgattcttcttatgatgctaattatccacaatctgagatttctcgtcactttttgaatggtcttgatatgtctatttgggagatgaaagttacatctattcaggaatctgttaacatgtctactttgactttggagaagaccaacaacatcaagccaaaggatggtgagagtggagatgatgacaagggaaagaacatctccggtgtttgtttcatggcgcgtggtgaatcggatacagagtatgaagataatgaggctttggtggcaaggaaggaaaacgtgtggatcgtggattccggttgttcgcggcacatgaccggtgataaaaattggttctcctcacttcagaaggcatcaaagactgaattgatcatctttggtgatgcctctacaagtgccattctcgctacaggtttggttaagggggaggatggtcgtatttttgaagacgagagcgacgacaacgacgacgacgaggtcggctcggccggtcagaccgggcgtcaggccagtcagaccgccggcaaaactccggtcagaccgcctcaggaggagcggtcagaccggccagggacgtcgggttcaggtactgktgatgctgatcgagatg

SEQ ID NO: 18594 - DNA, 350 bp, Oryza sativa
  Clone ID: PAT_MRT4530_24137C.1
gcggtggctaccgcgacgtcgggtgttgcagcttctataatgcctggaggccggaccgcacattcgcggttcatgatccccctcaacattgacgaaaggtcttattgcagcttcaccaaacaaagtggcacggcgaagcttcttcagatggcgtcacttataatatgcgatgaggcctgcatgacaaacaggcaggcggctgaggccctcaatgtgagcatgagagatataatgggctgtgcgcgttctccgttagtagggagagacgatagtctttggaggggaccttaggcaggtgctcccagtcatcaggtagggcactaagtctcatataacagatgccactctac

SEQ ID NO: 18595 - DNA, 215 bp, Oryza sativa
  Clone ID: PAT_MRT4530_24138C.1
actgtgaatattaacacacttatattgagctttaggggaccggtatatataggagtacatgggaatgagataagaaaggattacatatatggaaggagttcacacaaatcaatcctatcctaatatatccctgactaccatatactctaacaagcttcaccggccggcgggcttgacgtcgacatcggcggcgaacggcggcgagtccgacgtcg

SEQ ID NO: 18596 - DNA, 3405 bp, Oryza sativa
  Clone ID: PAT_MRT4530_24139C.1
gtgacatgtatgattcaaatacctcattattcgcttgaccgcttgacgatgtgaagcacgaggagaagcttgaaagcgtgcacacaaacacacagcaaattgtatgtctggcctagaagcagttagatacaacaaagatccaatcatacttctatattccttttgatcaacagcttcaccatcttcatcaggatccaacacagctgtagaaccaattggtgttcaaattggcttgcaattctccatcttgaacagtctcaaaagatccttcgtatacttcgtttgatgcacaaaagtaccttgaggtgtttgcttaatttgcaatcccaaaaagtacgataactcaccaatcatgctcatctcaaattccctgcgcataatcttagcaaaatctacaaccaaagcgtgagtcgaacaaccaaagatgatatcatccacataaatctaaacaaaaagttgattatcaccatgcttaagaacaaaaagcgttttgtcaacctttcccattgtaaaaccttttgcaagcaaaaagttattaagcctatcataccatgccctaggagcttgtttcaaaccatacaaagctttagacaatttaaaaacatggttgggaaaatcaggattttcaaaacccggtggttgtttgacataaacttcctcctgtataaaaccatttagaaaagcacttttcacatccatttgatacaatttaaaaccttttgaagcagcaaaagccaacaaaagtctagttgcctcaattctagcaacaggagcaaaactttcatcaaaatccaaaccctcaactttagtaaaaccttgagcaacaagtctagctttgtttctcacaatcaaaccatcttcattttgtttatttttgaaaacccacttggttccaataatattatgtccagaaggtggttcaactaaagtccaaactttgtttctctcaaaattttcaagttcggccgagccgacctcgtcgttgtcgtcatagtcgctctcgtcttcaaaaatacgaccatcctccccctgaacctgtgacagtgtacctgcaatatcgggtctagtacctggactagcctcatcaaaagaaacttcgcaagtctccacgattttgttagtccccaaaataagtacacgatagccacgagtatgtgcggggtaaccaagaaacaatccgtcggtagagcgttcctcaaacttatccaactttccagattttaagacaaaacatttgcaaccaaaaacacgcaaatgtgaaacttcgggttgatgaccaaaacgaagttcataagaagtttttccaagtttagattgcaagaaaactcgatttgaaatataacatgcagtgttaatcgcctcatgccaaaattttctaggagttttgtattcatccaacatcgttctagccatctcaaccaaaacacgatttttcctttcaacaacaccattttgttgaggaacacgaggagaagaaaattcatgttcaagaccaccattatcacttcgaattcttttcaaagaaccagaaaattcaagctccaatcgaagaaacaaaccacgaaagtgttgaaaagcttcgtccaaatcacgatctttcttaagtttaggcaaaccacgaataagatccaaaccacttagcctagtgagatgatcaaaaccaacatgtccaagtctacgatgccaaaacatcacatctttatcaaacttagcaaccaaacatgttatcacaggtgaaacaggattttcaaaatctgctttaaacactcttccatatcgagaaatattcagcacagaatcaccatgagaatcaaaaactttacttccagttttcttaaagtgaacctttaccaaacctgtagtgagaacggcacttgtagaagcatcaccaaagataattgattcagtattagatgccttctttagggaggagaaccaatttttatcaccggtcatgtgccgcgaacaaccggaatccacgatccacacgttctccttccttgccaccaaagcctcattatcttcatactttgtgtcagattcaccacgcgccatgaagcaaacatcggagatgttctttcccttatcatcatctccactttcaccatctacatcacttagtggctcgaaggcggcgcaaacttgttgaaaagccttactaagattctccagcttcctcccttgggatgaacccttcggcttgttgttgttggtcttctcgccatctttgtcttctcttttgcctctccctaccggttggacagccctggaatccctgtcgcgcctgatgtcgccgccggtcagaccgtaggtcacccaccggtcgcggactggccggtccgaccgctcgatcaccgccggtctgaccggcatacatagcccggtctgaccggtcacataaaatgataaatctgcgatcactctaaagccgagtgcttcaatcatcttcgccatgatctcccgagtactttttccaaatatgaagactgtggagggcagtcggcggcggacgaggcggccggtcggtgaagacgtagacgcccaacaacggcggcataataggctagccgtgcaggcggagacaccagtcgacagcagacgaggcggccggtcggtgaagacgtagatgcccaacaacggcggcataataggccggccgtgcaggcggagacaccagtcggcagcgacgaaggcaagccggtcgttgaagacgtagacgctcaacaacggcagcataataggccagccgtgcaggcggagacaccagtcggtggcagacgaaggcagccggtcggtgaagacgtagatgcccaacaacggcggcataataggccagccgtgcaggcggagacaccagtcggcagcagatgaaggcagccggtcggtgaagacgtagacgcccaacaacggcggcataataggccagccgtgcaggcagaaacaccagtcggcagcggcgaaggcaagccggtcggtgaagacgtagacgcccaacaacggtggcataataggccagccgtgtaggcggagacaccagtcggcggcgacgaaggcaagccggtcggtgatgttctgactgatccatttctgaagcgtaggagataagctttgaaagccatgaatccctattatgcatatctggatctggatccagtcggcagcggcgacggaggcgagccagtcggtgaagatgatgttgctatcagtagcagcgtagtaggcgtacaccacatatgttgcaagatcaggactgcaaactttgtagcatgccgtgtatcgtccaaggcacgcggcccatgctatcgacgatcctgttaacagtagtatccggttattctcctgacgataaagtttctctctgaagcgaaaaagcgtgctgacgaaggtgacgctggcggcggccat

SEQ ID NO: 18597 - DNA, 387 bp, Oryza sativa
  Clone ID: PAT_MRT4530_2413C.1
atgacggagcgtggggctcctcaccgggagaccgcgcaggcccccctttgccggggtcaccacatgggcctctggctgcctaagaaaggaaacatgctttttacaatgagggctagtctacagccggaagtgacttctgacaagcagagcacgcgcctcctgctccgctcgcctgctttttccgtggacgcccatttcaaccttcatttaatggccagcgacttccttgccgcgcttgcgctgcagcctggaatgaatctgatcgggactgacataccaactccaggagtcagcacgccagctccggctagggacgagagccgggaagccctcatcattccgacgggacggggcgaggcgtgtgacaggccgcctgttgccacctaa

SEQ ID NO: 18598 - DNA, 130 bp, Oryza sativa
  unsure (1)..(130): unsure at all n locations
  Clone ID: PAT_MRT4530_24140C.1
agtgancccgcttangctcttcctaannaanacccntcacacgtaataatnttttggtattcctgtantcaaatgctgcntatggtaaattggancagcggctttaattccatgctatctttttattgtt

SEQ ID NO: 18599 - DNA, 232 bp, Oryza sativa
  Clone ID: PAT_MRT4530_24141C.1
gctacaccttcttccactcgttcgtcaacaccaacggcatcactccagcacgagtgctgatgagttgcacagactacaggactacctaactctcaagctggctggccagactgagatctatcacatcactctggagcgcgatcaggctcttgctaactgactcttagttctgaaggtgactgcgagacaagatctgggaccggacatagttgttgccagtcatcctttccct

SEQ ID NO: 18600 - DNA, 3181 bp, Oryza sativa
  Clone ID: PAT_MRT4530_24142C.1
caattcaacatctcccttctcaacatgatccctcaaaaagtaaaagcgaatatcaatgtgctttgtgcgtgagtgttgaacaggattcttagtaatatttatagcactagtattatcacaaaagagaagtactttatcaaaagtaagaccataatctttcaaagtcgataaaagccaaagaatctgtgaacaacaactagcagcagcaacatattcagattcagcagttgattgagcaacactatattgtttcctagaagaccatgcaatcaatgatgcaccaagaaaatggcaagttccactagtacttttcctatcaattctacaaccactaaaatcagcatcgaaatatccactcaagcatatagaagatgaagtagaataccaaattccaaactcaagtgtatgattcaaatacctcattattcgcttgaccgcttgacgatgtgaagcacgaggagaagcttgaaagcgcgcacacaaacacagagcaaattgtatgtctggcctagaaacagttaaatacaacaacgatccaatcatacttctatactccttttgatcaacaacttcaccatcttcatccggatccaacacagcttgaggtgtttgcttaatttgcaatcccaaaaagtacgataactcacccatcatgctcatctcaaattgcatagtttcagcaaactccacaaccaaagcgtgagttgaacaactaaagataatatcatccacataaatctgaacaaacagttgattatcaccatacttaagaacaaaaggcgttttgtcaacctttcccattgtaaaacttttcgcaagcaaaaagttcttaagcatatcataccatactctaggtgcttgtttcaaaccatacaaagcttttgatgtagcaaaagccaacaaaagtctaattgcctcaattctagcaacaggagtaaaagtttcatcaaaacccaaaccctccacttgagtaaaaccttgagcaacaagtctagctttatttctcacaatcaaaccatcctcattttgtttatttttgaaaatccacttggttccaataatattatgtccagaaggtggttcaactaaagtccaaactttgtttcactcaaaatttataagtttttcatgtatggcgttaattcacgattcatcagttaatgcatgtgacagatctttgggttcaaaagaagtaacaaatgcagaattcgcacaaatatcatgagtcgttaccttagacctagtagtctgctcacctaaattaacaatgatttgttctggcggatgtcatcgttgaatatgcaaaggagcagtgacttctgaagttgtttcacattctgtaccttcactggtcgaagttgtagcctctcgaggtacatctcgatcagcatcaacagaacccgatcccgacgaacatggccggtctgaccgctcatcctaaggcgatctgaccggaggtgtgccggcggtctgatcggcttggcgccctgtctgaccggccgagctgacctcgtcgtcgtcgtcatcgctctcgtcttcaaaaatacgaccatcctccccctgaacatgtgacaatgtacttgcaatatctggtctagtacctggactagcctcatcaaaagaaactttgcaagtctcaacgattttgttagtctccaaaataagtacatgatagttactagagtgtgtgggataaccaagaaacattccatcggtagagcgtgcctcaaacttatccaaatttccatatttcaagacaaagcatttgcaaccaaaaacacgtaaatgtgaaactttgggttgatgtccaaatcgaagctcataagaagtttttccaagttttgatctcaagaaaacccgatttgaaatatagcatgtggtgttaaccgcctccgcccaaaattttctaggagttttatactcatcattaggaataagagattttaatctagaaattcagaattaagagactaaatgataaatttttgttttctatacatcttctcacacttcttatttttctcacttaaaataagaatagcttcctcaaaaacacgtacttcattgtcttcacactatgaatccgattcaccacgcgccatgaagcaaacaccggagatgttctttcccttatcttcatcgccactatcaccatctacatcgcttagcggctcaaatgcggcgtagacttgatcaaaagccttcttgagagtctccttcatcttcctccctttgaatgtacccttcggcttgttgtcgttggtcttctcatcaccattatcttccctcctcgctctcccaagcttaggacatcacgaacgaaagtgatcctagaaccacattcaaagcaacgatttggtccacctcttttcctgtacctaacattagtcacagctcgagaaagtctgttagataacaaaaccaagtcctcctcctcgaattgttcgagttgatcatcggacatggcattaaacaaagcaaatgcggaagactttgatgaagaagaatcaacatccaaagaagttgagaaagaaaccaaagcattcgacttagaatcaactttacaagaaagaatattcatcttatgtgttttcaattttgcttaaagcgaatccaaagtcaaagtagacatgtcaacggactcctgaatagatgtaactttcatctcccaaatagacatgtcaagaccattcaaaaagtggcaagaaatcttagattgtgtataattaacatcataagaagaatcgacagatctaagatcactcaaaattttattaaacctagacaaatagtcatccaaagcttctccaggtttcatctcaaatttaatatactcctttttcaaaagatcttgatgaagttctttaatgttattagttccttgatgaaaattactcaaagcaatccaaatctcatgggcagtttgaagatgagcaacacgatcataatccgaacgagaaatcccactcaaaagaatattgcgagccttgcaattttattcaaactcagtttttaaagcagcagtattaatttgttcaggaatcacataaggataataaacttttctccaaatatcataatcctcagccataatgtaaaattgcatcctactacaccaatgagaaaaatccgttccatcgaaaacatgaggcttagttgaaaacctaacagccatggcaaa

SEQ ID NO: 18601 - DNA, 362 bp, Oryza sativa
  Clone ID: PAT_MRT4530_24143C.1
accggcgggagcgaggcggtcagactggcggcggcgacaggtgtggaaagcgactttggcagtcagaccggagattcaacaccggtcagaccggcggcatccactcggtcagaccggctaatgacacgcgggaggacatctggccaggcattggagtacatctggccaggcatgggagcaagagctccaggaagtggggcttggcgttcgtctcgctggcgattgagctcaacgtccccctcttcagtgctacttgtcgctttgtccacattcgcctcccactctccggcactaagagaacgacgaaatctacggccacgaggaggcacaagggcagtgagctcagaggcagggagatctag

SEQ ID NO: 18602 - DNA, 1419 bp, Oryza sativa
  Clone ID: PAT_MRT4530_24144C.1
atggttacttcttcacatgctcctattatttttgtgatgacggatgcaccgggacaactattacacatggatactgttggtccagctagagtgcaatctgttggaggacagtgttctttgaaaagaattcgaagtgataatggtggtgagtttaaaaatgcttcttttgaacaattttgcaacgaaagaggtcttgaacgtgaattttcttctcctcgtgttctgcaacaaaacggtgttgttgaaaggaaaaatcgtgttttggttgggatggctagaacgatgttggatgagtataaaactcctagaaaattttgggctgaggcgataaacactacatgctatatttcaaatcgggttttcttgagatcaaaacttggaaaaacttcttatgaacttcgatttgaacgtcaacccaaagtttcacatttgcgtgtttttggttgcaaatactttgtattgaaatctggaaatttggataagtttgaagcacgctctaccgatggaatgtttcttggttaccctgcacattattggaaccaaatttatgtggatgatatcatctttggttgttcaactcatgctttgcttgtggagtttgctgagactatacgcagggaatttgagatgagcatgatgggtgagttatcgtactttttgggattgcaaattaagcaaacacctcaaggtacatttgtgcatcaaacgaagtacacgaaggatcttttgagacggttcaagatggagaattgcaagccaatatcaacacgaattggttctacagctgtgttggatcctggtgaagatggtaaagctgttgatcagaaggagtatagaacttctcctcgtgcttcacatcatcaagcggtcaagcgaataatgacgtatttgaatcatatacttgagtttggaatttggtattctacttcatcttctatatgcttcagtggatattccaatgctgattttgctggttgtagagttgataggaaaagtactagtggaacttgtcattttcttggtacatcattgattgcatggtcttctaggaaacaatctagtgttgttcaatcaactgctgaatcagaatatgttgctgctgctagttgttgttctcaaattctttggcttatatcaactttgaaagattatggtcttacttttgagaaagtacctctcttttgtgataatactagtgctattaacattgctaagaatcctgcacaacactcacacacaaagcacattgatattcgctttcactttttgagggaacatgttgagaggggagatgttgaattgacgtttttggatacaaagttgcaacttgctgatattttcactaaaccattggattctaatcgatttgctattcttcgtgtagaattgggaatagttcatccttttggcgtgatttga

SEQ ID NO: 18603 - DNA, 450 bp, Oryza sativa
  Clone ID: PAT_MRT4530_24145C.1
atgccacaacgtttgggccactggtgtagcctcccccacgcccactgttcatgtcgccagccccatggcgtctcctgcagcagccaatgttgccatgcagctaccaggccactgatgccctcaggtgcccacctgtggccacccagttgcccacgatgatgccacgagccatgcaaccacagttatttggtgctggaactcgggccagccacgccacgatgatgaagatggcgatacgcagatggccatacatgtggcaaacatgggcaccctgtcaactgtccaactctgcttcctgtaggttgttggttggatgccaacgttgggttacatgtactgctagtaataaggtgttggcatactgatcgtgtcgccaaaccctagaaataagaacccttggaataaaatatccatcattttcagacttcccaaaaaaaaaaaaaaaaaaaa

SEQ ID NO: 18604 - DNA, 1147 bp, Oryza sativa
  Clone ID: PAT_MRT4530_24146C.1
gtcgtcgtacgcaaacgcaacggctgcgtatccatcgaacgtctcactcccacgcaaacgcagagcggtcaacatgcagagccagagggagaggccccgcgaagaccgcgtccacgaagaaacccgaggcgcagaccacgcccatccatccgttccgcacgcggcggcggcggcgtcggcgacggcgacggagacggcgacgcgaaccatgtccctccacgccggcggcgtcgtcgtcgtcgacgggaaggagaaggggaagaaggaggagggggaggggaagcggaaggggaaggccccagctacggcggaggcggtccgcgggcgcgcgcggctgcgcggggagcagctgcgccagctgcacgagatcttcctccggttcgacctcgacggcgacgggagcctcaccaagctggagctcgccgcgctcctccgctctctcggcctccgcccggccgcgggggacgagatccacgccctcatcgccgccatcgacgccgacggcaacggcaccgtcgagttcgacgagctcgcctcctccctcgccgacctcatcctcggcccgtgccgcccctccgtcgccgtcgaccaggcggagctcgccgaggccttcagggccttcgaccgcgacggcaacggcttcatctccgccgccgagctcgcgcgctccatggcgcggatgggccaccccatctgctacgccgaactcaccgacatgatgcgcgaggccgacaccgacggcgacggcctcatcagcttcgaggagttcaccgccatcatggccaagtccgccctcgatttcctcggcctcgccgccttgtgagcgacatggacatggatcgatgcttcatctccttcttcctctggttagctttggacttcttctccgttcctgcatttgttcgttttcttctctcttttttttaatccctggcaaatatacgcttatttgattgaattgattgtatcattatgtgttgctgtaaatattgtgcaatgttatctagtgaaaaatctcaattgttatccaggaacaacatagatgatcgggaaatgcctgaccaaattatgaaataaaaaaccggtaatgcttgatccatattattatggagttaccgtgcttaaaaaaaaaaaaaaaaaaaaaaaa

SEQ ID NO: 18605 - DNA, 319 bp, Oryza sativa
  Clone ID: PAT_MRT4530_24147C.1
tttttccctttgttatttaccctcttttttttttttttttttttaggggcattttttacttttttttctctttttttttcccggggggaagcccgggaaaaaaacattgcattgaatttggaccaataaacccccggccccgggctctatttggggggaagcccttcccaaaaatttccaaaagatcggaacccttaaaacatgcccccctcccgggcaaacagggcacccaaaggccccctccgcaaaattaccaaatccgaaggcctaaaccccccttccccggtgaaaaagcctatttcccccccccttcctcggg

SEQ ID NO: 18606 - DNA, 4316 bp, Oryza sativa
  Clone ID: PAT_MRT4530_24148C.1
ctattcaccacgaagaaaagcaaagcgattagaatccaaaggtttagtgaaaatatcagcaatttgcaactttgtgtccaaaaactgtaattcaacatctcccttctcaacatgatccctcagaaagtgaaagcgaatatcaatgtgctttgtgcgtgagtgttgaataggattcttagcaatgttaatagcacttgtattgtcacaaaagagaggtactttctcaaaagtaagaccataatctttcaaagtagataaaagccaaagaatctgggaacaacaactcataattcgcttgacggcttgacaatgtgaagcacaaggagaagcttgaaaacgcgcacacaaacacacaacaaactgtatgtctgggctagaagcagttagatacaacaaagatccaatcatacttctacactgtttttgatcaacagcttcaccatcttcatcaggatccaacacagctgtagaaccaattgatgttgaaattggcctgcaattctccatcttaaaccttctcaaaagatccttcgtatacttcgtttgatgcacaaaagtaccttgatgtgtttgcttaatttgcaatcccaaaaagtacaataactcacccatcatgctcatctcaaattccttgtgcatagtctcagcaaaatctataaccaaagcgtgagttgaacaaccaaaaatgatatcatccacataaacctgaacgaacagttgattatcaccatgcttaagaacaaaaagcgttttgtcaacctttcccattgtaaaacctttcgcaagcaaaaagttcttaagtctatcataccatgccctaggagcttgtttcaaaccatccaaagctttagacaatttaaaaacatggttggaaaaatcagaattttcaaaacctggtggttgtttgacataaacttccgcctgtataaaaccatttagaaaagcacttttaacatccatgtgatacaatttaaaacctgcaacttcgggtctagtatcaggactagcctcatcaaaagaaacttcgcaagtctcatgaattttgttaatctccaaaataagtacatgatagccacgagtatgtgcggggtaaccaagaaacaatccatcggtagaacgagcctcaaacttgtccaaatttccagatttcaagacaaagcatttgcaaccaaaaacacgcaaatgtgaaaccttgggttgatgaccaaatcgaagttcataagaagtttttccaactttagatctcaacaaaactcgatttgaaatataacatgcagtgttaatagcctcagcccaaaattttctaggagttttatattcatccaacattgttctagccatctcaaccaaatcacagtttttcctttcaacaacaccgttttgtttaggaacacgaggagaagaaaattcatgttcaagacctctttcattgcaaaattgttcaaaagaagcatttttaaattctccaccattatcacttcggattcttttcaaagaaccaagaaattcatgatccaatcgaagaaacaaaccacgaaaatgttgaaaggattcgtccttagttgccataaagaaaacccaagaatatctagaaaaattgtcaacaataaccaacacataccactttcctccaacagattgcactctagctggaccaacagtgtccatatgtaatagctgtcccggtgcatccgtcatcacagaaacaataagagcatgtgaagtagaaactatcttagcatgacggcacgatgtacaaaccaaatcaagatctttcttaagtttagacaaaccgcgaacaagatccaaaccacttaacctagtgagatgatcaacaccaacatatccaagtttacgatgccaaaacatcacatctttatcaaacttagcaaccaaacatgttatcacaggtgaaacaggattttcaaaatcagttttaaacactcttccatatcgagaaatattcagcacagaatcaccacgagaatcaaaaactttatttccagttttcttaaagtgaacctcaaactcttcatcaacaatttgtgaaaccgaaagcaaattatactttaaatcctcaaccaaagctacattcttcaattcaaatttttcatttacctcaaccaaacctgtagcgagaacgacacttgtagaagcatcaccaaagataattgatttagtcgtggatgcctttctgagagaggagaaccaatttttatcaccggtcatgtgtcgcgaagaaccggaatccacgatccacacgttctccttccttgccaccaaagccggtttcctcgagggaaaaccagatttttgccactttgattttgcaaaagcaacctctctctcctttttctgtttatgagctaatatttcacgttgtgtagacacattgttagaactagaagatttagcaacacaagcaacaacaggagattttgcacgcacaacattggattttgaagaagatgtattcacagtagacatgataccaatagatttaaacacagttttattagtatcaggttgaactaaaatctcaccacttctagcaccaacaccatcagaaaatctttgcaaagaatttttcaaataagaaacctctttttccaaattagcacaattttcacaatctaccatgacacctttgcttttacgacatttggggcaagaaagcaattcattgtttttcacaacatcttccatgtactcaacatgacaatttgagcaatcatcatcattaggaataagagattttaatctatcaatttcagatttaagagattcaatgataaattcctgttttctatacatcttctcacactcatgatcttcatactcaatgttcgattcaccacgcgccatgaagcaaacaccggagatgttctttcccttatcgtcatctccactctcaccgtctacatcacttgatggctcaaatacggcatagacttgatcaaaagccctcctaagattctccatcttcctctcttgggatgaacccttcggcttgttgttgttgggcttgttgttgctggtcttctcaccctctttgtcttctcttttgcctctcccaagcttaggacaatacgaatgaagatgatcaattgaaccacattcaaagcaacgatttggaccacctcttttcctgttcctggcattattcatagctcgagcaatacggttagcaaccaaagccaaatcctcctcctcgatctgttcgagttgatcatcggatgtggcattaaaaacagcaataaaagaaggcttagatgaagaagcatctacatacaaagaagaagaagaagaaaccaaagcactagacttagaattagcttttcgagaaagaacattcatcttatgtgttttcaatttggtgtgaagtgaatccaaagtcaaagtagacatattgacagactcctgaatagatgtaactttcatctcccaaatagacatatcaagaccattcaaaaagtgacgagaaatctcagattgtggataattagcatcataagaagaatcaacagatctaagatcactcaaaattttgttaaacctagaaagatagtcatccaaagcttctccaggtttcatctcaaatttaatgtactcatttttgaaaagatctcgatgaagctctttaatattatttgttccttgatgaaaattacttaaagcaacccaaatctcatgagcagtttgaagatgtgcaacacgatcataatctgaatgagaaataccactcaaaagaatgttgcgagctttgcaattttgttcaaaagcagttttttcaacagcagtattaatagcttcaggaatcacataaagatgagaaacttttctccaaatatcataatcttcagccataatgtaagactgcatcctactacaccaatgagaaaaattcgttccatcgaagacatggggcgtagttgtaaatttattagccatggcaaaacaacctcaaatttgacggagatcggtctgacagagattgatctgccggtctgactgagttgataccgtcggtctgaccgaagttgatcgctggtccaaccgcctgaagattgcctctgcctcctgtcaccgttgccggtctgaccgcaggtacgccgtcggtctgaccattgccttgccgccggtctgaccgccggtgtgtcgccggttagaccgccgaaccgtagcaacgacgtcgccggcatgacaagcttgcgaccgctgctggattttcttgtgccatgtcgagctgtttccatggttgacacggctgccgccgctgcttgatggactctaccgccaccgccgttgttcctcct

SEQ ID NO: 18607 - DNA, 7432 bp, Oryza sativa
  Clone ID: PAT_MRT4530_24149C.1
tcaaaccatgccaaaaggatgaattatgcccaattcaccatgaagaaaagcaaaacgattagaatccaaaggtttagtgaaaatatcagcaatttgcaacttggtgttcaaaaactgcaactcaacatctcccttctcaacatgatccctcaaaaagtgaaagcgaatatcaatgtgctttgtgcgtgagtgttgaacaggattcttagcaatgttaatagcacttgtattatcacaaaagaaaggtactttctcaaaagtaagaccataatctttcaaagtagataaaagccaaagaatctgtgaacaacagctagcagcagcaacatattcagattcagcaggtgattgagcaacactagattgtttcctagaagaccatgcaatcaatgatgtaccaaggaaatgacatgttccactagtaattttcctatcaattctacaacctccaaaatcagcatttgaatatccactgaagcatatagaagatgaagtagaataccaaattccaaactcaagtgcatgattcaaatacctcattattcgcttgaccgcttgacgatgtgaagcacgaggagaagcttgaaagcgtgcacacaaacacacagcaaattgtatgtctggcctagaagcagttagatacaacaatgatccaatcatacttctatactccttttgatcaatagcttcaccatcttcatcaggatccaacacagctgtagaaccaattagtgtggaaattggcttgcaattctccatcttgaaccgtctcaaaagatccttcgtatacttcgtttgatgcacaaaagtaccttgaggtgtttgcttaatttgcaatcccaaaaagtacgataactcacccatcatgctcatctcaaattccctgcgcatagtcttagcaaaatctacaaccaaagcgtgagtcgaacaacgaaagatgatatcatccacataaatctgaacgaaaagttgattatcaccatgcttaagaacaaaaaacgttttgtcaacctttcccattgtaaaacctttcgcaagcaaaaagttcttaagcctatcataccatgccctaggagcttgtttcaaaccatataaagctttagacaatttaaaaacatggttgggaaaatcaggattttcaaaacctggtggttgtttgacataaacttcctctttgtttctctcaaaattttcaagttcctcatgcatggcgttaatccacgatttatcagttaatgcatgtgacacatctttgggttcaaaagaagcaacaaatacagaatttgcacaaacatcatgagtcgttaccttagactttatagtccgctcacctatattaccaataatttgttccggcggatgtcgtcattgaatgtgcaaaggagcagtgacttctgaagttgatccacgttttgtattattactggtcgaagtagtagtttccgaaggaccatctcgatcagcatcaacagtaccggaaccctcagccgacaaccctggccggtctgaccgcacgtcttgcgccggtttgaccggaggtgtgccggcggtctgaccggcctggcgcccggtctgaccggccgagccgacctcatcgtcgtcgtcgtagtcgctctcgtcttcaaaaatacggcatcctcccccttaacttgtgacagtgtacctgcaatatcgggtctagtacttggactagcctcatcaaacgaaacttcacaagtctcaacgattttgttagtccccaaaataagtacacgatagccacgagtatgtgcgggctaaccaaagaaacattatatcggtagaacatacctcaaacttatccaaatttctagatttcaagacaaagcacttgcagccaaaaacacgcaaatgtgaaagtttgggttgatgtccaaatcgaagctcataagaagtctttcccagtttacatctcaagaaaacacaattcgaaacataacatgcagtgttaatcgtctcggcccaaaattttctaggagttttatattcatccaacatcgttctagccatctcaaccaaaacacgtttttcttttcaacaacaacgtttcgttgaggaacacgaggagaagaaaattcatgttcaagacctctttcgttgcaaaattgttcaaatgaagcatttttaaattcaccaccattatcacttcgaattcttttcaaagaatcaggaaattcaagatccaatcgaagaaacaaaccacgaaagtgttgaaaagcttcgtccttagttgccataaagaaaacccaagaatatcgagaaaaatcgtcaacaatatccaacacataccactttcctccaacagattgcactctagctggaccaacagtgtccatatgtaatagctgtccggtgcaaccgtcatcacagaaacaataggagcatgtgaagtagaaaccatcttagcatgacgacatggcgtacaaaccaaatcaagatctttcttaaatttagacaaaccacgaacaagatccaaaccacttaacctagtgagatgatcaaaaccaaaatgtccaagtctgtgatgccaaaacatcacatctttatcaaacttagtaaccaaacatgttatcacaggtgaaacaggattttcaaaatcagctttaaacactcttccatagtgagaaatattcaacacagaatcaccacaagaatcaaaaactttacttctagttttcttaaagtgaacctcaaaattttcatcaacaatttgtgaaactgaaagcaaattatactttaagtcctcaaccaaagctacatttttcaattcaaacttatcatttacctttaccaaacctgtagcgagaatagcactagtagaatcatcaccaaagataatcgattcagtcttggatgcctgtttgagggaggagaaccattttttatcaccggtcatgtgccgtgaacaaccagaatctacgatccacacgttctccttcctcgccaccaaagcctgcatttgaactttgcttcccacatggttggttccattccaccaagtttcaacgtcaggtgaatgggacgaggttaaaggggtcaggttttggaactggcagattagactccaagtttgtctggtaaaaatgcattcactgaacagatggtttgtgtcttcaaaggcgcaagtgcaaaggcagcaaatccaattacatggccaatgtcttcgaagtaaattttgtgcagtgagagttttatgatgaaggactagccatccgaagaatctcattttgggctccgccggggccttccagagtgaaaggtagtctaacttagcaaaggacccttcaaactggtaaagatacgcacttttggctgtgtaggtaccggaatcagtccaattccaggtaatgttatccggttcttgggaaagcgtaaccagatgaattaagcctcctagctgcactagctcgtgaatttcctccactgaagtaaattgtctgaaagaggttagccatttactgtttgtgagttcaacttgcacagatctttgttttctctttgccagactaaagcatcttggtgcaatgtcttttggacatcgattttgaagccaattgtcatgccaaaatcttgttttggcgccatttccaaccgaaatagtcattgcagcttgaaagagtctatggtcagattcatcacagggcaggctcatgcccacccaaggcatttcttcctccttccaattaaaccataaccaacgaaggcgcaatgctctggaaaaacgctctagttctaggagactagcacctcccaaggcctttggtttacagacagtttgccagttgatcagactatctcctgggtttgaatggtccggatcttcacccttccatagaaaagatcttctgaaatgatcgattcttttgaaaacccactttggagcttgtaggacagtaagatgatgagttggcatagcacttagaacagatgatactagggcttgacgtcccgcagaagtgaaaaaacgccctttccaacctggtagcctagacccaatcttgtcccaaggagagcaaggcgcattgacattttctgcttcttttaggattcgatgaaaaggctccatagccaggatgaagagcattggggatagcggatcaccctgtcgtaggcccctggcgtggttgattttttgccctggggacccatttaagagcacctgggatgaggaggtggagaaaagattagtgatccaatttaaccatcggtttccaaaaccaaattgttgaagaatctctaggaggtaggaccaattcacagtgtcaaaagccttcgctatgtctatcttgatgaacaggctttgtttttttgtcctgtgaagcagctttaccatgttttgcacataaaggaagttgtcatgaattgcccttttgcgaacaaaagcgctttgattttgggaaatcatttcgttgagccaaggggctagtctgtttgccatgatcttggcgataattttggcaaagctgtggatgaggctaatgggacggaagtgttcagcaccggaagcatcatctttctttgggataagacatatataggctgaattcaagtcagctagctgcgaggtgttgaggtgcatgaaggatataattgctgctagaaggtcatcttttattatatcccaggaagctttgaaaaaggttccaatgaacccatctggtccaggggccttttcaggaggtaagtcaaagacagttaattttaattcctcttctgtgacatcctcctctaagtcaaagacagttaattttaattcctcttctgtgacatcctcctctaatttggtaagatccaagtcgggtaaattcagacggagccagtttaggcttactgtcctttgagagatcgtccccagcctgtctttaaagaacctgaaaagttcttcctctttgtcttttgaggagatggctattccggaaggggtttggagcgaatgaatatagttttttcttcgtcttgaattcgctttaatatggaagaattttgagtttacatctccttcttttagccacgttaatctcgatctttgcctgatttgtattttattgaggactgaaaggcccagaaatcttgatttaagatttgacagaaggtgacgctcaccatcgctcagcagtcttgtttcttgagctatctccagatgaaggatgacttccgatgccactgctagctgtagtttaatgtcccctacctgagagcggctccatcttctgaggtcgcgggctagacgatgaagtttcagacgcaaaatcgcgagattattcgtggcgagaattggtttttgccacgaaatttggacttcctccaagaaaccagggatacggagccaaaaagattcaaatctgaaatttggaaatttattcctttgttcatttccatccaggaaaatgggggcatgatcagaacacgctgaggatagaggataaagacacaaatttgcaaacaaggaatcccaatccgtggtcgcaaaagcacggtcaattttggtttgagtggggtttgagccgtcgcctacccaagtaaagcgccgacctgggagatttagctctttaatttggattttatcaatgagtcccctaaaacgttgcatcattcttctgttcaagcgatcgttgtttttgtccgaagctttataaatgagattaaaatctccaatgatgagccaggccggtttcattgaggattgaaggccttctaattcagcaagaaaagcaattttttcagcttctaattgcggtccgtaaaccactgtaattgaccattgttgagcttcttctcgcatagttatggttgcagagacagagaaacgtcccagatgaacatcacagattgaaaaaaagttgtcatcacaggcaagaatcactccacctcttgtgccttcagctggtagaacagcaacttgacgcgcaaaacgttggccgagtgtgtttaaaattatttggtcagacacaacagcaagcttggtctcttgtaagcaaacaatagtagcgctatgttgttgaatacagactttcacagaatcttgcttggccttggcgtacaagcctcttacattccaattgaacagatacacattatccttcagccggatggccttgcatcctcccttttccactagatcagcgattgtcttcagtgaagctggggagagtggcttcttgtatcgctgcaaatacaactttttgacgttatcatcaaaagaagcagaatcgttcatgataccgaacttttttgaaagtatttcttgggcgaaactttcaaatttcgcatttgcacgtcgtttgcggagcagtcgttcactgtgacgctgagcagaggcaatggcagggattttcaccttaacgcgggaaggcttcctcacgttcacatccggagttgggagaagtggtggctggatcggcgttgcgatgtcattgatgaactcgtcgatctgtgagtcctttgctgcagccggagatgacagagttggagccgctgtcggtcctgcaaaggaggtcacaaaaacaggggcggaaacacgaggagagtttgtatccggagagtatataaagtgattcaccgccgcctcgtgaagcatgggatcgagatggctctccaggatttcgagcacatcctctcgaccttcatagtcccatttgtaagcacgagccttgcgggtgtggaggtcttctaaggtatcaacgtggaccaggacattgtaggtccagccattctttggctcggaaggcgggggattgcggaggggatccatctccggcaaagggatgtccgtgggcagtccttcctcatcggcgtcagtgctggcgaaggagccaccacgaggaatggcccttggctcgtccgtccacacccacatgtcataggtgcggttgtagttgccgcgcctagagtactcctccacatagtaaatagcacatttgcgaccaatcacctttgccgccgcttcatcagttcgcccgtgcatgggaatgccctcaatgcagagccgggcacggtagcggtagcgagactggatgccatgcagactttcatcccaagggcggaaaaggtatactctgccagaagaagtggagagccttggctctctaattttcgaaatcgcattcattaaaacctcataatttttgcaatcatcatcattgggaataagatattttaatctagcaatttcataattaagagattcaataataaactcctgttttttatacatcttctcacacttcttattttttgcacttaaaataagaatagcttcctcaaaagaactcacctcattgtcttcacactttgaattcgattcaccacgtgtcatgaagcaaacaccggagatgttctttcccttatcttcatctttactctcaccatctacattgcttagtggctcaaaacccgcatagacttgatcaaacat

SEQ ID NO: 18608 - DNA, 414 bp, Oryza sativa
  Clone ID: PAT_MRT4530_2414C.1
atggcggaattcgacggaggaggggtggacgaggtggaccttggccgcgcaaacctgacggcggcgacggtgtggggcggagaggtcgggaacggccgggagtggttcgatttcgtcggagttagtggggaagttggaggaggagagagagagaggcgggattcaaatttgaatcccggccatctcgtgccgtgggcgcgagcggaagtgggggcatgggtgcggggaaggcggggcgtgctggagcgggacgcggggaaggcggggaaggtgggcggcgtgcgcgcggcggcggttgccggctcgggggagcggctggaggttggggaaagggctgacagcaaggaggggaacttcagggcgcgacaggaagtcgaagcaggcagcgagggggaagccgacttcgccggttaa

SEQ ID NO: 18609 - DNA, 374 bp, Oryza sativa
  Clone ID: PAT_MRT4530_24150C.1
aactgggggttaaaattaattttatatttatctaacccaaagtttaaaaaaacaaaaaagacaaattttaaccttatttataacacccaaacccttatacgtgaaaaaccaagaaaaagacaccgccagggaaggtccgggccgcgggtccccaaaaacccctaagcaaaaacccccaagggggggaacggaaaaagcccgccccctggccccacccagaaaccccagtaccggggcccgccaaaacccccctatcctgatttgaaccggaaataaaccaccgcaaactcaaggccaaacacttttcctgataaaaatgggaatccgatcccaatccaaaaaaggacacaacccgaaaccataaaaaataaggc

SEQ ID NO: 18610 - DNA, 144 bp, Oryza sativa
  unsure (1)..(144): unsure at all n locations
  Clone ID: PAT_MRT4530_24151C.1
agcaatgatacgtaaaaaganagatatattcagagtccctttcnctctttcaaggagttcaccttatatttatgcactgtacggtctggtgagcttccacaggtttttctcgcctaagtcctgtttatggtgcacttatatgtt

SEQ ID NO: 18611 - DNA, 121 bp, Oryza sativa
  Clone ID: PAT_MRT4530_24152C.1
actgagaagtggcgagaagtccacgggggtcgctggagagtccatgcctctgtggtacacctctggccagagtaaaactattcgaatagccgtgcccgcggttatgggcgggttgagcaat

SEQ ID NO: 18612 - DNA, 1296 bp, Oryza sativa
  Clone ID: PAT_MRT4530_24153C.1
atggcggcggtggtgagggcggaggcggtggacacatccatcagcccaacgatgagggcgctccggtcgtccaagaacatggccatcacagaccaggccacgacgttgcggcaggccggcgagctggtcatcggcctcgctgcaggggagcccgacttcaacacaccggcctcgctaccgagtccacaaaagctcaaatgtttgtttgtgtataacttgaattggccgattttggcacttgcagtgcagcagacatctaacattttctcttatctttgcgaggcctacattggggtagagcctttccttgatctcttccgcttttactatgagttgcgctggatggaacccaacaggatagaaaactcggatcccgtccttgttgtccctgaagagcagccagacaaaatcccagagtggaccgccaaacccgccctgactccctccctccagtctttcatcgacatcatcgatgacctccgaacacaggggttgtcggggtacgaagtcgctgccgacttcgtaggtaggcggatccaaccgctccaggcccgcgcccatgcggcctttgactactctgggctagaggacgtgacccgggtttctcctcggggtctggacagcgacaccgtgggacagcttgtcggccaggtgatgatcagcgctccctcagcggcgagcgacatcccggtccccctttgtgagaagggtccggtcgaacgcgtcgctgcaattaatctttatgagaaagaggaaactcttcatagggcggcgcaggcgaaggcggcgcaaggtgggaccggtgcggcttccagtgcgtcccctgcagtgacctcgacagatgtagtggtcgctactaaggaccgggaggcgacgtcgagtagccccgccgtcaaccttgtgtctgctcggggcccgtccaccgatgccctcacctggggggagctccaggcggagatggagcgcctcctccaggccggtgctcggggcgtaggccgcgaggtcgaggaggccagggcggcagcgtcgtcagcaaaccagcgtgctgaccagctggtacgtgacttggcggaggcccgtgaggacctcctgaagatgagggagctggtggccggcaacgagaggcagcggcaagggctcgagcaccggatgttggagctcgagaacaatccgtcagaaatccgatgctcgctgcgggtatcgtacaccagcctacaccagctcgccggggaacgtggtgtcacgactaccagctggcctgcaaaatttgcacatgaacgtactacttgcctatag

SEQ ID NO: 18613 - DNA, 2559 bp, Oryza sativa
  Clone ID: PAT_MRT4530_24154C.1
atgaggtcgagctttgtggcagcttgtgccatttccttagtgctagtgtgctcggctgctactacgcctcgagcattagctgcagtctatggagatggcggagggctcttgtctatcccttctaatgattccctcgctcactgcccctctagctgcggggatgttgacgacatcgcctatccctttgggattgggccgggctgcttccgggaaggcttcgagcttaagtgcaacaccagcaccaaaactcctaagctctatatgaaagatggcaccacccagatcttatatgtaggtgacgatgatctttgggcacccatgcacttcaacattacaatgaagccaggtactgatacctacaacatatcctgggtgtctcccaggaagggagttactatttctcagcgtaacaccttctacattattggttgtaatattgatgtcaccttgttcgagtatggtacgagagacgctgttggttactgcgtgagtagatgcgatggtgaaaaggtaccaacagaagggccttgtaacgggaaaggatgttgctccatcaagttatcaagggatctgcggggatttcggtcaacactagtccaagttgatgctactgcagcacaatcatatcagctgcagctgcgccatggtgttatggcttttatgtcatacaatgactattatgtagataatgcgactgatcttttcttgagttggacgaacacaagcaatatccaggaagcattagttcagtttgcaatcatggaccaaccaagttgtgaaattgctcgaatgaaaaatacgagttatgcttgtagcaccggcagcaactgcctaaatatgtcatctggaggttacacctattacaaccccaagcggaaagaacactgtcggagatcatgcggaaacatggcaattcccttcccttttggtcttgaagaaggttgtttcgcaagtgaaaggttccaacttaattgtacaacaggtaacatcacacttttcaacccacgggacgcacgttataatgtgactgatgtgtcaattgaagaggggacaatggtggttagcaacttgttgaacgacacagaatatgggggagaggacataatatcccaggtgtatggtggtgcagaaataaagtgggcagtagccaatttaacgtgtgatgccgcagtaaaaaaagatgctacatatgcatgccgcagtatccacagcaattgcctaaacgtcacccatgggaacatattcatgggatatcgttgcaagtgccttcccggttttcgagggaatccatatatccaagatggatgtgaaggtattacaactggtattagttgtggcattggttccataattattgcattaggtgcgattattctagccaataagtggaagaaaagcatccaaaagagaattagaagagcatacttcaagaaaaatcagggcctactcttggaacaactaatctcagatgaaagcgccactaataaaacaaggatattttccttggaggaactagaagaggcaaccaacaactttgatgctactcgtgttcttggtcgtggaggacatggcacagtttataaagggattctatctgaccagagtgtggtggccattaaaaaatcaaaaattgtggaacaaactgagatagatcagtttatcaatgaggttgctattttatctcaaattatccatcgcaatgtggtgaagctttttggttgctgtctcgaatctgaggtgcccttactggtatatgagttcataccaaatggtacattgcacgatcgtcttcatactgatgttagtgttaaatcctcattgtcatgggatgatcgaattaggattgcttcagaagcagcaggggcacttgcttatctgcattcggctgctgcaatacctattttccatcgagatgtgaaatcttccaatatactcttggatggcaactttactacaaaggtctctgactttggtgcttcaagatctgtttcactcgatgagactcatgtggtgactattgtccaaggtacatttggttatttagacccagagtattatcacactggacaactaactgaaaagagtgatgtatatagttttggagtgattctggtggaacttttgacaagaaagaaaccgattttcatcaatgatgtaggcacaaaacaaagtttgtctcattatttcgttgacagactccgtgagggatctcttatcgaaataatagattctcacgttcttgaagaggctcacagggaagacattgatgatattgcctcacttacagaggcatgtttaaaactcagaggaggagatagacctactatgaaagaagtagagatgaggctgcaattcctgagaactaagaggctaagaaaattccaatttctccccgtcccaggaattggtggagagattcagcaccttttaagcccagatactggtaaatcccaagcacagaacaactataccagtgcaggtgatttatcatatgaagggatctccagttgctacagtttggagcaagaattatcatcctcagtcagtttgccacgctag

SEQ ID NO: 18614 - DNA, 502 bp, Oryza sativa
  Clone ID: PAT_MRT4530_24155C.1
aacggggaaaaaagccaaaaaaaaaacgggggcaaaaggaaagggttaaaaaaagggccagggggaaaagcttggggcaaaatggaaagggccaaaacaaccagcctaaaaaaaaaaaaaagggggggacccgggaaaaaaaaaaaccggaaaaccccacaggggttgggggggaaaaaccccgaagggggaggggacccccgggaatttcggggggaaaaaagggggtttttaaaaaaaaagggggggagcccccaaaaaaaccggaaaaccccccccatcggggggccccgttaaggggaacggaacggcccccccatggggagggaaaaaattggcaccagctggtttttaagggggggggacttaaaaaggtaaagggaaaaaacctaaggggcccacccccccgggacaagggaaggcccccccctgggaaaaaccaaaaaaacgcccgggcctgggaaaggagggggggcttttccaggcagcatccccgggggga

SEQ ID NO: 18615 - DNA, 1205 bp, Oryza sativa
  unsure (1)..(1205): unsure at all n locations
  Clone ID: PAT_MRT4530_24156C.1
atggcgctgattgccactggtgctaccgctactgctactgcggcgccggtggctagcccggctgcttcttccatggcgtccgagctgatggcgcaggggcgggagtccgccgccgtcctggaagccctgctccatggcgcgtcgctcccgccggcgcacggcggtgcccacgccctcgccgccgagatccttcgctgctgcgaccgcgcgctcgccgcgttgcgcgccggcggcgatgccgaatcgtcgtcagccgacacgaagcgcaagccggcaaccgcccagccgtcgacgcgccggaggagaaggtatatatatatgtatgtctcctcccgttcttgcgatggcgcgcgcgatcgagcagcgactcagcaagagatcttttgcagagcgacggcgagcggcggcggagcggcggcggcggcggagccggcgagggtggagaaggcgcggacgtcggaggacggattcctgtggaggaagtacgggcagaaggagatcaagaacagcaagcacccgaggctctactaccggtgcagctacaaggacgaccatggctgcacggcgacgaagcaggtccagcagtcggaggaagacccttccctctacgtcatcacctacttcggcgaccacacctgcagctgccagacggccgccgccgccgccatggacgacgacgacgacgatgaaaactcgcagcatttcgtcatcaacttcgggccggccaccgcgagccgcagcggttcgccgcctctgctctacgacgacggcgacgacggcgatgtctgcgcgtagacggcggccaccccaccgtcgtcgaggcagtccaggtgctcgccggagggagacggggaggaatccggggtgaagatgagcaaggaagagccagtggactcgtgtccggggccgtcagcggtgagttcgccggccgacgtcgtttcttgttcgtctccggcaatggagcccgatctgctgggctgcttgaactgggatgatgactttggagacagctcgttcgtcgacgccgatgagttcatgaatttcgatgagattgatctgtttcaaatctactcctagctagcattgttatgcgactaaattgcgtgataaatggtactaataggtgtgtagtattgtaggatgtgtttctggctttctgcaagtattattgttgcaactatgaggtgatcatgaatgccananna

SEQ ID NO: 18616 - DNA, 370 bp, Oryza sativa
  Clone ID: PAT_MRT4530_24157C.1
tttgttttttttttatattttggttttcatttatttttgcctgccaacaaaacatcacctgattgcatttcgcacatattgcaacaaattttgcttattgttccctaaaaaggttctccttcagaccaacatccctatttggaaagctttccaaagccggagagaactactctcttatcactctgcaggttaaaccacgggtgacccttgaacagagcttgcatgatttacttaaaggaaaggaatgaacctgaaagttttaattcacatccaagcagggccctatactggggaaggaaaaagacctaggctcctgtgttatttctacccggccttagaggagctacaagggcggtaaggaaagggcgaa

SEQ ID NO: 18617 - DNA, 321 bp, Oryza sativa
  Clone ID: PAT_MRT4530_24158C.1
atgattacccccggcccgatcgagaagaagacacagatgatcgagtgggtgaccaaggacgacggcaagtcgatccaacagatgagtaggtgcgtgcgtgcgcggtggtcgaaactgcggcggcggggggtcgggggtatctgcggccgcggcgccgggatcgttgatcgtgcgtgccgggacatcgcggctttggaggaggaaaactgccgcagcgagcacgaggaagacgaggggtgcgtcatcgcgtgcgcgggaacagaggatgggtgcttccccgcgctaaatagcccacgcattgatctggcaggtggggccagc

SEQ ID NO: 18618 - DNA, 163 bp, Oryza sativa
  Clone ID: PAT_MRT4530_24159C.1
aacctccacaacatttatactgaggcgaccgagagagttttaccaaatactgtgcagctaccatatagtctagccgagctatattacaggcagggcactaagacacacacacgagcgactcgtgaagaacgtcacagtcctgttcacattggggaccatgaca

SEQ ID NO: 18619 - DNA, 508 bp, Oryza sativa
  Clone ID: PAT_MRT4530_2415C.1
ccgtcatgattcggaaccactgaactgttacctgccaagtaagcaatagggataattgtcggtgacatgggaccgagagtatcgtgactagaggcttgggcagccgcggtcaaccatgtggcctgaccccctcgggggggggggggggggtcgggcccgagggtgacgtggcctcccctccctctgtctccccgaggggtcgggctgctcccgtttcggccccgagggctggggcgccccgaccccgtcagtcccggctagattcataccaggcttcatcgcaaccattacaaggaagtcattgtatgaagaagggcagacgtgcggcatgctaaactgacgcgtggtggacaagaatgaccggtctgtgactggtctcacgccggtcacgtcatcggcagacaaccgtgctcccacgttgcatctgcttccggcggagtggagggtgatcccctgtgtccgacgagtgacggcgctgggcatcactcaaggacaagcggtgatttag

SEQ ID NO: 18620 - DNA, 518 bp, Oryza sativa
  unsure (1)..(518): unsure at all n locations
  Clone ID: PAT_MRT4530_24160C.1
tggagagccttgaaaattgggccacataatggtgaaccaataaatgggtgggccnactgctgtgtggccgtgnggcccccttgtgaaaattgtgaaggcgaatataagcgcgacttttgaattcttgacggcgcccggaataggccctanttgtggtanacgattgcgggggatgcaaggggctaataagcttgtagtaacccttgccttgtgtgcaatgggcgcaatttgggcctacctgttgaggatacctntctggcgggaacctctggtaacggatgggtgatttggaaataagaaagtgggaagctgaccatggattgggaaaccacatgctgtgttgttgctgcttgctgtggtaccataagtggttgtaatacttaatgatcgcaagtatgatgcactgcaaggctgtgtaacccatggcttatgattgctactgtagaacctngtaatcatgggtaatncccagtcaaagcagataatattactatctagctaaaaaaaaaaaaaaaaaa

SEQ ID NO: 18621 - DNA, 1574 bp, Oryza sativa
  Clone ID: PAT_MRT4530_24161C.1
acacgctcctcgctgctgctagtctcctccctcccatgcacgccgcccatggtggaggtggaaggcaaccagtaaccatcttgccaatctcgagttctcagcttgtggtcacaggtggagattggccacttcttgcctacctggagagggccctcatagcgccggcagctgtgctgtcccctcagggctacctgccgtccgctgccagaatgtgcacgacgccgcgctcgtggctgggatccggcttggacgtggaggaaatcgagtagtaccgtggtgtgctgctgcgtgcggaggccagagtgtcggttcacggcggcggcggcggtgtcggtggtggtatgaggtggcactgggtcatcgcgtcgacgtgcgcgcgcaccactgctgcttcgggcgccgtggaggggttctgggaccagaggccgtaccccgtgtcgtcaccgccggcggcgccgacgccagcagcgtccggcggtggtggcggccacgccaaggcggccgcgcggaggcggcggcggcggcccaaggtggtgaagaacaaggaggaggccgagagccagcggcgcaaccacatcgccgtggaacgcaaccggcggcggcagatgaacgagtacctcgccgtgctccgctccctcatgccgccatcctacgcgcagcggggtgaccaggcgtcgatcgtcgccggcgccatcaacttcgtcaaggagctggagcagctgctccagtcgctagaggcccagaagcgtcgcgccgagcacgcgccgccggcgccgccgttcgccgggttcttcacgttccctcagtactctaccacagttggtgacaacaatgcggccggctctggcgccgccgacggcgagggcggctgcggcgcgcggcccggcgcggccgacatcgaggtggccatggcggagagccacgcgaacgtgagggtgctcgcgccgcggcggccgaggcagctgctgaggatggtggtggcgctgcaatgcctcggcctcaccgtgctccacctcaacgtcaccaccaccgccgaccatttggcgctctactccttcagcctcaagatggaggatgaatgccggctttcgtcagtcgacgagatcgccggcgccgtcaatcagatgatgtcggagtctgaagatgaaaagagcctctcggatgaaataacagatacatcacacctaccatgggatcccttctggaccaggaaatgcaaatacccgagcggtgggcggagcgacaacgggtggcagagaacggaggggtggcgggcggtgggcggagcgagcgccgggcggagaagaggagcggcgggtggaagcgaagcgtcggcggggcggtgggtggagcagtggggtggcaggtggaagtggagcgtcggtggggcggtgggccgagcgacggcgggcaccaggggcggtggccgcagcgagaggagcggtgcacgacggcgggagataggagagacggccggcggacgagaggagcaccgcgcggtcggcctcccttcctctccctctgtcatccgcggtgaagagatggggtggaaaagagggcgctcagagcagtag

SEQ ID NO: 18622 - DNA, 1371 bp, Oryza sativa
  Clone ID: PAT_MRT4530_24162C.1
tttttttttttttttttttttttttttttttatgaacaactgaaaagagctatatatgtgattattatctattgacaagtaacaaatacaacgttttttttttatcaaatacaacacctcgtagtttataaaagcgaaaaaaagatctgctcattagaacttcggttttatgagaaatggcatcttgtcagcaaatggagggtcagagtatctccctgtaaggatctgcgacgcgatgtggaaattcgcagcttctgtgtaatggattccatcccaattgacaaattctgtactgtccttgcaccctttggctgttacaagattaccattcagagacgctgtctgcccacaaggtactctactgtcatagttcaagggtggccctccatatccacagcatgcttggatgggattctcgaacccatagcgcgaataattagcgatcaggctgtacttgatggtgtagatgtcaacataagtgatactagccccagcgaattcacctcttaactttgtgcaaagtgcatgcagctgtaagttgaaaagctttgcaacacgattatgctttgctacacaacgaagttcatccagctgggatcggtctttgccgaaaaaagctacgttttgaggtaagcagccaagaggacctgtgttgtgaatccagaatttcctggcaccttgctcatataatttcttcagcccagtttcgaattccaacaaaatagtcggaatggatgcagcaacttggtcctctgttttccagtagaattcaccagcaaggtcattttgacctatgtcaaacgtgtaaagtccccgcgaaaagtaatccgactgaggaatatatctcctgtacgtatctcctttagatagaagcttagtaactttgtccttgaatgcaaagaattgcttaatctgaagaccaaatgaaaatgggctgacagatgttgccgttgctggagtaattgaacagccagcttgagcaaaattaacacccgcacgtaagttaggtgcaccaacagaatccaaatatgcattgaggaacggcatatccattgcatccatgaggaagtcgatgatgaggcggccgtcgcagaaccggccggagggggagccgaagaaggtggagccgtagggaggcgcgatggactcgaacccggcggccacgcgccctcccgtgtcggagttggagtcgccgaagttgaacaccgccgggtagttgaactccggcgacgacgcctcgagctcctccgcgcggccgccgaggcagagggcggcggcggcgacgaggagcaccgccgcagcatgcggtggcccgcgcatggtggcttgcgctcgctagcttaactccactctgcttctgcctcgtgccgt

SEQ ID NO: 18623 - DNA, 1349 bp, Oryza sativa
  Clone ID: PAT_MRT4530_24163C.1
gctgggccgagccattcgtccccacgccgccgtgcgccttggccgccggcgggaggtcgccgggacctcgccgcaccttccccggccgccgccgtgctagtcacgcaccgtcccggctgtgcttggccacacacgcgctgcctctccccggctggaggaagaagacgatgaagagagagaggaactttcaacttttctgtcacattgttccaatttcaatcaaactttcaatcaaacttttgacatggcggcgccagagttgaatagtttgatggacgacgtcgtcgaagagatcctcctgcgcctcccgccggacgatccctcgtgcgccgtccgcgcctccctcgtctgcaaacgctggcgccgcctcctcaccgatgacccgtgcttccaacgccgctaccgcgcgttccaccgccgccgagcgcgcgcgccgcctccgctgctgggcttcatccaccacgtctccgacgaccaacaccccggcgcccccaccgtctcacggttcgtcctgaccaacgcgttccgccccgccgagccagagcgccgcaggggctggtggtggccgatcgactgccgccacggccgcgccctcttccactccgccggcgaaggcctcgccgtctgggaccccatggcgggcgacgtgcggtggcagcaggagccgcgcatcccggcctccgactgcatgtactccaccgccgccgtggcgtgcgcggcgcccggctgcgaccacgaccacgaccacggcgactgcggcggaggccccttcgtcctcgtcttcgtggccgtcgacgagcgccacgagaccgcgtcggcgttctcgtgctcatcggagaccggggagtggagcagcgcgccctccaccgtacacctcgaccgcgagtacctctacagaagcccaacgtcctcgccggcggcgccgtccactttctcaccgactacggcaggaccgtcctccgctacgacctcgccaagctggagctgtcggcgatcgagccgccggaggtgcactccgacgtgctcctcacgacgacggagggcggcgacctggggctggccatcctggacgaccagcgctacctccgcctctgggcgtgggccgcagaccatggcgtcacgcggcggtgggttcgccggagggtggtcgacctcttcgccgagctcccgttcctccagcacgtactcccgctgaatctgaccggcttcgacgagggcaccggcatgatcttcttccaagcgagcgacggcgactacgccatagatgagctcatgtcgtcaccacgtgccaagaagctttgggggagggacaacttttctaatgtcttcccctacagaagcttctacgt

SEQ ID NO: 18624 - DNA, 342 bp, Oryza sativa
  Clone ID: PAT_MRT4530_24164C.1
atggctggcactatttacccaacgctcccgccggtagatcgaattcttatcgtggcttctcagttttgctcgcggaacctgcttgtctgctcgcccatcgaccatcggcaacttgggtttcatgtgagaccatatattaatagtatagtggggaggaggctggcggggtgggccgaggcaggagaagaggagggcgtcggcagccggcaacgcagcggcggcggccggagtggcggcaacgacgacgccggagaaggtggtgacatcgccgcgtgtgcgagctcggggttggagcggcccgagaggcggaagaaggaaaagggcatcgtctgcggtcggtga

SEQ ID NO: 18625 - DNA, 1767 bp, Oryza sativa
  Clone ID: PAT_MRT4530_24165C.1
atgacgacgaagaagaagccgctgtcgtcgtcgccgtccacctccgccgtggcgaagcttctcctgcggtggcgcggccggagcaaggcggccaaggacgagagcatcgagttcttctccgagctacggagcagccagcccgatcgccgcggcgccgcctccgatcacgccgggggaggaggagctccggatgggaggggaaaggcaaagagctccgcccccgctgccgccggtggagacgccggcggcggcggcaagctcttgtcgacgggaaccgagaagcatgactacgattggcttctgacacctccggcgtcgccactctggtcgccggcgacgagcgccgccgcaggccaccatgtctccgccgcgccgccgccgagccggctggaaagagctagctcggcgccatacgcgaaagggaattcacggctgccattgacacggcgggagaacgggcccccggcgtcgaggctgtcgaggagcagctccgcgacgtcgcaactctccaccgtcgcccacgcgccgggcaccgtgttctccggccgccggacattgtcgtcggcgtcggtgtcgtcgatcaacacggcgagcagcacgtccgtgggctcgacgccgcgggggtcgtcggcgtcgacgagcccacgcacgccggccaccgcaaggggcgcgccggccggggcggcttggccccgtcacagggacagaacacaagcactgcacgtgttcggcgccgccgccgccgccggccaacccagcgcgtcgtcgctggtgtccaggtcgagaccctcgctgacggcgccgtcgagcggagcgctccagcgcgcgacgcccggcgccgccggcacgtcgagcccgaggtcaaccgccccggcgtgtcagcaacctgcagcgaccagacgtggcgccaactccgtggcacgttcggggtcaacgccacgggccgcgtcgccctcgccgcgagcgcgtgacgtcagcattgcggcgggcgcgtcccgtgtcgcgccgccgcccatgtccagcagcaagccgaggcaggcgccggcgtcggggaagcaaagcaacggcaacggcatggcggcggcgagcacggcagcccagaggtggcgctcggccgggaggaacgcacggagggaggaggcggtcacccatgaatcatcaagaaacagcgacagtcgccggaagatcgacgtagcgaacaccagcgccgccgctcgccgcactgctgacctctctagcccgcgcggcgcgagcggcggttctccgacgagcggcggcggcggtcggaacaagtcgacagacaccgacgcgaagcgcagcctatggcagggagcagcggcacggcacctgatggcggcggcgcgccgggacgcaacccccaccacccgccggagcggtggcctctcgtcggtggcgtcaagaagccgcctggggatcacgcccgccgcctcctccggtgacatctcggccacgcccactggacgacggtccacgccggcgaaaggcaggcccgccgccgacgcggccgcggccgcatcctccccgcgggtggccgcgggggacgcgttcccgagctcgcggtacgacgccatgctgctccgggaggaccccaggaacctgacatggctgcacggatgcgacgacggcgaggagatcgacggtggagatctggtcgaggcctcgctggagtcgttcgacgtgccggccgggttgagcagcacggggctgcacggcggcaagactttgaattttggcgccaatttgtaa

SEQ ID NO: 18626 - DNA, 1227 bp, Oryza sativa
  Clone ID: PAT_MRT4530_24166C.1
atggagaatcttaggaaggcttttcaaaaagtttgtgcccccttcgagccactaagtaatgtagatggtgaaagtggagatgatgacaagggaaagaacgtctccgatgtttgcttcatggcgcgtggtgaatctgacacagagtatgaagacaatgagcatggttcattacggggtgccagactgagaagcggcgagaagttcgtgggggtcgctggggagtccatgcctctggttgtagagggggtgattatgatccagtggtacacctctggccagagtaaaactattcgaatagccgtgcccgcggtcatgggcgggttgagcaatgctttggtggcaaggaaggagaacgtgtggattgtggattttggttgttcgcggcacatgaccggtgataaaaattggttctcctccctaaagaaggcatctaagactgaatcgattatctttggtgatactgctacaagtgtcgttctcgctacaggtttggttaaggaggaggatggtcgtatttttgaagacgagagcgactacgacgacgacaacgaggtcggctcggccggtcagaccgggcgccaggccggtcagaccgccggcacacctccggtcaaaccggcgcatgacgtgcggtcagaccggccagggtcgtcggctgagggatctgttgatgctgatcgagatggtcctccggagattacaacttcgaccagtacggatacagaacgtggatcaacttcagaagttgctgctcctttgcacattcaacgacgacatccaccggaacaaattattggtaatataggtgagcggactacaaggtctaaggagaaagtttatgtcaaacaaccaccaggttttgaaaatcctgatttttccaaccatgtttttaaattgtctaaagctttgtatgattttgctgagactatgcgcagggaatttgagatgagcatgatggatgagttatcgtactttttgggattgcaaattaagcaaacacctcaagctgtgttggatcctgatgaagatgaagctgttgatcaaaaggagtatagaagtatgattggatctttgttgtatctaactgcttctaggccagacatagaatttgcttttttggacaccaagttgcaaattgctgatattttcactaaacctttggattctaatctctttgcttttctttgtggtgaattgggcgtaattcatccttttggcatggtttga

SEQ ID NO: 18627 - DNA, 2595 bp, Oryza sativa
  Clone ID: PAT_MRT4530_24167C.1
atgccttcttttcttgctgcttttaatgccacatccgatgatcaactcgaacaaatcgaggaggaggatttggctttggttgctaaccgtattgctcgagctatgaataataccaggaacaggaaaagaggaggtccaaatcgttgctttgaatgtggttcaattgatcatcttcgttcgcattgtcctaagcttgggagaggcaaaagagaagacaaagatggtgagaagacaagcaacaacaagtcgcagggttcatctcaagcgaggaagttcaaggagaatcttaggagggcttttgatcaagtctatgctgcatttgagccatcaagtgatgtagatggtgagagtggtgatgatgataagggaaagaacatctccggtgtttgcttcatggcgcgtggtgaatcggatattgagtatgaagatcatgaggtaagtgcttttgaggaagctattaatattttgagtgcaaaaaatatgaagtgtgagaagatgtatagaaaacaggaatttatcattgaatctcttaaatctgaaattgctagattaaaatctcttatttctaatgatgatgattgctcaaattgtgaggttttaatgaatgagatttcaaaaattagagatgttaatgctgcacatgatttgaaaaatagatcttctcttgcttgtagttttgctttgcacacacgcactttggatgagttgtttttaactaaaaagttgttgcaaaaatatcaaattgtttttcatgctagtttgatgtttaacatgatttctgctaaaaagttaaaacaacctcatgatgttttggattgctcaacatgtaacttgaataagatgaaactaaaagatgctttaggtcgtgttgagtatatggaagatgttgtgaaatacaatgaagtgctttcttgccccaaatgtcgtaaaaacaaaggtgttgtggtagattgtgaaaattgtacaaatttggaaaaagaggtttcttatttgaaaaattctttgcaaagattttctgatggtgttggtgctagaagtggtgagaatttgattaaacatgatactaataaaactgtgtttaaatctgttggtatcatgtctaccatgaatgcatcttcttcaaaatccaatgttgtgcatacaaaacctcctgttgttgcttctgttgctaagtcttctagtgctatcaatgctttggtggcaaggaaggagaacgtgtggatcgtagattccggttgttcgcagcacatgaccggtgataaaaattggttctcctcccttaaaaaggcatccaagactgaatcgattatctttggtgatgcttctataagtaccgttctcgctacaggtttggttaaggttcagggggaggatggtcgtatttttgaagacgagagcgacgacgacaacgatgatgatgatgaggtcggctcggccggtcagaccgggcgtgaggccggtcagactggcacaggaggtgagcggattacaaggtctaaggtaacgactcatgatgtttgtgcaaattctgcatttgttgcttcttttaaacccaaagatgtgtcacatgcattaactgatgaatcgtggattaacgccatgcatgaagaacttgaaaattttgagagaaacaaagtttgggctttagttgaaccaccttctggacataatattattggaaccaaatgggttttcaaaaataaacaaaatgaggatggtttgattgtgagaaataaagctagaattgttgctcaaggttttacccaggtggagggtttggattttgatgaaacttttgctcatgttgctagaattgaagcaattagacttttgttggcttttgctgcttcaaaaggttttaaattatatcaaatggatgtgaaaaatgcttttctaaatggttttatacaggaggaagtttatgtcaaacaaccatcaggttttgaaaatcctgattttcctaaccatgtttttagattgtctaaagctttgtatggtttgaaacaagctcctagggcatggtatgataggcttaagaacttttttcttgcgaaaggttttacaatgggaaaggttgacaaaacgctttttgttcttaaacatggtgataatcaactgttcgttcagatttatgtggatgatatcatctttggttgttcaactcacgctttggttgtagattttgctgagactatgcacagggaatttgagatgagcatgatgtatggtgaagctgttgatcaaaaggaatatagaagtatgattggatctttgttgtatctaactgcttctaggccagacatacaatttgctattctttggcttttatttactttgaaagattatggtcttacttttgagaaagtacctctcttttgtgacaatacaagtgctattaatattgctaagaatcatgttcaacactcacgcacaaagcacattgacattcgctttcactttttgagggatcatgttgagaaaggagatgttgtttgtgactcgatgtctcgggagagtatttgtggtgatggaccgggagtcggcttggggataagacgacgtccgtggtggtcagagatcatgcgggatacttag

SEQ ID NO: 18628 - DNA, 809 bp, Oryza sativa
  Clone ID: PAT_MRT4530_24168C.1
gctcactctcgccgtcggaatcgtgctcgcgccgtagcaccttctctccgccgtcgccgccgtgcttcggttagccgccgccgccgctccgctcctcctcccgactcggcgacacctccctcggcatcgccgcatcgccgtcgacctcgtccgcgcctccgtttcgctcgccgaccgtcggagcaccgtcgtcatcgtcatcccgagccgcgccgccgtctccctccgctccggccgccgttctcgtcgtcgtcgttgtcccgggacgccgcagcttcggaagatccgctcttcgtggaagttgaagccgtcgtttgggaaagcgagcaagtaagagaagctttggagaagatgtcttaggtggagtcctggcttataccccagttgagcgcctgtgaagatggagccgtaggcccgctagtccgctgctgtttatttttgattgtcaggcctggagcgcctttgtaataatgtaaatacccttctagtaccaacacctttgattgatccaaaatcatgttgaggttttttttaccatcagaaaatcttagcaaagaattttttaaataagaaacctctttttccaaattagcacaattttcacaatctaccatgacacctttgcttttacgacatttagggcaagaaagcacttcattgtttttcacaacatcttctatgtactcaacacgacctaaagcatctttcaatttcaacttattcaaagcacatgttgagcaatccaaaacatcatgaggttgttttaactcattatcttcatactctgtgtcagattcaccacgcgccat

SEQ ID NO: 18629 - DNA, 1103 bp, Oryza sativa
  unsure (1)..(1103): unsure at all n locations
  Clone ID: PAT_MRT4530_24169C.1
atcaaatcctatttttattcattaattaacagcacaaaaattacagcccttataatacctaataaaatccaatgatcttctaatacagtgcaaatacatatgggccaacccagccacatgttcaaatacaatcacaggttcactgaccatgaatacattataggttaactagccaaaacaaaatacatcggcacataatcaggttcagtacatcagtatatcactctgaccaaaaccagccagtcatggactttaacacataatcacaagtcaaaatacatatgcgccaacccaagtccaaatacaatctcaggttcacttaccaaacgcaaaaccaagtgtcgaaatcacactaaccaaaatccactgccgtctcatcatgaatcatcaaggcgacatgaggaggattgacaaaccttacctcttctcaaagtatgtctttggaggagcgataacaccgccagcacccatcacaggttcagcaatgaaagcagcaatctaagccagcattaccttcaccattctcatctgctctcaccatcacctattgaagtagacagtcaacatggtcagatcaacctacaaagcataagttgagaattggagagaagagaacgaacgtgtagaactaaaccaaatcaaatgcagcatggatcttaaacatatataatacaggatcttatagtgggcaatggcatgtaagcacaactacatacatatatataatatatggatcttatagtaggcaatggcatgtaagcacaactacatacnatatatataatacagattataaaccaagaaactgaaggaaggaaggaaggattgaattaactcgaaatggaactcaaaccatgagcagcaaaatgcctctgccatctcagatctggaagctgctgcttccaataaaatgcaggagcacaccaacacccaccctctctcattcaaccatccatttcttggtgccacaacccacaaacagcaaacgaacatgatcaacagtaacggagaagaaacagaggaacatttctactagagtactactgaatgtaaagaaatgaaaggttattcacaagtggagaaacaaaaggaaacccggccgg

SEQ ID NO: 18630 - DNA, 797 bp, Oryza sativa
  Clone ID: PAT_MRT4530_2416C.1
acgatctggcagcttggctccaactcaagcgaagcccatacataaatggcatgttcttaacatcaagctttattttcagcctccatcgttgagtcgacctctcatctcatgcagagccttagcatgccccgttgagaacctcgttgctgctgcggcgacttggcgcttaaaggagatagggttggaagggaggggtatggtgggagcaactaagaaaccgaggtgacggattaaggaggaagacgccgcacgtctaccgctgctctatctcctggccgcggtccgggtggcgacgcggtgcgatggggtccgaacggcgacctgaacgcgggcaacggtggccagggtttagggggatcgaagtcaaggcggcgtttggcgaagggcggagagcaaagggcggcgggcggcgcgggatggggccatgggggtgcgagggcggcggttggcgatccctccggagggcgaaggaaaagggaaaggaaaccgagcgctggcgatttggcggagggcgaaggaaaccggaagtgacctctgacaagcagagcacacgcctcctgccccgctcgccagctttcccggtggacgcccattttaaccttcattcaatggccagcgacttccttgccatgctcgcgctgaagcctggaatggatctgaccgggactgacgtaccaactccaggagttagcacgccggctccggctagggacgagagccgggaagctctcatcattctgacgggacggggcgaggcgtgtgacaggccgcctgttgccacccaacccgcgatctga

SEQ ID NO: 18631 - DNA, 4209 bp, Oryza sativa
  Clone ID: PAT_MRT4530_24170C.1
atgtctatttgggagatgaaagttacatctattcaggagtctgttaacatgtctactctgactttggatccactttataccaaattgaaaacacatgagatgaatattctttctggcaaagttgattctaaatcgagtgctttggtttcttcttcttcttctttgattgttgatgcttcttcatctatgtcttcttttcttgctgcttttaatgccacatccgatgatcaactcgaacaaatcgaggaggaggatttggctttggtcgctaacagaattgctcgagctatgaataatgccaggaacaggaaaagagatggtccaaatcgttgctttgaatgtggttcaattgatcatcttcgttcgcattgtcctaagcttgggagaggcaaaagagaagacaaagatggtgagaagaccaacaacaacaagcccaacaactacaacaagtcaaagggttctaaccaagggaggaagatggagaatcttaggaaggcttttcaacaagtttgcgccgctttcgagccactaagtgatgtagatggtgaaagtggagatgatgataagggaaagaatgtctccgatgtttgcttcatggcgcgtggtgaatctgacacagagtatgaagataatgaggtgagtgcttttgatgaagctattaatattttaagtgctaaaaataaaaagtgtgagaagatgtataaaaaacaggaatttatcattgaatctcttaaatctgaaattgataggttaaaatctcttattcctaatgatgatgattgtgaaaattgtgaggttttaatgaatgagatttcaaaaattagagatgttaatgctgcacatgatttgaaaaatagatcttctcttgcttgttgttttgctttgcacacacgcactttggatgagttgtttttaactaaaaagttgttgcaaaaatatcaaattgcttttcatgctagtttgatgtttaacatgatttctgttaaaaagttaaaacaacctcatgatgttttggattgctcaacatgtaatttgaataagatgaaactaaaagatgctttaggtcgtgttgagtatatggaagatgttgtgaaaaacaatgaagtgctttcttgccccaaatgtcctaaaagcaaaggtgttatggtagattgtgaaaattgtgctaatttggaaaaagaggtttcttatttgaaaaattctttgctaagattttctgatggtaaaaagaacctcaatatgattttggatcaatcaaaggttagcacaaataaccgtggtttaggttttgatccttatgctcataattctagacatcctcctattgtgttaggtgttggtgctagaagaggtgagattttgattaaacatgatactaataaaactgtgtttaaatctgctggtatcatgtctactatgaatgcatcttcttcaaaatccaatgttgtgcatgcaaaacctcctgtttctgcttgtgttgctaaaaattctagttctaagaatgtgtctcaacaacgaaatcggtcaggccgcagtgggtcccgcggtcagaccggcgaccggtcagaccagctgaacagcctcggtcagaccgggcaccggtcagacctgcggtacagaggcggtcagaccggtttccgcatggatatatgcctattggatcttctggtcgtaaatgaaaaatttgaattaaagaatgtagctttggttaaggacttaaagtacaatttgctttcggtttcacaaattgttgatgaagaatttgaagttcactttaagaaaactggaagtaaagtttttgattctcgtggtgattctgtgctgaatatttctcgctatggaagagtgtttaaagctgattttgaaaattctgtttcacctgtgataacatgtttggttgctaagtttgataaagatgtgatgttttggcatcgtagacttggacatgttggttttgatcatctcactaggttaagtggtttggaacttgttcgtggtttgcctaaacttaagaaagatcttgatttggacgaagcttttcaacactttcgtggtttgtttcttcgattagagcttgaatttcctggttctttgaaaagaattcgaagtgataatggtggagagtttaaaaatgcttcatttgaacaattttgcaacgaaagaggtcttgaacatgaattttcttctcctcgtgttactcaacaaaacggtgttgttgaaagaaaaaatcgtgttttggttgagatggctagaacgatgttggatgaatataaaactcctagaaaattttgggctgaggcaattaacactgcttgttatatttcaaatcgagttttcttgcgttctaaacttggaaaaacttcttatgaacttcgatttggtcatcaacccaaagtttcacatttgcgtgtttttggttgcaaatgctttgacttgaaatctggaaatttggatatgtttgaggcacgttctaccgatggattgtttcttggttacctcgcacatactcgtggctatcgtgtacttattttagggactaacaaaattgttgagacttgcgaagtttcttttaatgaggctagtcctggtactagacccgatattgcaggtacactgtcacaggttcaaggggaggatggtcgtatttttgaagatgagagcgactacgacgatgatgacgaggtcggctcggccggtcagaccgggcgccaggccggtcagaccgccggcacacctccggtcagaccggcgcatgatgagcggtcagaccggccaggttcgtcgggttctgttgatgctgatcgagatggtcctccagagaattcaacttcgaccagtactgaaacagaacgtggttcaacttcagaagttgctgctcctttgcacattcaacgacgacatccgccagaacaaattataggaaatataggtgagcggactacaaggtctaaggtaacgactcatgatgtttgtgcaaattctgcatttgttgcttcttttgaacccaaagatgtgtcacatgcaataactgacgaatcgtggattaacgccatgcatgaagaacttgaaaattttgagagaaacaaagtttggactttagttgaaccaccttctggacataatgttattggaaccaagtgggttttcaaaaataaacaaaatgaggatggtttgattatgagaaataaagctagacttgttgctcaaggttttactcaagttgagggtttgaattttgatgaaacttttgctcctgttgctagaattgaggcaattagacttttgttggcttttgctgcttcaaaaggttttaaattgtatcaaatggatgtgaaaagtgcttttctaaatggttttatacaggaggaagtttatgtcaaacaaccaccgggttttgaaaatcctgattttcccaaccatgtttttaaattgtctaaagctttgtatggtttgaaacaagctcctagggcatggtatgataggcttaagaactttttgcttgcgaaaggttatacaatgggaaaggttgacaaaacgctttttgttcataagcatggtgataatcaacttttcgttcagatttatgtggatgatattatctttggttgttcgactcacactgtggttgtagattttgctgagactatgcacagggaatttgagatgagcatgatgggtgagtcatcgtactttttgggattgcaaattaagcacacacctcaagctgtgttggatcctgatgaagatggtgaatctgttgatcacaaggagtatagaagtatgattggatctttgttgtatctaactgcttctaggccagatatacaatttgctggttcaagatggagaattgcaagccaatttcaacaccaaatggttctacagctgtgttggatcctgatgaagatgattctttggcttttatctactttgaaagattatgctcttacttttgagaaagtacctctcttttgtgataatactagtgctatcaatattgctaagaatcctgttcaacactcacgcacaaagcacattgatattcgttttcactttttgagggatcatgttgagaaaggagatgttgaattacagtttttggacaccaagttgcgaattgctgatattttcaataaacctttggattctaatcgctttgcttttcttcgtggtgaattgggtgtaattcatccttttggcatggtttga

SEQ ID NO: 18632 - DNA, 2523 bp, Oryza sativa
  Clone ID: PAT_MRT4530_24171C.1
atggctgttaggttttcaactaagcctcatgttttcgatggaacggattttgaccgatatagagtgcagtcttacattatggctgaggattatgatatttggagaaaagtttctcatccttatgtgatctctaaacaacttagtactgctgctttaaaaactgagtttgaacaaaattgcaaagctcgcaatattcttttgagtggaatttctcgttcggactatgatcgtgttgctcactttcaaactgcccatgagatttggattgctttgagtaattttcatcaaggaacaaataatattaaagaacttcgtcgagatcttttcaaaaaggagtatattaaatttgaaatgaaacctagagaagctttggatgactatctttttaggtttaataaaattctgagtgatattagatctttagatttttcttatgatgttaattatacacagtctgagatttctcgccactttttgaataatcttgacaggtctatttgggagatgaaagttacatctattctggaatctattgatatgactacttcgactttggattcgctttacacaaaactgaaaacacatgggatgaatattctttctcgtaaagttgattctaagtcgagtgctttggtttcttcctcaactttggatgttgatgcttcttcatcaaagtcttcttttctagctttatttaatgccacatctgatgatcaactcgaacagatcgaggaggaggatttggctttggttgctaaccgtattgctcgagctatgaacaatgtcaggtttagaaaaagaggtggtccaaatcgttgctttgaatgtggatctattgatcatcttcatgcgcgttgtcctaagcttgggagaggcagaagggaagacaataatgctagagagaagaccaatgacaacaagccaaagggtacgttcaaaggggagaaggtcaaggaggttctcaagaaggcttttgatcaagtctacgccgcatttgagccactgagcgatgtagatggtgatagtggagatgaagataagggaaagaacatctccggtgtttgcttcatggcacttggtgaattggattcagagtgtgaagacaatgaggtaagtgctcttgaggaagctattaatattttgagagcaaaaaatatgaagtgtgagaagatgtatagaaaacaggagtttatcattgaatctcttaattctaaaattgctagattaaaatctcttattcccaatgatgatgattgcaaaaattattggctcataaacagaaaaaggagagagaggttgcttttgcaaaatcaaagtggcaaaaatctggttttccctcgaggaaaccggttagaccgcagtgggtcccgcggtcagaccggctactgtgcggcggtcagatcgggcaccggtcagactggcggtacagaagcggtcagaccggccactgtacctcggtcagaccggcctcggaggaattttgctgaaaattctcaaactgtttttgcacgtggatatatgcctattggatcttctggtcgtgtgcctcagtattggattcctaaatttttattatcatctaaccccagtactgaggcttcgacatcttcatgtgtgtacgctttggtggcaaggaaggagaacgtgtggatcgtggattccggttgttcgcggcacatgaccggtaataaaaattggttctcctccctcaaacaggcatccaagactgaatcgattatttttggtgatgcttctactagtgccgttctcgctacaggtttggtcaaggacgtgcggtcagaccgaccagggtcgtcggctgaggcttctgttgacgctgttcgagatggtcctccagagacttcaacttcgaccagtactggtacagaacgtgaatcaaattcagaagtcactactcctttgcatattgaacgacgagatccgccggaacaaatcattggtaatttaggtgagcggactactaggtctaaggaggaagtttatgtcaaacaaccaccaggttttgaaaatcctgattttcccaaccatatttttaaattgtctaaagctttgtatggcttgaaacaagcaccttggtatgatagacttaagaactttttgcttgctaaaggtttttcaatgggaaaggttgacaaaacgctttttgttcttaagcatggtgataatcaactgtttgttcagatttatgtggacgatatcatatttggttgttcaactcacgctttggttgtggagtttgctgagactatgcgcagggaatttgagatgagcatgatgggtgagttatcgtactttttaggattgcaaattaatcaaactcctcaaggtacatttgtgcatcaaacgaagtatacgaaggatcttttgagacggttcaagatggagaattgtaagccaatttcaacatcaattggttctacagctatgttggatcctgatgaagatggtgaagctgttgatcaaaaggagtatagaagtatgattgaatctttgttatattaa

SEQ ID NO: 18633 - DNA, 169 bp, Oryza sativa
  Clone ID: PAT_MRT4530_24172C.1
tagacaccataggtcatggcactcatacttcttccactacagtcatgctgtcccgaatgccaacctctttggtttggccaatgggattgccaagggcacggccccagatgagacgattgctgatggcgttgatgtcatctccatctcacttgccactaggctcaagtaa

SEQ ID NO: 18634 - DNA, 1247 bp, Oryza sativa
  Clone ID: PAT_MRT4530_24173C.1
gtacactgtcacaggttcagggggaggatgattgtatttttgaagacgagagcaacgacaacgacaacgacaaggaggaagtttatgtcaaacaaccaccaggttttgaaaatcctgattttcccaaccatgtttataaattatctaaagctttgtatggtttgaaacaagctcctagggcatggtatgataggcttaagaactttttgcttgcgaaaggtttttcaatgggaaaggttgacaaaacgctttttgttcttaagcatgctgataatcaacttttcgttcagatttatgtggatgatatcatctttggttgttcgactcacgctttggttgtagattttgttgagactatgcacagggaatttgagatgagcatgatgggtgagttattgtactttttgggattgcaaattaagcaaacacctcaaggtatttttgtgcatcaaacgaagtatacgaaggatattttgagacggttcaagatggagaattacaagccaatttcaacaccaattggttctacagctgtgttggatcctgatgaagatggagaagctgttgatcaacaggaatatagaagtatgattggatctttgttgtatctaactgcttctaggccagacatacaatttgttgtgtgtttgtgtgcacgctttcaagcttctcctcgtgcttcacatcgtcaagcagtcaagcgaataatgtggtatttgaatcatacacttgagtttggaatttggtattccacttcatgttctatatgcttaagtggatattctgatgctgattttgggggttgtagaattgataggaaaagtactagtggaacatgtcattttcttggtacatcattgattgcatggtcttctaggaaacaatctagtgttgcccaatcaactgctgaatctgaatatgttgctgctgctagttgttgttctcagattctttggcttttatctactttgaaagattatggtcttacttttgataaagtacctctcttttgtgataatactagtgttatcaatattgctaagaatcatgttcaactttcacgcacaaagcacattgatattcattttcactttttgagggatcatgttgagaagggagatgttgaattgcagtttttagacacaaagttgcaaattgctgatattttcactaaacctttggattctaatcgttttgcttttctttgtggtgaattgggcataattcatccttttggcatggtttga

SEQ ID NO: 18635 - DNA, 1506 bp, Oryza sativa
  Clone ID: PAT_MRT4530_24174C.1
atggctactcccgctaggttttcaactaagcctcatgtttctgatggaacggatttttctcattggtgtagtaggttgcaatcttacattatggctgaagattatgatatttggataaaagtttctcatgcttatgtaattcctgaagctattaatactgctgctgaaaaaactgcttttgaacaaaattgcaaagctcgcaacattcttttgagtggtatttctcgttcggattatgatcgtgttgctcatcttcaaactgctcatgagatttgggttgctttaagtaattttcatcaaggaacaaataacattaaagagcttcgtcgagatctttttaaaaatgagtacattaaatttgagatgaaacctggagaagctttggatgactatctttctaggaacaggaaaagaggtagtccaaatcgttgctctgaatgtggttcaattgatcatcttcgttcgcattgtcctaagcttgggagaggcaaaagagaagacaaagatggtgagaagaccaacaataacaagcccaacaacaacaagtcgaagggttcttaccaagggaggaagatggagaatcttaggaaggctattcaacaagtttgcgccgcctttgagccactaagtgatgtagatggtgaaagtggagatgatgataagggaaagaacgtctccgatgtttgcttcatggcgtgtggtgaatctgacacagagtatgaagacaatgaggtgagtgcttttgaggaagctattaacattttgagtgcaaaaaataagaagtgtgttagtgctagaagtagtgagattttggttaaacctgatactaacaaaactgtgtttaaatctgctggtatcatgtctactatgaatgcatcttcttcaaaatccaatgttatacatgcaaaatctcctgttgttgctcatgttgctaaatctactaatgctaccaatgtgcctaatcatcgtgaaaaatatacttgttctttttgtggaaaagatggacatattgttggtttttgtttcagattagctcataaacagaaaaaggagagagagattgcttttgcaaaatcaaagtggcaaaaatcgggttttccctcgaggaaaccggtcagaccgcagtgggtcccgcggtcagactggcgactggtcaaaccggcagcacacccttggtcagaccggtcttggtggaatttttctgaaaattctaaaaatgattttgcacgtggatatatgcctattggatcttctggtcatgtgtctcagtactggattcctaaatttttattatcacctaaccctagtactgaggcttcgacttctgcttgtgtgtatgctttggtggcaaggaaggagaacgtgtggatcgtggatttcggttgttcgcggcacatgaccggtgataaaaattggttctcctccctaaagaaggcatcgaagactgaatcgattatctttggtgatgctgctacaagtgccgttctcgctacaggtttggttaag

SEQ ID NO: 18636 - DNA, 121 bp, Oryza sativa
  Clone ID: PAT_MRT4530_24175C.1
ttgctgtgttcgagcttcccggacacccccgaggacgccttccttgccggcctcgtcagcggcacggaccagatcatagactggagcatccagtacgcctacatcagcgtaattaggaggg

SEQ ID NO: 18637 - DNA, 1478 bp, Oryza sativa
  Clone ID: PAT_MRT4530_24176C.1
atggaggtattgtgtgcgtatgggatgcggagtcgaatttggaaggagtccaaatttgagagaagtaataaagtcgtcatccactttaagaattcttcgatttgtgtttcacttggtttcggcggtctaaccgacaactcaccggcggtcagaccggtggcagatcagcggtcagaccgtcggcggcgacaggcgcggcaggcatctcggcggttcgaccgatcgatctacatcggtcagaccgacattcatcaggtggttagaccggcgcatacacatcggtcagaccgcgatccgtcaaattcgaggcttgggaaaggcaaaagagaagacaaagatggtgagaagaacaacaacaacaagccgaagggttcatcccaaggaaggaagatgaaggagaatctcaggaaggcttttgaacaagtttgcgccgcgttcgagccactaagtgatgtagatggtgagagtggagatgatgataagggaaagaacatctccggtgtttgcttcatggcgcgtggtgaatctgacacagagtatgaagataatgagttaaaacaacctcatgatgttttggattgctcaacaagtaatttgaataagttgaaattgaaagatgctttaggtcgtgttgagtttatggaagatgttgtgaaaaacaatgaagtgctttcttgccctaaatgtcgtaaaagcaaaggtgtcatggtagattgtgaaaattgtgctaatttggaaaaagaggtttcttatttgaaaaattctttgctaagattttcttatggtaaaaagaacctcaacatgattttggatcaatcaaaggtgttggtgctagaagtagtgagattttggttaaacctgatactaacaaaactgtgtttaaatctgctggctttggtggcaaggaaggagaacgtgtggatcgtggattccggttgtgcgcggcacatgaccggtgataaaaattggttctcctccctcaaaaaggcatccaagactgaatcgattatctttggtgatgcttctacaagtgccgttcttgatacagtttcacaaattgttgatgaaaattttgtggttcactttaagaaaactagaagtaaagtttttgattcttgtggtgattctgtattgaatgtttctcgctatggaagagtgtttaaaactgattttgaaaatcctgtttcacctgtgataacatgtttagttgctaagtttgataaagacgtgatgttttggcatcgtagacttggacatgttggttttgatcatctcactaggttaagtggtttggatcttgttcgtggtttgcctaaacttaagaaagatcttgatttggtttatacactgtgtcgtcatgctaagatggttgcttcttcacatgctcttattgtttctgtgatgacggatgcaccgggacagctattacatatggacactgttggtccagctagagtgcaatctgttggaggaaagtg

SEQ ID NO: 18638 - DNA, 981 bp, Oryza sativa
  Clone ID: PAT_MRT4530_24177C.1
gcacgagggtcgcaccgaagcagagtagagaaggagaggagcggagcgccatcagccgtccgatcgagtgatccgatggctctcgctctctccacctctgctgctgctgccgccgcggcgcgggcgctcgcggcgagggtgacgacgacgacgacgaggggttacgcggcgtcggcggcggcgacagcgatgaggcgtgctgcggcggcggtaaaacggaacggcactgttggggatgacatatacgaaggactgtttcgctgggcaacatggcgggtaaaatttcgggcggtaatgcgggaggtaatccgcgtgcaacaaatcgggcggaactaggggggtgagatatgtcgggtataaatctccgtggcgattccgcggggaaaatggctggccggaaatttctggcggaacctctgcggtcggaattgcggggaggaattacgcgcggtgaatatggccggcaataattgccgtgccaaattgggggggagaaatttgggcgggcaaatttgcggggggatactccggacgacactctggcgtgagcaaacttcgccggcgacaagtgggcggtgcaatttcggggggtataagtccgccggtgaacacggggtcgggcgaacagttggggtggcaatttgcgcgggaggatttgtgtgcgcggggggaatctctcggagggtgtattgccggggcagacaaatgtggcggcgggataaattagccgcggtgagatatatttgcgcgtcctacgaaatcggccggcggagaaattctcgttgcgcgcaaattcagtggggggggtagcaatacgcacggtgcggaaaaattggcggcgggttcaatttctctcgcggcggataacattgtgcaggcggggcacaatatagtggggcgggccgcataaacttcggcgcgcggcggcgaaattcggtgcgctgtctgacaaataaaaccgcggtgggcgagaaatatgcg

SEQ ID NO: 18639 - DNA, 1315 bp, Oryza sativa
  Clone ID: PAT_MRT4530_24178C.1
ctgcagcccagtttcttttgatgaagctagtccaggtactagacccgatattgcagagagcgaagacgacaacgatgacaaggtcggctcggctggtcaaaccggacgccaggctggtcagaccgccggcacacctccggtcagaccggcacaggaggtgcggtcaaactgaccaggctcgtcgggttcgggtactgttgatgctgctcgagatggacctccagagattacaacttcgaccagtactgatacagaacgtggatcaacttcagaagtcgctgctcctttgcacattcaacgacaacatccgctggaacaaattattggtaatataggtgagcggactacaaggtctaaggtaacgactcatgatgtttgtgcaaattctgcatttgttgcttcttttgaaccaaaagatgtgtcacatgcattaactgatgaatcgtggattaatgccatgcatgaagaacttgaaaatcttgagagaaacaaagtttggactttagttgaaccaccttctggacataatattattggaaccaagtgggttttcaaaaataaataaaatgaggatggtttgattgtgagaaataaagctagacttgttgctcaaggttttagctaggtggagggtttggattttgatgaaacttttgctcctgttgctagaattgaggcaattagacttttgttggcttttgttgcttcaaaaggttttaaattgtatcaaatggatgtgaaaagtgcttttctaaatggttttatacaggaggaagtttatgtcaaaccactaggttttgaaaatcctaattttcccaaccatgtttttaaattgtctaaaactttgtatggtttgaaacaagctcctagggcatggtatgataggcttaagaactttttgcttgcgaaaggttttacaatgggaaaggttttacgtggtcttctaggaaacaatctagtgttgcttaatcaactactgaatttgaatatgttgctgctgctagttgttgttcacagattctttgtcttttatctactttgaaagattatggtcttacttttgagaaagtaccactcttttgtgataatattagtgctactaacattgctaagaatcatgttcaacactcacgcacaaagcatattgatattcgtttttactttttgatggatcatgttgagaagggagatgttgaattgcagtttttttgatacaaagttgcaacttgctgatattttcactaaacctttggattctaatcgatttgtttttctttgtggtgaattgggaataattcatccttttggccttgtt

SEQ ID NO: 18640 - DNA, 600 bp, Oryza sativa
  Clone ID: PAT_MRT4530_24179C.1
atgtcgggtgaccaagcgacggtgttcgcgaggaattatccggtagccttcctcctcgaatccgtgcccggcgagatcagagatggcgctttcgtctctcctgacagtatccggagacaccgcaaaagagaagacaaagatggtgagaagaccaacaacaacaagccaaagggttcatcccaaaggaggaagctggagaatctcaggaaggcttttcaacaagtttgcaccgccttcgagccactaagtggagatgatgataagggaaagaacatctccaatgtttgcttcatggcgcgtggtgaatctgacacagagtatgaagaaaatgagaccggcgaccggtcaaaccggctactgagcgtcggtcagaccgggcaccggtcagacggcggtacagaggcggtcagaccggcccccggtcagaccggccactgtacctcggctttggtggtaaggaaggagaacgtgtggatcgtggattccggttgttcgcggcacatgaccggtgataaaaattggttctcctcactcaaaaaggcatgcaagactgaatcgattatctttggtgatgctgctacaaatgccgtctcgctacag

SEQ ID NO: 18641 - DNA, 2466 bp, Oryza sativa
  Clone ID: PAT_MRT4530_2417C.1
atggagtctgttttgcaactcccagcacctccaagccatgctacggcagctacgcaggacacttctcctactgctggtgccttggcacacaatgatgcaattgatttgacaaccaatgatgattttgaggttttacctcctcctggtaagaagcaaaagaagtgtagttctgaagtttggcagcactacactaaatataaggtaagcaagaaagggtcagatgacactgtgattgtagaggagtatgttaaatgcaacaagtgctcatataaacgtcggtgtgagagtaattgtggcacttctgttttctggaatcacttgaataacaagcacaacatcaagtcaggtcaacaacaactacagatgaaaaagagtgaagatggtactgaaggagctgttgagacatacaggtatgatgagacggttagcctgaaaaagttctatatggcaatcatcatgcatgagtatccctttaacattgttgagcatgattactttgtggattttattaagtatttacgccctacttttccaattaagagtcgcattactgtgagaaaggatattataaacatatatgaagaggaaaagaagaaattgtggcagcatttgcttacactctcatgccgttttagcacaaccatggacatgtggacatctaaccaaaataaaagttatatgtgcatcacagttcattggatagatgacacttggaagatgcaaaagaggatcattaagtttatgcatgtagaaggacatcattcaggaagtaatatgtgcaaagagttttatgacagcatagttgattggaatcttgatagaaggcttgttggacttactttggacaatgcatcgtctaatgatgtttgtgttaagggtgttattttaaaactccgtaaaatctctcctttaatttgcgatggcatcttctttcatgtgagatgtttcaatcatatcttgaaccttgttgcacaagatggtctgaaacaaatcacaggagctgtattaaagatcagaaatactatttcaattctaaagcactcgccactgcagtttgaggcatttcagaagtgtgccttggaagttagtttggataacacaaagggcctttccatggatactcctataagatggaactccacatttctcatgttgaagaatgctatctactacagaaatgcttttgataggttgtttcttcggcatggtagaaagtatgcaaagtgtgctcccaccaaggtagactggtctatggcaatagcactatgcaagtgcttgaagccatttcatgaagcaactgaactattctctggtactacatatccaacagcaaatcattttttcggtaaattttgttccatcaagctttatattgctgattggtgtaacagtacagatggaacaataaaaaccatggcaaacgccatgcaaactaaatatgataagtactgggagaagtcgaatatggctcttgctgttgcatgcttccttgatccacgttacaaaacaagttcaatagagtactatggtatgaagatttatggtttagaagctgcaaaaaaatttgatgagttcaatggggttatcaaaaaattgtttgatgtttatgctactagtgcgtgtgcaacatcaaagaagaaaggtgctgaaatgcatgtgcatcaacttcaaattcaatctgatcctgttcataatactgatgagtttgatgatatctttaatgagaatgacagtagccatgatcatgagcaacattttcaaagatttttgcttgagagaagtcagccaatttgtagtgataaaaccgagttacaaatttacatggaacaaccactgttactatggacttccaaagatccatttgatattttgtcttggtggaagctcaaacaagcagaatttcctatcctctgcaaacttgctcgtgatttcttatgtattcaagtgtcaactgttgcttctgagtcggcatttagtgctggtggccgtgttgttgatccatttcgcacccgtcttgatccagaggctgtgcaagctttagtttgcaccaaagattggattaaagcagctaacaatggttataagactcaggctatcatcaatgagttggacattgaaagcgtagagaggcatctggcaaacttattgatagtgctgcctaagaagggaaacatgctttttacaatgagggctagtctacagccggaaatgacctctgacaagcagagcatacgcctcctgccccgctcgcccgcttttccggtggacgcccatttcaaccttcatttaatggccagcgacttccttgccatacttgcactgaagcctggaatggatccgaccgggactgacataccaactcctggagttggcatgccggctccggctagggacgagagccaggaagctttcatcattccgacgggacggggcgaggcgtgtgataggccgcctattgccacctaa

SEQ ID NO: 18642 - DNA, 234 bp, Oryza sativa
  Clone ID: PAT_MRT4530_24180C.1
atgtggcggcgcgtggacggcatgcagcgctatggcaacgtgtggaggatgggcgagcagagcgcaggcggcacaagggcggtgcggaggcgcggcgagcgtgttacatgcaggcagcatgagggaggcgcgcagccgcacaactctagtcggggcccgggccgtgtggagaagtcggtggtctggggcgggggcattccagcccgacctgccccgttgccaaccctaatttaa

SEQ ID NO: 18643 - DNA, 270 bp, Oryza sativa
  Clone ID: PAT_MRT4530_24181C.1
atggctcggcttgacgacggcggcgactctccagcggtcttcggcggctgcgaaggggcggacgggatgctcctccacctggcgaatctgacagtggcatgggtgagggagatcggactccaaacgagaggatttgagccggaaaatccgacgaggtcgacattgctagtgatgaagattggagttgcggagaatcgcctttgggtcgccggaaacttcgaagttgtcgtcggagagctcaaggaggagatcggggaaagttttcactag

SEQ ID NO: 18644 - DNA, 753 bp, Oryza sativa
  Clone ID: PAT_MRT4530_24182C.1
atgcttgcggcaagggcgctccacgccaaatgcgttccccgacttcttctcaaggtggatatcgcgaaggcctttgacatggtcagctggcctttcttgcttgaggtgctagcccagcttggcttcagtcaacgttggcgtgattgggtctccctcattctcagtgcctcctcttcccgggtgctggtcaatggggtgccaggctgggttatcaaagccattgacaagaagcgtcaccccttcttgtggacaggtacggactcggccaatgggggacaatgccgagtgtcctggacgaaggtttgccatcctaggtatctcagtggtatgggcattccggacctcaggatagctggctttgccttgagagttcgctggctctggcttcagcgctcaggacaccccaactggtctgatctgaaggcctctgttgagcggagcgtctccgacatgttcgcagcatctaccttcactaccttgggagatgcttctatagctcctgacctcctccatgtcgtgcctccacgtttccggggatcgcgcacggttgctactgggttagcgaacaactcctgggttggtgatatacgcggtgccctcactgtcccggtcatctctcagttcctgttagtttgggacgcggtgcttcctacccagctctcgccgggtgttgaggatcgcctcgtctggtgttggacgggtgaccagtgctactcagtgcgattggcgtaccaggcgttcttccttggctag

SEQ ID NO: 18645 - DNA, 6483 bp, Oryza sativa
  Clone ID: PAT_MRT4530_24183C.1
atggatcgtgacgaggaaatggggcacggagacagatcgctgctgttcatcggagatgaggacgacgatctcgaggcggaccgcgacggcggctccacgccgtcgtccgacccgggctccttctccgaccggagcgaccctcccagcgtcgacgacatcgacgaggacgacgacgatgtcgtcggcgatggccgccgcgcgccccgcgacgacgacgacgaccagaggggcacgtggccacagagcttcaggcaatcgattgacatgatgagcgccgtgccgtcgccggcgatgagctcgatcatcacggcggcgagcccgaatctggggaggttggcggcggtggggagctccctcctgaagcgagccacgagcagcgcggtggggcaggagggctcgtcgctgccgctctccaggccgctgctgccgccgtcgtcgctgtcgcagctgtcgacggcgtcggggccgccggtgagggactcggcggacagcttgccgccgcgcgcgcggccgccaccgccgccgctgcagggggagtccgtggtgccgccgccgctgccgaggccgtcgtcggcgtgcctgagatccaactacatcgacctgccgccgccgtctaccaggtgcgggcagaagcaagccatcctcaatggagcgtcgggcttaatgttctgtgtggagttggaattctcaccacaagttacggaatcaaacaagaaatgcatagacagttcaccgagcattgacacatatccagatataggacaagctgcgtttggtatttacggacggatattcgtgtcggttgttctttatctagagctatatgcatgcggtgtggagtacatcacgctgttaggtgacagtttgtcgtcagtatttccgtctgcagatctagcttttggtggaatctacttgaacgcgcacaatctcttcgccatcacaatggccttggcaattctaccatcagtttggcttaagaacctcagactcctctcctatctttctgcgggaggcgtgattgcgacgacgacagtaattgtttgtttgttctgggttgggattggggaaggagttgggttccaccctggtggaactgcactgaatctgacccactttcctgtggcacttggcctgtatggatactgctactcagggcactcggtttttccgaacatatattcgtcgatggaggaacgcccaaagttcacctttgtactgctgttctgcttcatagtagtcacgtttgtatatgctggagtcgctgtcgcaggatttctgatgtttggcgagtccacaatgtcacaattcactctgaacatgccacagcaatttattccctccaaaatcgccattgggatgacgattataaacccatacacaaagtatgccttgacattaacaccggtcgccctgtcgatagaggaggctctacctagaaggatgcagacttaccaagttggaatgtgtgttaggacagctcttgtcgcctcaactgttgttgtagctttgacatttccatactttgcactggtgatggcgttgcttggatctgtcttcacaatgctcgtggccctgatcctcccatgcgcatgctatctctctatcaagaagggttcaacaccattgtgggaggaaatccctgatcctatcgcgacttttaagattggagatatgaaaaaaattgctgagaattatgatacacgtgtcgaggatatcataaaagctatgagaaaggacactgatgtgaagttcacctttgttgtggatggaaagaaaatgattgtcccagtaactccagctcaaaatttaactgatgttaatggaatatacatcatagaaattacagatggtaacttgaggctctgtttagtagctgataagtatcagaattggttcagaggatttattactgataaagggaacagatttgagattgatcacgacactcttccaaacataatgaagaactctcagtcacttcataccaacgggatgtatcctagtttacttggatgcgaagtgtcagagctgaagattgggtaccatcaacttcttgcagcattccatactttggctagatatggtgagggtaggagagatctgaagaaagctaaagaagcggtcgccattttccttatcctgctctttgaaggccctcggcttctacctgtggaacaaaaaatgatgaattcgttgacccaaaatctggtggcagtggttggaactgataaggagttgataaacaattggtgtggcatgagcaggaacttctatgatgagaacggttatgagatggaggtgattatctcagaagaaacctcagagatagtgaagaatgctgtgaaaacttttgggatcatgtgccggtcaaggtgggatgaatggaatattgaagtttgtcagatatcgccgttgttggccgatgggatcgcggcctcctacgccgagccgactggtctcttcttcaacgagctcgacgccctggccgcggagtttggtccggctgtgccttcgccgcccagggtatcgcctgtgccgccgtccgcctccggtgcaggcacttctctgccgaggactgcctgcacaccgcctactggtggggagtggctgaggcctgagtcgccgcttcctcagcaggctccaactttggtggttgatgtgcctgacggcgtcctctacgatgtgccgatggttgtccttgacctcgatggccgcccactggcgcactcgcttccatcttctgtggcagacaacgccgctcttcgcgccttcctcaccagctgctccaggcctctccctcctgcgctcctatcgccgcctttgccgctgccgcctctcgctgccaaggcggtgggagttgtgccgaagcgcagtgagcgtatcgctgctaagatggcacttgaggcgcttgaggggccgatccacgcagtgtcgcgcgcccagcgcaacctgatgcggaagctcggcctagttccggagaggggcccggtcacggccgaggcggtcgcggcttacaacgccctcttctccaagccactttcccaggagcacatcatcgcgctctcctcgctcttctctagctccttgcccccggccaaggctgcggaggagttggtcgagactattatggatgtaatcccctctcgtactattctggaaatgctaggcctcgactttgattattctttcttgcctgcggtcggtcggagtgggggggtgttgcttgcctggcggacgaccgtctggtctgtctcagatgttcaccttgcggaattctctcttaccgcgttggttcgacactcttctgatgtcgccccctggtggctctccgtcgtctatgggccacaggaggagccggacaagcttcgtttcttagatgagcttcgttcgctgcgctcctctcgcacggggccgtgggccgtcgtaggcgatttcaacctcattctcgaagctcaggataaaaacaaccttaatctcaatcgtcgtatgatgggtcgttttcgtcggctcgtcgacgagttggaactccgggagctgccgcttcacggacgtcgcttcacttggagcaatgagcgtgagtcgcccacgcttgttaagctcgaccgcgttctcttctccgcggattgggaggagcttttcccctcttgcctcctccaagcggcctcttctatcgcctctgatcactgtgctcttctccttcatacctgcgtcacctccccgaaagcgcttcgttttcgttttgaggccttttggcccaagttcgacggctttcttcaagtcgtgcaggacgcctggcatccccctgccaacctaccccctcttgccgctcttgcctggtgcttctctaccacggccaagcgcttacagagctggagtgaccgtcacattggcagtgttcgtctacagcttcagatggcgaaggaacttgtcttccggcttgatgttgcgcaggagagtcggtctctttcctccttggagacctggctgcggcgagatttaaagttgaagtgtcttggtcttgcctcgcttgagcgtactatcgcgcgtcagcgttcgcgtttggtctggcttaaggagggtgacgccaataccaagttcttccacctgcacgccagagctcgtaggcggaagaacttcatcacacgcctttgtgatggtgaccagcttgccgtctcccatgatgcgctgcaagagcttgcctcctctcacttttgcgccatcttggggacgagcgtcgagcgtgaactcgccctagacctccactctcttggcctccgccctgcgcagcttgaggggctggactgtcccttcacagaggatgaggtctgggcggtgatcaagtccttgccctctgataaggcgcccggtcctgacgattttacgggccgtttctacaagtcttgctggccggtgatcaaggtcgaaattctggcggctcttaactccttgttcctgaccaacggccaaggtttcgcttccctcaacgacgccctaatctccctcttgccgaagaaggacgaggctgttgacgttaaggatttcaggccgattagccttattcacagctttgggaagctgttctccaagatcttggcctctcgtctctcccctcgcctggacgagcttgtggcgcctaatcagagcgctttcatcaagggccgctctctccatgacaacttccgctatgtccagcttgcggcaagggcgctccacgccaaacgcgttccccgacttcttctcaaggtggatatcgcgaaggcctttgacacggtcagctggcctttcttgcttgaggtgctagcccagcttggcttcagtcaacgttggcgtgattggatctccctcattctcagtgcctcctcttcccgggtgctggttaatggggtgccaggtccacggttcccccatcggagaggtcttcgccaaggagatcctctttcccccatgcttttcattctagtcatggatgtgctcaatgcgatgctccgcaaagcctctgactcgggtggttttcttcccctcaatgatcatgctattcgacatcgtgcatccctctacgccgatgatctagttctcttcctttcccccgttcggcaagaccttgagttcatccaaggcatcctctctgtcttcggtgccgcttccgggcttcggaccaacttcaccaagtgctcgattactccgatccgctgctcggttcttgacctggagctggttcagtcctcttttccttgctcgatctcggagtttccctgcacctacctcggcattccactgtcagttcgcaagctgccaaaagcggccctgcagccgcttgtggataaagtctcccatcggctccccccctggaagggccgtctaaccactctggcgggtcgctcggttctagtccagtcggttctctcttccatcccggtccatgtttctatggcgatcggcttgccaagctgggttatcaaagccattgacaagaagcgtcgcgccttcttgtggacaggtacggactcggccaatgggggacagtgccgggtgtcctggacgagggtttgtcgtcctagggatctcggtggactgggcattccagatctccgggtggctggttttgccttgagagttcgctggctctggcttcagcgctcaggacacccctactggtctgatctgaaggcccctgttgagcggagcgtctccgatatgttcacaacatccaccttctctatcctgggagatggtcagtccacgctcttctggactgatcggtggatcgatggtcgctcgatagcttctatagctcctgacctcctccacgtcgtgcctccacgcttccggggatcgcacacagttgctgctgggttagcgaacaactcctgggttggtgacatacgtggcgccctcactgtcccggtcatctctcagttcctgttagtctgggacgcggtggttcctacccagctctcgccgggtgttgaggatcacctcgtctggtgttggacgggtgaccagtgctactcagcgcaatcggcgtatcaggcgttcttccttggccagcactcttttgcctgtgccgacttactctggcacgcgaagggccctgctaaatgcaagttcttcctttggtttgcatttcagcagcgctgctggactgccgatcttctccaaaagtgtggtatcgatagccactctgcttgccccttttgcgctcaggagcttgagacagcgaaccacatcctcatcgattgcgtgttcgctcggcaggtctggctccgtgtgttgtcccctcctggctgggctgccctctctccccctcatggcagctggctccaggattggtggtcatcctccaggctgtggaaggaacgaaactccagggttttcgactctgcgctcgcttcggtcgcagtggttctagagtccttccgctcggagggccagctgtggtctttagccggtgttgcttgttttggggatttcttgggagtgtag

SEQ ID NO: 18646 - DNA, 384 bp, Oryza sativa
  Clone ID: PAT_MRT4530_24185C.1
gttcattagtactacaacaacatggcattcataaatcgccccatagttttcttcacagtttgcttggtccttttgggcaatggctctctaacccaacagctattaagccaaaacactaatcaatggcagaattcttgtcgtggaagtccaagaaaatgcaaggtcgatagggtgcaagcatttgaaccaattcggaatgggaaggctcaagctggcacaactgaattcttcgatgtctttaatgaacaatttcaatggaccggaatatctggtggccgtcgagttattgaacctaaaagccttctactaccccattacactaatggggcatttctaatatatatcattcaagggagaaggattacaaggcccacttttccaagc

SEQ ID NO: 18647 - DNA, 396 bp, Oryza sativa
  Clone ID: PAT_MRT4530_24186C.1
aaaaaaaaacatggaggttcattttttttcccccatttgtttttttgcttccgggggccgcgggggtcccccgggaaattcgggccgggtcccggggggggacccatttttccttatgggggggggtataaaagctgggggaaacaagggcaaaagctgttcccgggggaaaatggttttccgttaaaaattccacaaaaaatacgagcgggaagaataaggggaaaagccgggggggcctaagggggggcctaccccactttattggggtggggctaacggcccgttttccagggggaaaacctggggggccagttgattaaaggaatcgcccaccccccgggggggggggttttggttttgggcccccagggggtttttttttttccccagggg

SEQ ID NO: 18648 - DNA, 4641 bp, Oryza sativa
  Clone ID: PAT_MRT4530_24187C.1
atggcggccggggcacgagctctcgtgccctcgcccttcatcgtcgtcgtcttcctcctgctcgccgccgcggcgagagacgcttccgcgctcacccggcatgacttccccgagggcttcgtcttcggcgcaggcacctccgctttccaggtgccaaatgttctttatttacgcatggttgcattgttccagaatgaatatgtccatgatgatggcaaggtgtgtcatctcattgtgtggtactcgcctggcggtgccattgcagatgtctcagcagatcaatatcaccattacaaggaggatgtaaagcttatgtatgacatgggcctggatgcgtacagattctccattgcttggcctcgtcttattccaggaatacaacctcatgtcaccatctaccactttgatctccctcaggcccttcaggatgagtacggtggaatactcagccccagattcatagaagattacacggcttatgccgaggtttgcttcaagaacttcggtgacagggtgaagcactgggtgacagtgaatgagccgaacatagagcccatcggcggctacgacgccggcgttcagccgccgcggcggtgctcctaccccttcggcaccaactgcaccggcggcgactcctcgacggagccgtacatcgtggctcaccacctgctgcttgctcatgcctcggcagtgtccatctacagacagaagtatcaggcaattcaaggaggtcagatagggatcactctgctgggctggtggtatgagccctacaccgacgcggtggcagatgcagctgctgcaatcaggatgaatgaattccatattggatggtttatgaatcctctggtgcatggagactaccctccggtaatgaggagccgcgtaggcgctcggttgccatccataacggcgtccgattcggagaaaatacggggatcgttcgacttcatcggcatcaaccattacttcgttatctttgtgcaatccagcgacgcaaatcatgaccagaaactaagggactactacgttgatgcaggtgttcaaggagcactatcagcttcatccctgggctcttggcaagatgctacatcactgaagctcaagtatggcaaccccccagtcatgatccacgagaatggcgacgcagattcaccggagaccccgggcaagatcgactacgacgacgactttagatcggatttcttgcagagctacctggaagttctgcacctgtccatacggaacggatcgaacacgcggggatacttcgtgtggtcactgctcgacgggttcgagttcctctccggctacggcaaccgctttggcctgtgctgcgtcgacttcaccgcgccggcgaggacgaggactgcctgcacacagcctaccggtggggagtggttgaggcctgagtcgccgcttcctcagcaggctccaactttggtggttgatgggcccgacggcgtcctctacgatgtgccgatggttgtccttgacctcgatggccgcccgctggcgcactcgcttccatcttctgtggcagacaacgccgctcttcgcgccttcctcaccagctgctctaggcctctccctcctgcgctcctcccgccgcctttgccgctgccgcctctcgccgccaaggtggtggaggttgtgccgaagcgcagtgagcgtatcgctgctaagatggcacttgaggcgcttgaggggtcgatccacgcagtgtcgcgcgcccagcgcaacctgatgcggaagctcggcctagttccggagaggggcccggtcacggccgaggcggtcgcggcttacaacgccctcttctccaagccactttcccaagagcacatcatcacgctctcctcgctcttctccagctccttgcccccggccaaggctgcagaggcgttggtcgagactattatggatgtaatcccctctcgtactattctggaaatgctaggcctcgactttgattattccttcttgcctgcggtcggtcggagtgggggggtgttgcttgcctggcggacgactgtctggtctgtctcagatgttcaccttgcggatttctctctcaccgcgttggttcgacactcttctgatgtcgccccctggtggctctccatcgtctatgggccacaggaggagcctgacaagcttcgtttcttagatgagcttcgttcgctgcactcctctcgcacggggccgtgggccgtcgtaggcgatttcaacctcattctcgaagctcgggataaaaacaaccttaatctcaatcgtcgtatgatgggttgttttcgtcggctcgtcgacgagttggaactccgggagctgccgcttcacggacgtcgcttcacttggagcaatgagcgcgagtcgcccacgcttgttaagctcgaccgcgtcctcttctctgcggattgggaggagcttttcccctcttgcctcctccaagcggcctcttctatcgcctctgatcactgtgctcttctccttcatacctgcgtcacctccccgaaagcgcatcgttttcgttttgaggccttttggcccaagttcgatggctttcttcaagtcgtgcaggacgcctggcatccccctgccaacctaccccctcttgccgctcttgcctggtgcttctctaccacagccaagcgcttacagagctggagtgaccgtcacattggcagtgttcgtctgcagcttcagatggcgaaggaacttgtcttccggcttgatgttgcgcaggagagtcggtctctttcccccttggagacctggctgcggcgagatttaaagttgaagtgtcttggtcttgcctcgcttgagcgtactatcgcgcgtcagcgttcgcgtttggtctggcttaaggagggtgatgccaataccaagttcttccacatgcacgccagagctcgtaggcagaagaacttcatcacacgccttcgtgatggtgaccagcttgccatctcccataatgcgctgcaagagcttgcctcctctcacttttgcgccatcttggggacgagcgtcaagcgtgaactcgccctagacctccactctcttggcctccgccctgcgcagcttgagggactggactgtcccttcacagaggatgaggtctgggcggtgatcaagtccttgccctctgataaggcgcccggtcctgacggttttacgggccgtttctacaagtcttgctggccagtgatcaaggtcgaaattctggcggcccttaactccttgttcctgaccaacggccaaggttttgcttccctcaacgacgccctaatctccctcttgccgaagaaggacgaggctgttgacgttaaggatttcaggccgattagccttattcacagctttgggaagctgttctccaagatcttggcctctcgtctctcccctcgcctggacgagtttgtggcgcctaaccagaacgctttcatcaagggccgctctctccatgacaacttccgctatgtccagcttgcggcaagggcgctccacgccaaacgcgttccccgacttcttctcaaggtggatatcgtgaaggcctttgacacggtcagctggcctttcttgcttgaggtgctagcccagcttggcttcagtcaacgttggcgtgattggatctccctcattctcagtgcctcctcttcccgggtgctggttaatggggtgccaggtccacggttcccccatcggagaggtcttcgccaaggagatcctctttcccccatgcttttcattctagtcatggatgtgctcaatgcgatgctccgcaaagcctctgactcgggtagttttcttcccctcaatgatcgtgctattcaacatcgtgcatccctctacgccgatgatctagttctcttcctttcccccgttcggcaagaccttgagttcatccaaggcatcctctctgtcttcggtgccgcttccgggcttcggaccaacttcaccaagtgcttgattactccgatccgctgctcggttcttgacctggagctggttcagtcctcttttccttgctcgatctcggagttcccctgcacctacctcggcattccactcatcctgggagatggtcagtccacgctcttcaggactgatcggtggatcgatggtcgctcgatagcttctatagctcctgacctcctccacgccgtgcctccacgtttccggggatcgcacacagttgctgctgggttagcgaacaactcctgggttggtgacatacatggcaccctcactgtcccggtcatctctcagttcctgttagtctgggacgcggtgctacctacccagctctcgccgggtgttgaggatcacctcgtctggcgttggacgggtgaccagtgctactcagcgcgatcagcgtatcaggcgttcttccttggccagcactcttttgcctgtgccaacttactttggcacgcgaaggaccctgctaaatgcaagttcttcctttggtttgcatttcagcagcgctgctggactgccgatcttctccaaaagcgtggtatcgatagccactctgcttgccccttttgtgctcaggagcttgagacagcgaaccacatcctcatcgattgcgcgttcgctcggcaagtctggctccatgtgttgtcccctcctggctag

SEQ ID NO: 18649 - DNA, 3600 bp, Oryza sativa
  Clone ID: PAT_MRT4530_24188C.1
atgccggccgccgccgtggccgctgctggcttgacggctcctgctgtggtcgccccggactcgccagttgctgccatggccgtctccagctcgccaactgcagtggctgcctccagctcgccagctgcttcgccggttgacatcgtggccgcctcttcttcgccggctgccgccgtggccgccttcggctcgccggctgtcgtggttgcctccaactcaccggctgtgggttcactggccgccgtcgtctctccggtctgcgccacttcgccggttgctgcctgccacccgccgaccgcatcttccttgctgtctggcccttcgggtggcggcccggcgttccctgcctctccgctgtgctcgcgacgttcgccgttgttggccgatgggatcgcggcctcctacgccgagccgactggtctcttcttcgacgagctcgatgccctggccatggagtttggtccggctgtgccttcgccacccagggtatcgcctgtgccgccgtccgcctccggtgcaggcacttctctgctgaggactgcctgcacaccgcctaccggtggggagtggctgaggcctgagtcgccgcttcctcagcaggctccaactttggtggttgatgtgcccgacggcgtcctctacgatgtgccgatggttgtccttgacctcgatggccgcccgttggcgcactcgcttccatcttctgtggcagacaacgccgctcttcacgccttcctcaccagctgctccaggcctctccctcctgcgctcctcccgccgcctttgccgctgccgcctctcaccgccaaggcggtggaggttgtgccgaagcacagtgagcgtatcgctgctaagatggcacttgaggcgcttgaggggccgatccacgcagtgtcgcgcgccccagcgcaacctgatgtggaagctcggcctagttccggagaggggcccagtcacggccgaggtggtcgtggcttacaacgccctcttctccaagccactttcccaggagcacatcatcgcgctctcctcgctcttctccagctccttgcccccggccaaggctgcggaggcgttggtcgtgtgtggctgattggtttcttttcttctgctctcggtgtggtccccctcaatgggatcgtgcaacgagaacgttttggtgtggaacgtgcgaggtctgaactcgcgcgcccgccaggatgctgcctcgactttgattattctttcttgcctgcggtcggtcggagtgggggggtgttgcttgcctggcggacgaccgtctggtctgtctcagatgttcaccatgcggatttctctcttaccgcgttggttcgacactcttctaatgtcgccccctggtggctctccatcgtctatgggccacaggaggagcctgacaagcttcgtttcttagatgagcttcgttcgctgcgctcctcttgcacggggccgtgggccgtcgtaggcaattttaacctcattctcgaagctcaggataaaaacaaccttaatctcaatcgtcgtatgatgggtcattttcgtcggcttgtcgacgagttggaactccgggagctgccacctcacggacgtcgcttcacttggagcaatgagcgcgagtcgcccacgcttgttaagctcgaccgcgtcctcttctctgcggattgggaggagcttttcccctcttgcctcctccaagcggcctcttctatcgcctctgatcactgtgctcttctccttcatacctgcgtcacctccccgaaagcgcattgttttcgttttgaggccttttggcccaagttcgacggctttcttcaagtcgtgcaggacgcctggcatccccctgccaacctaccccctcttgccgctcttgcctggtgcttctctaccatggccaagcacttacagaggtggagtgaccgtcacattggcagtgagggtgacgccaataccaagttcttccacctgcacgccagagctcgtaggcagaagaacttcatcacgcgccttcgtgatggtgaccagcttgccgtctcccatgatgcgctgcaagagtttgcctcctctcacttttgcgccatcttggggacgagcgtcgagcgtgaactcgccctagacctccactctcttggcctacgccttgcgcagcttgaggggctggactgtcccttcacagaggatgaagtctgggcggtgatcaagtccttgccctctgataaggcacctggtcctgacggttttacgggccgtttctacaagtcttgctggccggtaatcaaggtcgaaattctggcggcccttaactccttgttcctgaccaacggccaaggtttcgcttccctcaacgacgccctaatctccctcttgccgaagaaggacgaggctgttgacgttaaggatttcaggccgattagccttattcacagctttgggaagctattctccaagatcttggcctctcatctctcccctcgcctggacgagcttgtggcgcctaaccagagcgctttcatcaagggccgctctctccatgacaacttccgctatgtccagcttgcggcaagggcgctccacgccaaacgcgttccccaacttcttctcaaggtggatatcgcgaaggcctttgacacgcgctcgggacacccctactggtctgatctgaaggcccctgttgagcggagcgtctccgacatgttcgcagcttccaccttctctatcctaggagatggtcagtccacgctcttctggactgatcggtggattgatggtcgctcgatagcttctatagctcctgacctcctccacgccgtgcctccacgcttccggggatcgtgcacagttgcagctgggttagcgaataactcctgggttggtgacatacgtggcgccctcactgtcccggtcatctctcagttcctgttagtctgggacgcggtgcttcatacccagctctcgccgggtgctgaggatcacctcgtctggcgttggacgggtgaccaatgctactcagcgcgatcggcgtatcaggcgttcttccttggccagcactcttttgcctgtgccaacttactctggcacgtgaagggccctgctaaatgcaagttctttctttggtttgcatttcagcagcgctgctggactgccgatcttctccaaaagcgtggtatcgatagccactctgctggccccttttgtgctcaggagcttgagacagcgaaccacatcctcatcgattgcgtgttcactcggcaggtctggctccgtgtgttgtcccctcctggctgggctgccctctctccccctcgtggcagctggctccaggattggtggtcatcctccagggtatgtttacctgagcacctccatagcggcttcgactccctggtactcctagtctcctggcagctgtggaaggaacgaaactccaaggttttcgactctgcgctcgcttcggtcgtagtggttctggagtccatccgctcggagggccagctgtggtctttagccagtgttactttttttgggatttcttgggaatgtagcgtggttctgccccctcccgctgtttggagttgcgtttttaaccgtcgtagtagttcctag

SEQ ID NO: 18650 - DNA, 1102 bp, Oryza sativa
  Clone ID: PAT_MRT4530_24189C.1
agccacgcctccatcgtaaaccctcgtcagtttggaacaatggcgttggctaataagattggtaatctgctcaagagagccacgagctcaagtccagctctctatcaatcaatcagatgcatgtcatcctcaaagctttttgttggaggcctttcgtacggcacagatgagcagagcctcagagatacttttgccaattatggtcaagttattgaagctaagatcatcaatgaccgtgaaactgggaggtctagaggttttggcttcataacttacgcatcaagtgaagaggcttcagctgcaatcacagccttggatggaaaggatctcgatgggcgtaacatcagggttaacactgccaatgagagaactggtggcttccgtagtgggggtggtggctatggaggcggtggctatggcggcggcggtggcggctatggtggtggtggctacagtggtggtggtggctatggcggtggtggctacagtggtggtggtggtggcggcggcggctaccaaggaggcggcggtggttatggtggcaacaatggagggtatggcaacaggggtggtggtggaggtggttatggagttgcagaaggatctgcagatgccttctctggaatcaacttaggtggtgatggtagttttggtggaaacccagctggaagctttggtgatgctggaggttccactggcggtggtgatttctccggtgccggtggtgacagctttggaagccgcaagaacgatgagctcatggatgacctcttcaaggatgacgagcctgacaactatgccaacaagcagggctaattaatctacgtccttcgagcctcagtttgcagtctcttagtgatgaaccggctcacctgaatggtcatcacctgctcaagcatcaaattccagaacaatacacaatgactgggttttctttttcttctgttctttttcatagatgtggtgtaataacgtaaacatcactcaaggtactacttctagttatgttatgttgagatgacaatggaggtgttttaaatgtctgtttttattccattagctctgtttgaaatcactcaaggtaaactgctgatgcgctgct

SEQ ID NO: 18651 - DNA, 958 bp, Oryza sativa
  Clone ID: PAT_MRT4530_2418C.1
gtcgtgtgaagcggtgaactttagccgactcctgactagcgactaccctcccactctctcagctcgcttcccttcctcgcctcgccggccaagaaccaccgcaagattcgccatggccagatcgccggagccgccgcgctactacgccgccgcgggctaccaccgcccctcgcccttctcctccgtggcggcgtcctgcgtcgtggcggcgctgttcatcctgctcgccgcgggcggcgccgcggctgcgctgttcctgctctaccggccgcaggcgccggccatcgccgtgacggccgtgcagctcccctccttcgcctcccgcaacggcaccgtcgccttcacgttccagcagctcgcctccgtccgcaaccccaaccgctccccgctcgcgcactacgacagctcgctccgcgtcgcctacgccggcggcgaggtcggctcgatgtacatccccgccggccagatcgacggggggcgcacgcagtacatggccaccagcttcaccgtcccggccttcgccgtcacctcctccgccaccgccgccgcttcctcctccccggcgcagacaatcaccgtccccgcctccggcccctcaccggcggcggtgggcgcggtggcgctgcagcaagaacagccgccgccgcagcagcagcaggtggcggcgctgccggtgatggaggtggactcgctgctggtggtgaaagggaaggtgaccatcctccgggtgttcacccaccacgtcgtcgccgccaagttccagttagatgcttatgactttggatgcaagttgaaatattctcagaaatgcaagttgaaaatgttattctcgcatattcgccagattgagctgatatttagtggacatgattggacatttaaccgtgtctcgcggcagtttgctgtaatttactttagtagcctgaattgtttggtgagcataattgttggatcttga

SEQ ID NO: 18652 - DNA, 452 bp, Oryza sativa
  Clone ID: PAT_MRT4530_24190C.1
ttggtctctcttccattccggtctatgtttctgtggcgatcggcttgccaagctgggttatcaaagccattgacaagaagtgtcgcgccttcttgtggacgggtacggactcggccaatgggggacagtgccgggtgtcctggatgaggcgctcggggcatccctactggtctgatctgaaggcccctattaagcggagcgtctccgacatgtttgtagcatacaccttctctatcctgggagatggtcaatccaagctcttctggattgaccggtggatcgatggtcgctcgatagcttctatagctcctgacctcctccacgccgtgcctccacgcttccggggatcgcgcacggttgctactgggttagcgaactactcctgggttggtgacatacgtggcgccctcactgttccggtcatctctcagttcctgttagtctgggacgcg

SEQ ID NO: 18653 - DNA, 1977 bp, Oryza sativa
  Clone ID: PAT_MRT4530_24191C.1
atggcggcggcgtcctcgctctccccatcccgctccctgtcagtgccatcttcctctcccgcagcgcgcctgctcgccgcttgtctgctccgccagccggctgctccccgcacagtctgcggtggcgaagcaaccgtcccatatattgattcctggcgcgtagaggttggtaatgcgctaggcctcgagtttgattattctttcttgcctgcggtcagccggagtgggggggtgttgcttgcctggcggacgaccgtctggtctatctcagatgttcaccttgcggatttctctcttaccgcgttggttcggcacctttctgatgttgccccctggtggctctccatcatctatgggacacaggaggagcctgacaagcttcgtttcttagatgagcttcgttcactacgctcctctcgcacggggccgtgggccatcgtaggcgatttcaacctcattctcgaagctcgggataaaaacaaccttaatctcaatcgtcatatgatgggtcgttttcgtcggctcatcgacgagttggaactccaggagctgccgcttcacggacgttgcttcacttggagcaatgagcgcgagtcgcccacgcttgttaagctcgaccgcgtcctcttctctgcggattgggaggagcttttcccctcttgcctcctccaagcggcctcttctgtcgcctcagttcactgtgctcttctccttcatacctgcgtcacctccccaaaagcgcatcgttttcgttttaaggccttttggcccaagttcgacggcttttcttcaagtcgtgcaggacgcctggcatccccctgccaacctaccccctcttgctgctcttgcctgcttaaggagggtgacactaataccaagttctttcacctgcacgccagagctcgtaggcggaagaacttcatcacgcaccttcgtgatggtgaccagcttgccatctcccatgatgcgctgcaagagcttgcctcctctcacttttgcgccaccttggggacgagcgtcgagcgtgaactcgccctagacctccactctcttggcctctgccctgtgcagcttgaggggctggactgtcccttcacagaggatgaggtctgggcggtgattaagtccttgccctctaataaggcgcccggtcctgacagttttacaggctgtttctacaagacttgctgcccggtgatcaaggtcaaaattctggtggcccttaactccttgttcctgaccaacggccaaggtttcacttccctcaacgacgccctgatctccctcttgccgaagaaggacgaggctgttgacgttaaggatttcaggccgattagccttatccacagctttgggaagctgttctccaagatcttagcctcttgtctctcccctcgcctggacgagcttgtggcgcctaaccagagcgctttcatcaagggccgctctcttcatgacaacttccgctttgtccagcttgtggcaagggcgctccacgccaaacgcgttccccgacttcttctcaaggtggatattgcgaaggcctttgacacggtcagctggcctttcttgcttgaggtgctagcccagcttggcttcagtcaacgttggcgtgattggatctccctcattctcagtgcctcctcttcccgagtgctggttaatggggtgccaggtccacggttcccccatcggagaggtcttcgtcaaggagatcctctttcccccatgcttttcattctagtcatggatgtgctcaatgcattgctccgcaaagcctctgactcgggtggttttcttcccctcaattatcgtgctattcgacatcgtgcatccctctacgccgatgatctagttctcttcctttcccccgttcggcaggaccttgagttcatccaaggcatcctctctgtcttcggtgccgcttccgggcttcggaccaacttcaccaagtgctcgattactccgatccgctga

SEQ ID NO: 18654 - DNA, 144 bp, Oryza sativa
  Clone ID: PAT_MRT4530_24192C.1
tatctaagccagcaattgcatccgagctcacctagcttttttaataacaaccagcggttctatcaattccatctccaagaagcagcggctagcatcagctagtagttgccatggactcttctactctgggctctcccgtgagct

SEQ ID NO: 18655 - DNA, 753 bp, Oryza sativa
  Clone ID: PAT_MRT4530_24193C.1
atgagaaaggacactgatgtgaagttcacctttgttgtggatggaaagaaaatgattgtcccagtaactccagctcaaaatttaactgatgttaatggaatatacatcatagaaattacagatggtaacttgaggctctgtttagtagctgataagtatcagaattggttcagaggatttattactgataaagggaacagatttgagattgatcacgacactcttccaaacataatgaagaactctcagtcacttcataccaacgggatgtatcctagtttacttggatgcgaagtgtcagagctgaagattgggtaccatcaacttcttgcagcattccatactttggctagatatggtgagggtaggagagatctgaagaaagctaaagaagcggtcgccattttccttatcctgctctttgaaggccctcggcttctacctgtggaacaaaaaatgatgaattcgttgacccaaaatctggtggcagtggttggaactgataaggagttgataaacaattggtgtggcatgagcaggaacttctatgatgagaacggttatgagatggaggtgattatctcagaagaaacctcagagatagtgaagaatgctgtgaaaacttttgggatcatgtgccggtcaaggtgggatgaatgggtgggtgagcagactgaagctgcgcatggacgacaagctcggaaacaatcaagaggccagggcagcagcagcagcagcagcaagaagcattga

SEQ ID NO: 18656 - DNA, 3922 bp, Oryza sativa
  Clone ID: PAT_MRT4530_24194C.1
tcaatatgaattgtttcttgatgtttcatctttcactgaaaaatgtttcaccgctttatcgaaaatgttgcaattgaatgcaacactcgagaacgctgacaccgccgccgctaatggcggctgtgccttctgcccgcccggacgtgttcttcttctccacctccagccgcagtttttcctccacctcggctcgccggggttcctgttcctctcgccgacgttctgcttcccgatgctggaccgcctcgacctctcacttgtctcgctgtgggggcacccgctcctctccttcgtccggcctggcggcggcggcgcgccgtcgttgacatcgacgtcgtcgaggatgaacctgtaccaccccgaggcgatctccgagcagaacgcctccatcgccgcccgtctcgtgggttgcttgccggcggtgacctcgctcgccgtctactgctgcgaccccaccacactcgccaatctcacgccgcactggcaggcctccctctaccgcgtcaagctcgtgcgctggcaccaatgcccacccaacctccccatggtgcggatttcgactgatgggtggagaaatgatggccggagggatacaagagaaagttacatctttgctctaactaaaacagatgtagtgtggccggccgatgggctagcccttgggcaatcgttaaaatcccaagtgacaggaaaggctgcgcccattaaggatgcggtgacgctttccgagggtgatggctattatccggcttcctattcctcgccgccgccgccgccgccgccgcctgcatcgccttctcagtcctggttgttccgccgcgggcgtacttcgtgcgcccctcttgccgtcggctccgaccgcgaccactcctgctccggctgcctcggcgcctccaactccggcggcgccatgtggttgtggaagtcatccgctaaagaaaccatccatccgtgtttggagtgtatctccgataggatcccagccagtggaatggcaactactaaggatacgggctgtgatgcatactatggtgcaccaaatgcacagcatcctagcacgcaaaactactttgaatatgtgataatggcaatcatgagcagcagcaggagcagacacaacatcagcaggactcccacagcagctattgaaccaagagagcaagaaccaccggccgtgaagttcgcagcggggaaatggaattcgaggaggattcggcctccttccatggcggcgagggcgtcacctgcattcttcaccgccccaagaagatgctgctggagctcgagcaggcgcccctgggccacgacgtcagccagcgcgggggcgcgatgccgacccccttccacggcggcgagggcgtcaccggcgtactgcgctggcacacgacgacgctatcggattcgcccatcggcgattaagaacccctctcactgggccacgacggttgtgattccgaaccccatctacggcggtgacgccggccttctacatgtgcacaacaacaagaagacgctggccatccgcgagcaggtgtcagtgtcgcctggccgcgaacccggcgtcaagaacaggacatccgtgtgcaagcggcgtcctcggacgttcatctcccttcgtctgcttctcagaagcagtgggctccatatacatcacattgtatcagattacaaggataggaatgaagaggaatatgagggaatgaacatatcactcttggaggaggcctcagtgcagaaggctgatgcaaaacctgtgtactgcacaaagtttctatctgactgggtttgcagcttaagaaattttaagtggaaagtagtggcagggattcaccaagcattagtaccgaatgaatacagttgggaagaagtaatgggctcaccaattattcaatacgcaggaggctgctcgctctcggcgtgcagtgtatgtatcgaccggcttgcgtttgagagaatccatgggagaggatcctttgcatggagggtagaatcaccccctgcaaaactcagaaaagaatgccttaagaggaatgcctggtcacaggaaagtggtgggaaatctgacagggtgctggatgtaatcattgacatcggagggctaccaacgactgacgcgtcaaatggtagatgtccaaaagcatttcagaacgccctgatctccctcttgccgaagaaggacgaggctgttgacattaaggattttaggctgattagccttatccacagctttgggaagctgttctccaagatcttggcctctcgtctctcccctcgcctggacgagcttgtggcgtctaaccagagcgctttcatcaagggccgctctcttcatgacaacttccgctatgtcaagcttgcggcaagggcgctccacgccaaacgcgttccctgacttcttctcaaggtggatatcgcgaaggcctttgacacggtcagctggcctttcttgcttgaggtgctagcccaacttggcttcagtcaacgttggcgtgattggatctccctcattctcagtgcctcctcttcccgggtgctggttaatggggtgccaggtccacggttcccccatcggagaggtcttcgccaaggagatcctctttcccccatgcttttcattctagtcatggatgtgctcaatgcgatgctccgcaaagcctttgactcgggtggttttcttcccctcaatgatcgtgctattcgacatcgtgcatccctctacgccgatgatctagttctcttcctttcccccgttcggcaagaccttgagttcatccaaggcatcctctctgtcttcggtgccgcttctgggcttcggaccaacttcaccaagtgctcgattactccgatccgctgctcggttcttgacctgaaactggttcagtcctcttttccttgctcaatctcggagtttccctgcacctacctcggcattccactggatctcagtggactgggcattatggatctcatgatggctggctttgccttgagagttcgttggctctggcttcagcactcgggacatcactactggtttgttctgaaggcccctgttgagtggagcgtctccgacatgtttgcagcatccaccttctctatcctgggagatggtcagtccacgctcttctggactgaccgatggatcgatggtcgctcgatagcttctatagctcctgacctcctccacgccgtgcctccacgctttcggggatcgcgcacggttgccgttgggttagcgaacaactcctgggttggtgacatatgtggcgccctcactgtcccggtcatctctcagttcctgttagtctgggatgcggtgcttcctacccagctctcatcgggtgttgaggatcacctcgcctggcgttggacgggtgaccagtgctactcaacgcaatcgacgtatcgggcgttcttccttggccagcactcttttgcctgtgccgacctactctggcacgcgaagggccctgctaaatgcaagttcttcctttggtttgcatttcagcagcgctgctggactgccgatcttctccaaaagcgtggtatcgatagccactctgcttgccccttttgcgctcaggagcttgagacggcgaaccacatcctcatcgattgcgtgttcgctcggcaggtctggctccgtgtgatgtcccctcctggctgggctgccctctctccccttcgtggcagctggctccaggattggtggtcatcctccagggcctgtttacctgagcaccactgcagcggcttcgactccttggtactcctagtctcctggcagctgtggaaggaacgaaactccagggttttcgactctgcgctcgcttcggtcgcagtggttctggagtccacccgctcggagggccagctgtggtctttagccggcgttgctttttttggggatctcttaggagtg

SEQ ID NO: 18657 - DNA, 805 bp, Oryza sativa
  Clone ID: PAT_MRT4530_24195C.1
cggacgcgtgggaacaaccgaatcaaccccatttgctattgcacttgcaaaacatttgcactctgttggcgctaagatgtatggagcattctggtgttctcattgtaacgaacaaaaacagatttttggtcgagaagctacaaaaattctggactatgttgaatgttttcctaatggagctggcaagggaaagaaaatggctcctgaatgtgcagctgctggtatagaaggttttccgacatggattatcaacggcaaggttttgggtggcgaccaggaacttccaatccttgctgaagaatctggtttcactgttgagggaaccgagcaatcataaggtcagacacgagagcaagtttcattcaattgaaggcgagtgttttatggttttagtgaagaactcaggttgtgaaggctgactacaacaattccgcatgacataccgtcacaccgagggaaggttttcgttccacggttgcatagcctacctaatacagcccctaaccactgtaataatcagtaaaagctgctcttctctcatacggagattgggagatgatagaagaagcccaaatgagaggtgttgtataatcattttgtagtatgtagattgtgatgtaaaatgtaaaagggcgcattgcttctcttcctaggtacataatgtaatgtataataccttgcaatgtgatatttgtacagaaaagtgtattgttcagtcttttaccctcggataaaggcagttaatgagtagccagttgacgagaatctaaagaagtgtttattttgaaaaaaaaaaaaaaaaaaa

SEQ ID NO: 18658 - DNA, 1416 bp, Oryza sativa
  Clone ID: PAT_MRT4530_24196C.1
attgccaaaatcaatcaatttaacggcttccacatctcggcctgcctaactgggtgatcctctgttgcatcatgcatgcttgcgtgaacaagaggatcacaaactggccgaaatacctaattaagttaattttacacggtaagagagagagagagagatggcacaggcacgattgactggcagccgtttgctttccgaaactcgattcttcttcacaccgctcggggttgcaccgtgccagaagatacaccagatagtcgaggatggatttgttggatggtgcaagcctttaccagtttgtgtaccagtaccacacgaagatgctcacgaggagagacctatctgccgtcgacggaagctacaccttctcatcgttcaaaggttcggtgactccctcttggaaaaactcaatgatgttcctgcacacatccttgggcttctcaaggttgaccgcatgcccagcatttcttatcactactaatcgagaactctcacctagatgtctcttcagtctatgagccaactccatggggaataccttatcccgctccccccaaactatgagcgctggctggctaattattggaagatctgaaagctgcctttcactaatcaaagcatataataactcagttttttctacttaatgtaatcccagaggaagcaggagggcataatgcagggtggccgcacgaatgtgagcctgacgaggcgccgcacctcctccggccgccgcggcacgagcaggtccgccgcctccccgacgccggccaccgggaacagcccaccggccaggtccttctcctccaggcaaacccccgcgcacaccagcaccaccctctccaccgcgtccgggtacatggccgccatcctgtagcccacgaatcccccatagctgaccccgaccaggccgaacctggcgaccccgatcgcgtccatggccgccttgatcgagcgcgcctggaaggcttcggagcggtcggcgaggcgggtgtaggaggcgccgaagaagaggaggtcggggacgatggggtcgtagcccgcggcgatgagggggcggaggtagggcgcccactgccacgtggcggaggcgccgaagccgtggaggaggaggagcgggttccgcggcgggttggcggggacccagacgtgcacggtggtgcccgcgtcgtcgtcgactccggtggggagcgggatggcgagcgggcggaggccggccctgaggaagcggcggctgaagcagcggtcccgcgccgccgcgaagctgaggatggacgacctcctcccgatggccgcggccggcggaggtgggggtggcattgctcgccgccgaccgccggagagagttgcgcggctaaatttggccgcccaagcgtggtggtggtggtggtgcagcgcgagtgcgcggacgcgtgg

SEQ ID NO: 18659 - DNA, 1756 bp, Oryza sativa
  unsure (1)..(1756): unsure at all n locations
  Clone ID: PAT_MRT4530_24197C.1
ggggcgccgtgcagtgcaggaagcggtggagcaacctcgccggggactacaagaagatccaggagtgggagcgcgcggcggcggcggcggcgccgccgcgggagccgtcgttctgggccatgcggaacgacgcgcggcgggagcgccggctcccggggttcttcgaccgggaggtgtacgacatactcggtgactgctagaaagaatcagtctgtaaatgccaattatctgctgaatttccactatgatccaatttctcggccacagcctagaggccccagaacatatcctacaagaagacagaggaagatcagaccatacaacaaagatttgttcctacaagcaaattttaagtttgttgtgttggatactggaagctatgaaatagaattaatggatccagataagatgctccagtgggaagatattgtatgtgtaagatattatagcccttgtgaggtgcaatgccctatttgcttggagagcccattgtgcccacagattacatcatgtggtcatatatattgctttccatgcattttacgttatttacttatgggaaaagaagattacaaaggtgaaagctggaagaagtgcccactgtgtttcatgatgatctcaacaaaggagttgtatacaatctatattactcaagtccagcattttcatgttggtgacaatgtgacatttacacttttgagccgctcaaaaaattcactcactccttctattaagaacctcactgatgaatctactatagacgaagatccttgcagtgcattctccaagttcattttgacgtctgatgtggaactttctgttagagaggcaaaaacagatcttgttaattggttgcatatggcagatttaggccttgtggatgacttggagaaacttccatacgtttctaccgctttggagcagctagaagaacggatgaaatattggagtgagtataaacttttggaatatataaagattgatcaatccactacaaattctagtgggaatggtactcaggtgactgctagaaagaatcagtctgtaaatgccaattatctgctgaatttccactatgatccaatttctcggccacagcctagaggccccagaacatatcctacaagaagacagaggaagatcagaccatacaacaaagatttgttcctacaagcaaattttaagtttgttgtgttggatactggaagctatgaaataggcgtccgggatccagataagatgctccagtgggaagatattgtatgtgtaagatattatagcccttgtgaggtgcaatgccctatttgcttggagagcccattgtgcccacagattacatcatgtggtcatatatattgctttccatgcattttacgttatttacttatgggaaaagaagattacaaaggtgaaagctggaagaagtgcccactgtgtttcatgatgatctcaacaaaggagttgtatacaatctatattactcaagtccagcattttcatgttggtgacaatgtgacatttacacttttgagccgctcaaaaaattcactcactccttctattaagaacctcactgatgaatctactatagacgaagatccttgcagtgcattctccaagttcattttgacgtctgatgtggaactttctgttagagaggcaaaaacagatcttgttaattggttgcatatggcagatntaggccttgtggatgacttggagaaacttccatacgtntctaccgctttggagcagc

SEQ ID NO: 18660 - DNA, 502 bp, Oryza sativa
  Clone ID: PAT_MRT4530_24198C.1
ggaaaaaggagaaacaaacataggagtacagcagaaaacaacaacaaaaagatagcatggaaaaaaagccgaggatacaataaaccatacgcaacattggagtacaggaataccaaaaaacaactaccggaagacaggtataaattataaaaaagcacaggcacaaatgatcgagacaaaagagtttgacacccgaaagaaaggacgctagatagccaaaccacactcaaaaccctaaaaatgcatacggaggaggcacaaaaggatctaaagccaccaccagaagcagaaaagaacttgaaggccttgacgtgaaggcacacagaggcaccctcgacgagcacaggaaaaccctggtatgaaccaagggaagcctcagagatggccaagcaccaggagaagaaggccttaagcgcctaaaccacagaatacgacaaagacgacccaaacctagagcgtgctctgcaggaaagcacggccgaaaggaaaaaagaacagaagc

SEQ ID NO: 18661 - DNA, 278 bp, Oryza sativa
  Clone ID: PAT_MRT4530_24199C.1
gaactgacacaatgaattgggccaaaattcacaagtctacggagtggagcaatagaggaggacaccagccgaaattgggctggattgggccatccctaggttcggccgaacctggaccaatcctggcgccgttggatccaggttttgacctggacgtccaggattgcatcccaatgacggttggagggcacttcggacaattccccttccacaactgtcataactacctctatataaggagctcactctcttcacttcacacacacctcaagcaatag

SEQ ID NO: 18662 - DNA, 895 bp, Oryza sativa
  Clone ID: PAT_MRT4530_2419C.1
atgagggctagtctacagccggaagtgacctctgacaagcagagcgcacgtctcctgccccgctcgcccgcttttccggtggacgcccatttcaaccttcatttaatggccagcgacttccttgccatacttgcgttgaagcctggaatggatctgaccgggactgacataccaactccaggagttagcacgccggctccggctagggacgagagccaggaagctctcatcattccgacgggacggggcgaggcggggtcggggcaccccagccctcggggccgaaacgggagcggcccgacccctcggggagacagagggaggggtggccacgtcaccttcgggcccgacccccccgaggaggctaatcaggggaagccaagagccaggcaaatctcgagcccaacctgctgcacgcaagaacagagaacgagcagcttcggcggggaagaggaatcgaaagagaaggaaattttgatggcggaggaggcgaagccggacacgcagctgttccagctcctctccgacctgctccagcaggtggagtcaatgagcaaccaggaagaagtagaattgcgtgctaagatcgaagcactaggactagaagttaccaaggtaccagagcagacacctaagcagcttgatgagttagagatcgcagcagagctggacaaactatcagcgaggcttgataatgttgacaagatgatatcttctgccatggcctcggatccagaggtgaaatcccttttgagtaccactgctgatatctggatgcccgtcatcaccgcctctgccgatgaaaggcggggatttgcaggaacaagtggtgaaagcaaccaagaagagcaggagagttccaaacaatagcctcctacatgtaccttcacatgag

SEQ ID NO: 18663 - DNA, 484 bp, Oryza sativa
  Clone ID: PAT_MRT4530_241C.1
cgacttcaccatgtttgacaaggtattgactagtaccccagactgattcttggaagttgttaaattgtatatgtgcagtgttaccatctgggctgagatcctcatctttcactccctgagaacaatcacccttatcacctgagccatctgcagcacttttatcacctaattgagctgtagcatctgaaacctgttctacctccccatccttggaagaacttgtcctaggaacatcagcaactaatttcatcttatacctctaaacaattgttccttggcgggtctccatgaatgagttcaagaattggttctgtgtttgctgcatcatcgcctcgagattattcttttgttcaagtgtcaatttgtctatagtgacgggcacgatgttgctttcatgaacttcggacccaccaagcttcgggatcctagatttgggaggaccctcttttgccagccgaagatggcgatgctggtggtttcttag

SEQ ID NO: 18664 - DNA, 429 bp, Oryza sativa
  Clone ID: PAT_MRT4530_24200C.1
gtggttgttttttttttttttttttttttttgttttttttttttttttttttttttttttttaaatatgaaagacaacttttttttctattttttccacccaaaggtaaacaagtcacaattgatgatatctgacccaatttttaactgggcggggggggggcgggtaaaactcattacaagacccccccacggggggtaggggaaccgggtgcaccaaaacccctaggggggataccatatttaggggggacgttaaaagacaacagggcttgggcttgggccggtttccgctcaaagtttagatcaccaaactgtgggggtggtgggtggggggctttggcctgaacaatgttaatgttctgatagggagattgttgcgccaccttcgcgggctgttgccagacttggttgtttcttagggcaaacc

SEQ ID NO: 18665 - DNA, 145 bp, Oryza sativa
  Clone ID: PAT_MRT4530_24201C.1
aaaacctataacttatacagcaaagggatatttcaaataccacattcacttcatcaacacagatcacaataattatatcaacatcactcgaacatataattttttatcttaaacacatgcattctacaataactaacttgaaata

SEQ ID NO: 18666 - DNA, 460 bp, Oryza sativa
  Clone ID: PAT_MRT4530_24202C.1
gcgcaatgaccggccaacaacgcgacggcgacgatcccgtacgcggcggaggtggagccagcaaacgacaggctgctgggtggcctcttgtccacggactttgacgacagcctcatggctaagccgataccgcgccgggctgtaccgacggcagtcccagtactctgtctagccggagctgatctacttactacgacgctacaagtgcatgcaccgtcgctggagcccctgcacctgcgcctacgagcgctcaggggagcggctgcgttccatgtcgtcatctaacacttgctacgcctagtgcaggaacgtttggtggacctcgctcgaggggatctaaactgatatgctgaccctcacctgcctgtctcgtaatgcgatgacaactgagcggacattcatcttaacacaaccgggcagctaatgcataatggacttgtgctgagagccgagctctgtc

SEQ ID NO: 18667 - DNA, 1823 bp, Oryza sativa
  Clone ID: PAT_MRT4530_24203C.1
atcgacagccacccctccgtccacgtaaccctggactcgtctgctcgcctcgcctccctcccgacgaaggaaatcccaccctctccccgccccgcgaatccgccgcggtaaaccaccccccgcgccgccgccgccggtgcgggccgaggcggcgaagatgtcgtacgcctacctcttcaaatacatcatcatcggcgacacaggggtgggcaagtcgtgcctgctgctgcagttcacggacaagcggttccagcccgtccacgacctcaccatcggcgtcgagttcggcgcccggatgatcaccgtcgacaggaaggcccgtcaagatccagatttgggacacggcagggcaagattcattcagatcgaagatggtgtctttgatttatctaatgaggctaatggaatcaaacttggttacacggtcccgggccaatccggtggtgtcgtttccccgtcttctcaagggggtggctgctgccgtagccactcctaccatagacccggcgctctctcgccgccgccgccgcttttctcctccgatccagcgccgccccccgagggagaatcttccgccgccgcggccagcaccccgcaccctcacgcagtagggatcgaggatgtcgtacgcgtacctcttcaagtacatcatcatcggcgacacaggcgttgggaagtcgtgcctgctgctgcagttcacggacaagaggttccagcccgtgcacgacctcaccatcggcgtcgagttcggcgcccgcatgatcaccatcgacaacaagcccatcaagctccagatttgggacacggctggtcaagaatcgttcagatctataactagatcatactacaggggtgctgctggtgcccttttggtgtatgatatcaccaggagagagacttttaatcatcttgctagctggctagaagatgcaagacagcatgcaaatgccaacatgacagtaatgcttattggtaacaaatgtgatctgtctcatagacgtgctgtcagctatgaggaaggtgaacaatttgccaaggagcatggcctagtatttatggaggcatctgcaaaaactgcacaaaatgttgaggaggcattcatcaagactgctggaacaatttacaagaaaatccaagatggtgtctttgatgtatctaatgagtcttatgggatcaaagttggctatgcggtaccaaatgcttcaggtggtggagctggctcatcctctcaaggtggtggctgctgcggctaaaggcagcagcagtatccaactagtcatgtatccagcctaaattgaaaagtcagatcatgtgtaacatggccctcaatatttcgatgttgccttgtggaaaaaatagctggtattggtactgtgttttttactccttccagctaccgacgttcagtgttagtgcacaaaatgttcatccatggtagtttgtctacattgcagtcatgtaaagttaaacattcacgatttctgtacttttgcatgtgtaactaaatgaaatggtgtgttacattcattccttcaatcaaataatccatagaaacaaactggtttgtaactattgtaactagtcgctagtgtccatggtattttcgattgtggaacataattagtttaatctgcttcagtataacttaagccggctttatcctgtgttaacatgccaaaagactcggtccatttatgtctgctgtgcataaacagtagtctctagattttttttacagcttcatgccacttggcatctaggaattcttattgtctgcatgtgtaattccaatagcaatgcatggtttgaatatttggtacttt

SEQ ID NO: 18668 - DNA, 760 bp, Oryza sativa
  Clone ID: PAT_MRT4530_24204C.1
tttgttttttttttttttttttaccaaatattcaaaccatgcattgctattgtaattacacatgcagacaataagaattcctagatgccaagtggcatgaagctgtaaaaaaaaatctagagactactgtttatgcacagcagacataaatgaaccgagtcttttggcatgttaacactggagcaactacgtttcagtcagcatcaagaagatgattccaagggtaagtggcagtgtgacacacgatagacacccgagtatatcgttccattagctactgcagcagccacccccttgagaagacgaggaaccagcacctccggattggcccgggaccgtgtaaccaagtttgattccattagcctcattagataaatcaaagacaccatcttgaattttctttagtagtggttcagcagtcttgacaaaagttgtttggacattttcagttgcttttgcttttgttcttgtggttcttgagtcttgttggttagggtgcctcaagatctgcacgaggagaggttacgcctggtctacaccgacatatcgggagagctcgttccaagggtggaggccttcttcatctccgacggaagttcttcgtgaggtggttgatggtgtcgagtcaagccgagttgaccccgaccttctatatatggaggcctcttttgggtatggtcctcggtttttttatgcagattcctatgtttcttcaccatatttcgctagtgctatggatctaagcttgatttttggaccc

SEQ ID NO: 18669 - DNA, 216 bp, Oryza sativa
  Clone ID: PAT_MRT4530_24205C.1
atggcgacgactcccccgccccccctctcctcccaccggcgccgcttgggagaagacgcggcggcaccgggccctctccccttcctctccctagcggatctgttggcagcgagggtgacacagatcgggagctcggccgacggcagcttcctcgacagtggcatcatcgttctctactgctcaatggtggcggaaatattggaggagaggagctga

SEQ ID NO: 18670 - DNA, 2336 bp, Oryza sativa
  Clone ID: PAT_MRT4530_24206C.1
agccagaaagaaaagaaggtgccactgccacagatgttggtcatgatgtcaaaactgagaaggtgactaatcagctaattgtctctgatgactcggatatggatatggatgctgacgaggactctccatcaagggaacatgtcagtccaatcaattcttcacttgcaactgctgaatgtactggaaatgttaacacgcgaaagcctgcgtgtgatgtttctaaccttgtcaaggacagtggtggtaaggctaaaactacaaatgtaactgatgaaggtaggagcacattccaactaattcaaggctatgcctcagatgacagtgaagatgaggatggtgcttgtgctgtcagcaaccttgtgccattgactgaaaataatgagcctgttcattcaattggtacaaatcctgatattggccatcaactccttactgaagctgctccttgcactgagagaagtttggaggatcgagagcatcaactcatgagtaagagcaatccagtgaaacatgattcatatgaatgcggacatccagtcaaagaagatttaagtggcaatgattctgatagagggcaacagactagaagacatggcaggagccagtggaaacgaagccgtggccagtcacctcagggcaggaggagctgtagccctctgtcccaaagtttatcatctggaaggcaaagcaattctccacttgctaagcgggctaatctactcgagagcaaatcaccagatggagtgggtcagactttcagggcacaacctggcgtcaagcttggtataagcaaggatggattctacaacgacaaacatgattcccctgtaaaagttgccactccttttgatattcatcctgctggagggcacatttcaggagatagaatatctgagcaagatggcctgatgggaacaaagaagtttaatggttctccagatgatatagattgtaacgagaaaacgaatgatgcatctgttggttcctttggaccacatggtcatggtgcagttttaacttgtggaccttctcaatcagttgcttcttctgcaaatggttctgatcctcataagatgcaaagtcggcaaaagcagcctcatcgtgaattcacttctagtgctccctatgatccactgctcgacagtattgaaccctcaagcagttcaatcaacaaaatggatcttggtcgagaggcaaatctgagtgctagcaatcataatgcatctaaaattgtgaacatagaagtggagagtaaaaatatgcatggcctggggcttgttgctgaatcggaagttgaagaatttggagaggtggcagcagatactgaagcaggtgttgtggataatttaagtcctgagcccttgggtgcaaaagactggagctcagatatgcccggtgatattgacaatgatgaatcggtggataaaaataagaggactaaggattccagatcaatgaagctatttaaggttgctattgcagattttgttaaagaagttcttaagccatcatggaggcagggaaacataagtagagaggctttcaaaaccattgtcaagaaaacagttgataaggtttctagttctgtccctaacaatcatattccaaaaacgccagccaagatcaagcagtatgtccagtcctctcaaaagaaagtgaccaaacttgtaatgcctttccccactccccataccttggcaacgaactccgccatcggcggcctcttccactggagcagcgtgggagctcggcctccaccggagctcgagcggatcccacctggagctcgatggtgctacccgaatctcgcccggcgcggggtggcgttgccggacatggagctcggcctccaccagagctcgagcatatccgacctagagctcgacggcgccgcctaggggtaaggccgtgcatcaatacctcaatcagacatggataaatcatctctgggtgctcatcaaagtctttcgagtcaacctccaggaatctcatttgcaacagtacatgctactgagaagaatatgatgtgtgatgtgctccaacctcattctcagaatttatgtcctcctggacagatgccatctggtttgagaccagctcatataccatcctcaaatataaccccactcccagggcaacagttactttcgactccagaatttcctcagatgcacttccagcctaatgttatggcaccagctaatgagtttctgcagagtcagatgcaaacctatcctgcaccagatctgcctcatcctaggccattggatttccatcctcatactctccagccagttgtccctcctcatcagcagcctgctgccatggttcactcc

SEQ ID NO: 18671 - DNA, 295 bp, Oryza sativa
  Clone ID: PAT_MRT4530_24207C.1
ttcgtttactcggaagccaccaaaccctagccgggagccctgaccttgcgaggaaggggaagaggagagatcgacatcggggagactcatccatggcgcttcgagccctgaacagagagatccagggtatgaaggcgcgagaggtgccggagtaccttgagccgtttctgacttgtgggaacgtggagaagagcacagaccattgctacctccgatacatcgacaaggtcatggtgaccagcttgcccgagccgatattacacgtcatgtacggactcatggtacttttactacc

SEQ ID NO: 18672 - DNA, 4950 bp, Oryza sativa
  Clone ID: PAT_MRT4530_24208C.1
aaccatgccaaaaggatgaataattcccaactctccacgaagaaaagcaaagcgagacgaatccaatggtttagtgaaaatatcagcaatttgcaacttggtgtccaaaaactgcaattcaacatctcccttctcaacatgatccctcaaaaagtgaaaacgaatatcaatgtgctttgtgcgtgagtgttgaacaggattcttagcaatgttaatagcactagtattatcacaaaagagaggtactttctcaaaagtaagaccataatctttcaaagtaaataaaagccaaagaatatgtgaacaacaactagcagcagcaacatattcagattcagcagttgattgagcaacactagattgtttcctagaagaccatgcaatcaatgatgtaccaagaaaatgacatgttccactagtatttttcctatcaattatacaacctccaaaatcagcatcggaatatccacttaagcatatagaagatgaagtagaataccaaattccaaactcaagtgtatgattcaaatacctcattattcgcttgaccgcttgacgatgtgaagcacgaggagaagcttgaaagcgtgcacacaaacatacaacatattgtatgtctggcctagaagcagttagatacaacaaagatccaatcatacttctatattccttttgatcaacagcttcaccatcttcatcaggatccaacacagctgtagaaccaattggtgttgaaattggcttgcaattctccatcttgaaccgtctcaaaagatccttcgtatacttcgtttgatgcacaaaagtaccttgaggtgtttgcttaatttgcaatcccaaaaagtacgataactcacccatcaagctcatctcaaattccctgtgcatagtctcagcaaaatctacaaccaaagcgtgagtcgaacaactaaagacgatatcatccacataaatttgaacgaacagttgattatcaccatgcttaagaacaaaaagcgttttgtcaacctttcccattgtaaaacctttcacaagcaaaaagttcttaagcctatcataccatgccctaggagcttgtttcaaaccatacaaagctttagacaatttaaaaacatggttgggaaaatcaggatttttaaaacctggtggttgtttgacataaacttcctcctgtataaaaccatttagaaaagtactttttacatccatttgatacaatttaaaaccttttgaagcagcaaaagccaacaaaagtctaattgcctcaattctagcaacatgagcaaaagtttcatcaaaatccaaaccctcaatttgagtaaaaccttgagcaacaagtctagctttatttctcacaatcaaaccatcctcattttgtttatttttgaaaacccacttggttccaataatattatgtccagaaggtggttcaaccaaagtccaaactttgtttctctcaaaattttcaagttcttcatgcatggtgttaatccacgattcattagttaatgcatgtgacacatctttgggttcaaaagaagcaacaaatgcagaatttgcacaaacatcatgagtcgttaccttagaccttgttgtccgctcacctatattaccaataatttgttccggcggatgtcgtcgttgaatgtgcaaaggagcagcaacttctgcagttgatccacgttctgtaccagtactggtcgaagtagtaatctccggaggaccatctcgaacagcatcaacagaaccctcagccgacgaccctggccggtctaaccgcacctcctcgtcgtcatcgttgttgtcgctctcgtcttcaaaaatacgaccatcctcccgctgaacctgtgacagtgtacctgcaatatcgggtctagtacctggactagcctcatcaaaagaaacttcgcaagtctcaacgattttgttagtctgcaaaataagtacacgatagccacgagtgtgtgcgtggtaaccaagaaacaatccatcggtagaacgtgcctcaaacttatccaaatttccagatttcaagacaaagcacttgcaaccaaaaacacacaaatgtgaaactttgagttgatgtccaaatcgaagttcataagaagtttttccaagttttgatctcaagaaaacccgatttgaaatataacaagcagtgttaatcgcctcagcccaaaattttctaggagttttatattcatccaacatcgttctagccatctcaaccaaaacacgatttttcctttcaacaacaccgttttgttgaggaacacgaggataagaaaattcatgttcaagacctctttcattgcaaaattgttcaaaagaagcatttttaaactcaccaccattatcacttcgaattcttttcaaagaaccaggaaattcaaactccaatcgaagaaacaaaccatgaaagtgttgaaaagcttcgtccttagttgccataaagaaaacccaagaatatcgagaaaaatcgtcaacaataaccaacacataccactttcctccaacagattgcactctagctggaccaacagtgtccatatgtaatagctgtcccggtgcatccgtcatcacagaaacaataggagcatgtgaagtagaaaccatcttagcatgacgactcggtgtacaaaccaaatcaagatctttcttaagtttagacaaaccacgaacaagatccaaaccacttaacctagtgagatgatcaaaaccaacatgtccaagtcgaggtatagtggccggtctgaccgggggccggtctgaccgcttctgtaccgccggtctgaccggtgcccggtttgaccgatgcttagaagccggtctgaccggtcgccggtctgaccgcgggacccactgcggtctgaccggtttcctcgagggaaaaccatatttttgccactttgattttgcaaaagcaatttctctctcctttttctgtttatgagctaatctgaaacaaaaaccaacaatatatccatcttttccacaaaaagaacaagtatatttttcacgatgattcgacacattggtagcattagaagatttagcaacacaagcaacaacaggagattttgcatgcacaacattggattttgaagaagatgcattcaaggtagacatgataccagcagatttaaacatagttttgttagtatcaggtttaaccaaaatcacaccacctctagcaccaacacttaacacaacaggaggatgtctagaattatgagcaataggattaaaacctaaaccacggttacgtgtgctaacctttgattgatccaaaatcatgttgagattctttttaccatcagaaaatcttagcaaagaatttttcaaataagaaacctctttttccaaattagcacaattttcacaatctaccatgatacctttgcttttacgacatttggggcaagaaagcccttcattgtttttcacaacatcttccatgtactcaacacgacctaaagcatctttcaatttcaacttattcaaattacatgttgagcaatccaaaacatcatgaggttgttttaactttttagcagaaatcatgttaaacatcaaactagcatgaaaagcaagttgatatttttgcaacaactttttagctaaaaataactcatccaaagtgcgtgtgtccaaagcaaaactacaagcaagagaagatctatttttcaaatcatgtgcagcattaacatctctaatttttgaaatctcgttcattaaaacctcacaattttcacaatcatcatcattaggaataacagattttaatctagcaatttcagatttaagagattcaatgataaattcctgttttctatacatcttctcacacttcttattcttttcactcaaaatattaatagcttcctcaaaagcacttacctcattatcttcatactctgtgtcagattcaccacgcgtcatgaagcaaacatcggagatgttctttcccttatcatcatctccactttcaccatctacatcacttagtggctcgaagacggcgcaaacttgttgaaaagcctttctgagattgtccagcttcctcccttgggatgaaccctttgacttgttgttgttgggcttgttgttgttggtcttctcaccatctttgtcttctcttttgcctctcccaagcttaggacaatgcaaacgaaaatgatcaattgaaccacattcaaagcaacgatttggaccacctcttttcctgttcctggcattattcataactcgagaaattctgttagcaaccaaagccaaatcctcctcctcgatttgttcgagttgatcatcggaggtggcattaaaaacagcaagaaaagaagacttagatgaagaagcatcaacatccaaagaggaagaagaagaaaccaaagcactcgacttagaatcaacttttcgaaaaagaacattcatctcatgtgttttcaattttatataaagtgaatccaaagtcaaagtagacatgttaacagactcctgaatagatataactttcatctcccaaatagacatgtcaagaccattcaaaaagtggcgagaaatctcatattgtgaataattagcatcataagaagaatcaacagatctaagatcactcaaaattttattaaaccgagaaagatagtcatccaaaacttctccaggtttcatctcaaatttaatatactcctttttgaaaagatcacgacgaatttctttaaaattatttgttccactcaaaagaatattgggagctttgcaatttttttcaaaagcagttttttcagcagcagtattaatagcttcaggaatcacataaggatgagaaacttttctccaaatatcataatcttcagccataatataagattgcatcctactacaccaatgagaaaaatctgttccatcgaaaacatgaggcttagttgaaaacctagcgggagtagccat

SEQ ID NO: 18673 - DNA, 153 bp, Oryza sativa
  Clone ID: PAT_MRT4530_24209C.1
ctccatcataacaccaccgccatgctctgccacgcctcccatcctgctccactccatttcaaattctcgccacctcccccccgcatttctgactgaacaccttcgccgcgcagcatgtctccgacctgccaccccatcccccgcgccctgcct

SEQ ID NO: 18674 - DNA, 1135 bp, Oryza sativa
  Clone ID: PAT_MRT4530_2420C.1
tgaagttggaaagtccatttctgattacacggcttggttaatacgcacggcgagaactcttacacgaccagatcttacatggtcttttgtctctgaaggatccgacaaggccttatcggctctgggcgtccccagccgaagttctctcgggttcctcggaggccttgtcaagacggcgtaaagggacagtaggataggtttcaacgctaggtgtcgtcgtggtaagggatctctggtaaaacacttggcgatattgtgtacctgctatcaactttgttgaaatagaggtattaggagagtcgctataccgctggtcgaagaccaggcagtagtcgtaactcgaccacgctggtcgaggaccaggcagtagtcgtaacttgaccatcgtggtcgaggaccaggcagtggtcgagtcgtaactcgaccacttaagtggaaatagtgggagaaacgctatattgctagtcgaggaccaggtagtagtcgtaattcgaccacttgaagtggaagtagtgggagaaacgttacatcgctggtcaaggaccaggcagtagtcgtaactcgaccacttgaagtgaaagtagtggaagaaacactacatcactggtcgaggaccaggcagtagtcgtaactcgaccacttaaagtggaagtagtgggagaaacgctgcatcgctggtcgaggaccaagcagtagttgtaactcgaccacttaaaagtgaggcgagagagatcactacgttttactggttcgagaaccagaagtaggagtcttttaatcacttaacaaccttttctcgagtagtccagccagggtcggtgctatgagataggtcgtcggtcttcgttggtaggtcgggtgcgataactccgcatttgtcgagaatgttcttgataatagagtgtactcgaccacaacctactcgagtgcataattgttcctccaccaatatctctgagcacttgtagctagtcagcgatttaggtccatgttgcattgaactatttcagggatgggtgagtgtaatagagtgcacgaaacaaaatttccatgcttacgattttataacttttgtgcaaaaagatgcaaacatgaactgaaacgagccaagaaggaaagcgacatggcatccgtg

SEQ ID NO: 18675 - DNA, 3849 bp, Oryza sativa
  Clone ID: PAT_MRT4530_24210C.1
tcaaaccatgccaaaaggatgaattatgcccaattcaccacgaagaaaagcaaaacgattagaatccaaaggtttagtgaaaatatcagcaagttgcaactttgtgtccaacaactgcaatttaacatctcccttctcaacatgatccctcaaaaagtgaaaacgaatatcaatgtgctttgtgcgtgagtgttgaacaggattcttagcaatgttaatagcacttgtattatcacaaaagagaggtactttctcaaaagtaagaccataatctttcaaagtagataaaagccaaagaatctgtgaacaacaactagtaacagcaacatattcagattcagcggttgattgagcaacactagattgtttcttagaagaccatgcaatcaatgatgtaccaagaaaaatacatgttccactagtacttttcctatcaattctacaacctccaaaatcagcatcggaatacccacttaaatatatagaagatgaagtagaataccaaattccaaactcaagtgtttggttcaaatacctcattattcgcttgaccgcttgacgatgtgaagcacgaggagaaacttgaaagcgcgcacacaaacacacagcaaattgtatgtctggcctagaagcagttagatacaacaaagatccaatcatacttctatactccttttgatcaacagcttcaccatcttcatcaggatccaacacagctatagaaccaattggtgttgaaattggcttgcaattctccatcttgaaccgtctcaaaatatccttcatgtacttcgtttgatgcacaaaagtacattgaggtgtttgcatcatgctcatctcaaattccctgcgcatagtcccagcaaactccacaaccaaagtgtgagtggaacaaccaaagatgatatcatccacataaatctgaacgaacagttgattatcaccatgcttaagaacaaaaagcatttgatcaacctttcccattgtaaaacctttcgcaagcaaaaagttcttaagcctatcataccatgctctagttgcttgtttcaagccatacaaaactttagataatttaaaaacatggttggcaaaatcaggattttcaaaacctagtggttgtttgacataaacttcctcctgtataaaaccatttagaaaagcacttttcacatccatttgatacaatttaaaaccttttgaagcagcaaaagccaacacaagtctaattgcatcaattcttacaacaggagcaaaagtttcattaaaatccaatccctccacctgagtaaaaccttgagcaacaagtctagctttatttctcacaattaaaccatcatcattttgtttatttttgaaaaccaacttggttccaataatattatgtccaaaaggtggttcaactaaagtccaaactttgtttctctcgaaattttcaagttcttcatgcatagcgttaatccacgattcatcagttaatgcatgtgacacatctttgggttcaaaagaagcaacaaatgcagaatttgcacaaacatcatgagtcgttatcttagacctagtggtccgctcacttagattaccaattatttgttccggtggatgtcgtcgttgaatatgcaaagtagcagcgacttctaaagttgtttcacgttctgtaccagtactggtcgaagttgtagcctctggaggacaatctcgatcagcgtcaacagaacccgaacctgacgaccctggccggtttgaccgctcgtcctgaggcggtctgcccggaggtgtgcttgcggtctgaccggcctggcgcccggtctgaccggccgagccgaccttgtcgtcatcgtcgtcgctatcgtcttcaaaaatacaactatcctccccctgaacctgtgacaatgtacctgtaatatcgagtctagtacctggactagcctcatcaaaagaaacttcgcaagtctcaacaattttgttagtctccaaaataagtacatgatagccatgagaatgtgtagggtaaccaagaaacattatatcgatagaacgtgcctcaaacttgtccaaatttccagatttcaagacaaagcatttgcaccaaaaacacgcaaaatgtgaaactttgggttgacatccaaatcgaagctcataagaagtttttccaagttttgacctcaagaaaacccgatttgaaatatagcatgcggtgttagccgcctccgcccaaaattttctaggagtgtgatactcatccaacatcgttctagccatctcaaccaaaacatgattctttctttcaaaaacaccattttgttgcggaacacgaggagaagaaaattcgtgttcaagacctctttcgttgcaaaattgttcaaatgaagcatttttaaactcaccaccattatcacttcggattcttttcaaagaaccaggaaattcaagatccaatcgaagaaacaaaccacgaaagtgttgaaaagcttcgtccttagttgccatgaagaaaacccaagaatatgaagaaaaatcgtcaacaataaccaacacataccactttcctccaacagattgcactctagctggatcaacaatgtccatatgtaatagctgtcccagtgcatccaccatcacaaaaacaataggagcatgtgaagaagcaaccatcttagcatgacgacacggtgtacaaaccaaatcaagatctttcttaagtttaggcaaaccacgaacaagatccaaaccacttagcctagtgagatgatcaaaaccaacatgtccaagtctacgatgccaaaacatcacatctttatcaaacttagcaaccaaacatgttatcgcaggtgaaacatgattatcaaaatcagctttaaacactcttccatagcgagaaatattcagcacagaatcaccacaagaatcaaaaactttacttccagttttcttaaccaaacctttagcgagaacaacactcgtagaagcatcaccaaagataatcgattcagtcttagatgcctttttgagggaggagaaccaatttttatcaccggtcatgtgccgcgaacaaccggaatccacgatccacacgttctccttccttgccaccaaagcgtacacacaagcagaagtcgaagcctcagtacgtcggtctgaccgaagccagtctgaccgccgctcagtagccggtctgaccgcgggacccactgcggtcagaccggtttcctcgagggaaaaccagatttttgccactttaattttgtaaaagcaatttctctctccttttttgtttatgagccaatcttcataaaatctttgcaaagaacttttcaaataagaaacctctttttccaaattagcacaattttcacaatctaccatgacacctttgcttttacgatatttggggcaagaaagcacttcattgtttttcacaacatcttccatgtactcaacacgacctaaaacatcttttagtttaatcttgtttaatgtgcatgttgagcaatccaaaacatcatgtggttgttttaactcattgtcttcacaccctgaatccgattcaccacacgccatgaagcaaacactggagatgttctttcccttatcttcatctctactatcaccatctacatcgcttagtggcttaaacgcagcgtagacttgatcaaaagccttattgagagtctccttgatcttcctccctttgaaagtacccttcggcttcttgtcattggtcttctcatcaccattatcttccctccttgctctcccaagcttaggacatcgcgaacgaaagtgatctgtagaaccacattcaaagcaacgatttggtccacctcttttcctgtacctaacattagtcat

SEQ ID NO: 18676 - DNA, 303 bp, Oryza sativa
  Clone ID: PAT_MRT4530_24211C.1
atgcagcagattatggcgaagctagtggtagtgttttcgcgggctgcggtggtcggtgtcaacgacggcggcagcgcgagcggcggtgtgcttcggggtgaggtgccatttagagcatgcatgtgcctctacgggactcctggagactcacttgaggtcgtgtgtgctccggcgaagcttggacagcgatggagaaccgaggaacgctccggcggcggcggaaaacagcagtgcgacgacgtcggcttcctccggtcttccggctgccagggagagaaggggaatggattagagatgccctag

SEQ ID NO: 18677 - DNA, 2031 bp, Oryza sativa
  Clone ID: PAT_MRT4530_24212C.1
aaccatgccaaaaggatgaattattcccaattcacaacgaagaaaagcaaagcgattatgatccaaaggtttagagaaaatatcagcaatttgcaactttgtatccaaaaactgcaattcaacatctcctttctcaacatgatccctcaaaaagtgaaaacgaatatcaatgtgctttgtgcgtgagtgttgaacaggattcttagcaatattgatagcactagtattatcacaaaacagaggtactttctcaaaagtaagaccataatctttcaaagtagataaaagccaaagaatctgtgaataacaactagcagcagcaacatattcagattcagcagttgattgagcaacactagattgtttcctagaagaccatgcaatcaatgatgtaccaagaaaatgacatgttccactagtacttttcctatcaattctacaacttccaaaatcagcatcggaatatccacttaagcatatagaagatgaagtagaataccaaattccaaactcaagtgtatgattcaaatacctcattattcgcttgaccgcttgacgatgtatgtctggcctagaagcttgaaagcgtgcacacaaacacacaacaaattgtatgtctggcctagaagcagttagaaacaacaaagatccaatcatacttctatactctttttgatcaacagcttcaccatcttcatcaggatccaacacagctgtagaaccatttggtgttgaaattggcttgcaattctccatcttgaacggtctcaaaagatcctttgtatacttcgtttgatgcacaaaagtaccttgagatgtttgcttatttgcaatcccaaaaagtacgatacctcacccatcatgctcatctcaaattccctgcgcatagtctcagtaaaatccacaaccaaagcgtgagttgaacaaccaaagatgatatcatccacataaatctgaacgaacagttgattatcaccatgcttaagaacaaaaagcgttttgtcaaccattcccattgtaaaaccttacgcaagcaaaaagttcttaagcctatcataccatgctctaggtgcttgtttcaaactatacaaagctttagacaatttaaaaacatggttgggaaaatcaggattttcaaaacctgatgattgtttgacataaacttcctcctgtataaaaccatttagaaaagcacttttcacattcatttgatacaatttaaaaccttttgaagcagcaaaagccaacaaaagtctaattgcctcaattctagcaacaggagcaaaagtttcatcaaaatccaaacccttcacctgggtaaaaccttgagcaacaagtctaactttatttctcacaatcaaaccatcctcattttgtttatttttgaaaacccacttggttccaataatattatgcccagaaggtggttcaactaaagtccaaactttgtttctctcaaaattttcatgttcttcatgcatggcgttaatccacgattcatcagttaatgcatgtgaaacatctttgtgttcaaaagaagcaacaaatgcagaatttgcacaaacatcatgagtcgttattttagaccttgtagtccgctcacctatattactaatgatttgtttcggcggatgtcgtcattgaatatgcaaaggaacagcgacttttgaagttgattcacgttctgtatcagcactggtcgaagttgtaatctctagaggaccatctcgatcagcatcaacagtacccgaacccgacaagcctggccggtctgaccgcaccccctgtggtggtttgaccggtggcatgccggcggtctgaccggcctggcgctcggtctgactggccgagctgacctcgtcgtcgtcgtcgctctcgtcttcaaaaatacgaccatcctccccctgaacctatgacaatatatctgaaatatcgggtctagtacatagactagcctcatcaaaagaaacttcgcaagtttcaacgattttgttagtctccaaaataagtacacagggtaccgagctcgaa

SEQ ID NO: 18678 - DNA, 430 bp, Oryza sativa
  unsure (1)..(430): unsure at all n locations
  Clone ID: PAT_MRT4530_24213C.1
accaanccacacagaggncagcgggcgcccgcgcaaccccncgcgcccgcccaaggcgggcccggcgcgaagcgcgggccgcgagcgcgtgcccgggtcgccgccggcggccgnaagggtgcgcgggacaaaggcggcggctaagggaggcgcagacgcgccgtacgggaggcggcggcggccgagggcgtacacggcggcgcagtccaagattctgctcccgccgctgcggcagccggccaaatccgtgggagcgttcggggtgctcggctcgacggcgagcttcactgtgggggctaggcggagacgcggaggggacttcaaggcagctgtggggagggggttaggcggcagcgggaggggaaggggcttggaggcggcgacggggagggggcttggatgtgaactgcaccgtgtgaggaggggatga

SEQ ID NO: 18679 - DNA, 3786 bp, Oryza sativa
  Clone ID: PAT_MRT4530_24214C.1
atgaagttgtcatccactttaagagttcttcgatttgtgtttaccgggtttcggcggtctaaccggcgatcaaccggcggtcagaccggcgttattttcatcaaagagcttcgtcgtgatcttttcaaaaaggagtatattaaatttgagatgaaacctggagaagctttggatgactatctttctcggtttaataaaattttgagtgatcttagatctgttgattcttcttatgatgctaattatccacaatccgagatttctcaccacttttttaatggtcttgacatgtctatttgggagatgaaagttatatctattcaagagtcagttaacatgtctactttgactttggattcactttatacaaaattaaaaacacatgagatgaatgttctttctcgaaaagttgattctaagtcgaatgctttggtttcttcttcttcctctttggatgtttatgcttcttcatcaaagtcgtcttttcttgttgtttttaatgccacatccgatgatcaactcgaacaaatcgaggaggaggatttggctttggtcgctaacagaattgctcgagctatgaataatgccaggaacaggaaaagaggtggtccaaatcgttgctttgaatgtggttcaattgatcatcttcgttcgcattgtcctaagcttgggagaggcaaaagagaagacaaagatggtgagaagaccaacaacaacaagcccaacaacaataagccaaagggttcttaccaagggaggaagatggagaatcttaggaaagcttttcaacaagtttgcgccgccttcgagccactaagtgatgtagatggtgaaagtggagatgatgataagggaaataacgtctccgatgtttgctttacggcgcgtggtgaattaaaacaacctcataatgttttggattgctcaacatgtaatttgaataagatgaaactaaaagatgctttaggtcgtgttgagttcatggaagatgttgtgaaaaacaatgaagtgctttcttgccctaaatgtcataaaagcaaaggtgtcatggtagattgtgaaaattgtgctaatttggaaaaagaggtttcttatttgaaaaattatttgctaagattttttgatggtaaaaagaacctcaacatgattttggatcaatcaaaggtgttggtgctagaagtggctttggtaacaaggaaggagaatgtgtggatcgtggattccggttgttcgtggcacatgaccggtgataaaaattggttctcctccctaaagaaggcatctaagactgaatcgattatctttggtgatgctgctacaagtgtcgttttcgctacaggtatggttaaggtaaatgaaaaatttgaattgaagaatgtagctttggttgaggatttaaagtacaatttgctttcggtttcacaaattgttgatgaagagtttgaagttcactttaagaaaactggaagtaaagtttttgattctcgtggtgattctgtgctgaatatttctcgttatggaagagtgtttaaagctgattttgaaaatcctgtttcacctgtgataagatgtttggtttctaagtttgataaagatgtgatgttttggcatcgtagacttggacatgttggttttgatcatctcactaggttaagtggtttggatcttgttcgtggtttgcctaaacttaagaaagatcttgatttggtttgtacaccgtgtcgtcatgctaagatggtttctacttcacatcctattgtttctgtgatgacggatgcaccgggacagctattacgtatggacactgttggtccagctagagtgcaatctgttggaggaaagtggtatgtgttggttattgttgacgatttttctctatattcttgggttttctttatggcaaataaggacgaagtttttcaacactttcgtggtttgtttcttcgattggatcttgaatttcctggttctttgaaaagaattcaaagtgataatggtggagaatttaaaaatgcgtcatttgaacaattttgcaatgaaagaggtcttgaacatgaattttcttctcctcgtgttcctcaacaaaacggtgttgttgaaaggaaaaatcgtgttttggttgagatggctagaacgatgttggatgaatataaaactcctagaaaattttgggctgaggcgattaacactgcttgttatatttcaaatcgggttttcttgagatctaaacttgaaaaaacttcttatgaacttcgatttggacatcaacccaaagtttcacatctgcgtgtttttggttgcaagtgctttgtcttgaaatctggaaatttggataagtttgaggcacgttctaccgatggattgtttcttggttaccctgcacacactcgtggctatcgtgtacttattttggggactaacaaaatcgtggagacttgcgaagtttcttttgatgaggctagtctagatactagacccgatattgcaggtacactgtcacaggttcagggggaggatggtcatatttttgaagacgagagcgacaacgacaacgacgacgacgaggtcggctcggccggtcagaccgtcggcacacctccggtcagaccggcgcaggacgtgcagtcagaccggccagggtcgtcggctgagggttctgttgatgctgatcgagatggtgagcggactacaaggtctaaggtaacgactcatgatgtttgtgcaaattctgcatttgttgcttcttttgaacccaaagatgtgtcacatgcattaactgatgaatcgtggattaacgccatgcatgaagaacttgaaaattttgagagaaataaagattggactttagttgaaccaccttctggacataatattattggaaccaagtgggttttcaaaaataaacaaaatgaggatggtttgattgtgagaaataaagctagacttgttgctcaaggttttactcaagttgagggtttggattttgatgaaacttttgctcctgttgctagaattgaggcaattagacttttgttggcttttgctgcttcaaaagctttgtatggcttgaaacaatctcctagggcatggtatgataggcttaagaactttttgcttgtgaaaggatttacaatgggaaaggttgacaaaacgctttttgttcttaagcatgattttgctgagactatgcgcagggaatttgagatcagtatgatgggtgagttatcgtactttttgggattgcaaattaagcaaacacctcaaggtacttttgtgcatcaaacaaagtatacgaaggatcttttgagacggttcaagatggagaattgcaagccaatttcaacaccaattggttctacagctgtgttggatcctgatgaagatggtgaagctgttgatcaaaaggaatatagaagtatgattggatctttgttgtatctaactgcttctgggccagacatacaatttgctgtgtgtttgtgtgcacgctttcaagcttctcctcgtgcttcacatcgtcaagcggtcaagcgaataatgaggtatttgtatcattcacttgagtttggaatttggtattctacttcatcttctatatgcttaagtggatattccgatgctgattttggaggttgtagaattgataggaaaagtcctagtggaacatgtcattttcttggtacatcattgattgcatggtcttctaggaaacaatctagtgttgctcaatcaactgctgaatttgaatacgttgctgctgctagttgttgttcacagattctttag

SEQ ID NO: 18680 - DNA, 355 bp, Oryza sativa
  Clone ID: PAT_MRT4530_24215C.1
aagcgaatgccccttttttgggttcttttttaattggtaggggggcttgccacttcatgaaccaatataccacccctatatgcccatgccattggccccatagagaccccccttcttatgaacttacacattgcttggaataaaaacccaccaaatgagaatgaccccggcccctttgtcaaacacaggcacaagaccccaaaatgggcgagggcaagaaagcaaaggcacacagaaaagagcaacaaaagggtataccaatagtgcatcaaatggacttgaggggcggcaacttaatgccacaatcaaaaccggtttccaggggtgggcaccccaaggcaaccttgcagccctg

SEQ ID NO: 18681 - DNA, 2538 bp, Oryza sativa
  Clone ID: PAT_MRT4530_24216C.1
aaaaaaaatatgctatggccacttgacctaggtcatttaagctaccaagtaattcttcagttaagtggtttggatcttattcatgatttgtctaaacttaagaaagattttgatttggtttgtacaccgtgtcgtcatgctaagatggtttctacttcacatgctcctattgtttctgtgatgatggatgcaccgggacagttattacacatggacactattggtccagctagagtgcaatctgttggaggaaagtggtatgtgttggttattgttgacgatttttctcgatattcttgggttttctttatggcaactaaggacgaagcttttcaacactttcgtggtttgtttcttcgattggatcttgaatttcctgattctttgaaaagaatccgaagtgataatggttgagagtttaaaaatgcttcatttgaacaattttgcaatgaaagaggtcttgaacatgaattttcttctcctcgtgttcctcaacaaaacggtgttgttgaaaggaaaaatcgtgttttggttgagatggctagaacgatgttggatgaatataaaactcctagaaaattttgggctgaggcgattaacactgcttgctatatttcaaatcaagttttcttgatatctaaacttggaaaaacttcttatgaacttcgatttggacatcaacccaaagtttcacatttgcgtgtttttggttgcaagtgctttgtcttgaaatctagaaatttggataagtttgaggcacgttctaccgatggattgtttcttggttaccccgcacatactcgtggctatcgtgtacttattttggagactaacaaaattgttgagacttgcgaagtttcttttgatgaggctagtccaggtactagacccgatattgcaagcgacaacgacaatgacgacgacgaggtcggctcggccggtcagaccaggcgccaggccggtcagaccgccggcacacctccggtcaaaccggcataggaggtgcggtcagaccggctagggtcgtcggctgagggttctgttgatgctgttcgagatagtccttcggaaattactacttcgaccagtactgatacagaacgtggatcaacttcagaagttgctgctcctttgcatattcaacgacgacatccgccggaacaaattattggtaatacaggtgagcggactacaaggtctaaggtaacgactcatgatgtttgtgcaaattttgcatttgttgcttcttttgaacccaaagatgtgtcacatgcattaactgatgaatcgtggattaacgccatgcatgaagaacttgaaaattttgagagaaacaaagtttggactttagttgaaccacattctggacataatattattagaaccaagtgggttttcaaaaataaacaaaatgaggatggtttgatcgtgagaaataaagctagacttgttgctcaaggttttactcaagttgagggtttggattttaatgaaacttttgctcctgttactagaattgaggcaattagacttttgttggcttttgctgcttcaaaaggttttaaattgtatcaaatggatgtgaaaaatgcttttctaaatggttttatacaggaggaagtttatggcaaacaaccaccaggttttgaaaatcctgattttaccaaccatgtttttaaattgtctaaagctttgtatggtttgaaacaagctcctagggcacggtatgataggcttaagaactttttgcttgcgaaaggttttacaatgggaaaggttgacaaaacgctttttgttcttaagcatggtgataatcaacttttcgttcagatttatgtggatgatatcatctttggttgttcgactcacgctttggttgtagagtttgctgaggctatgtgcagggaatttgagatgagcatgatggtgttggatcctgttgaagatggtgaagttgttaatcaaaaagagtatagaagtatgattggatccttgttgtatctaactgcttctaggccagacatacaatttgttatgtgtttgtgtgcacgctttcaagcttctcctcgtgcttcacatcgtcaagcggtcaagcgaataataattgataggaaaagtactagtggaacatgtcattttcttggtacatcattgattgcatggtcttctaggaaacaatctagtgttgctcaatcaactgctgaatctgaatatgttgctgctgctagttgttgttcacagattctttggcttttatctactttgaaagattatggtcttacttttgagaaagtaactctcttttgtgataatactagtgctatcaatattgctaagaatcctgttcaccactcacgcacaaagcacattgatatttgttttcactttttgagggatcatgttgagaagggagatgttgaattgcagtttttggacaccaagttgcaaattgctgatattttcactaaacctttggattctaatcgctttgcttttcttcgtggtgaattgggtgtaattcatccttttggcatggtt

SEQ ID NO: 18682 - DNA, 881 bp, Oryza sativa
  unsure (1)..(881): unsure at all n locations
  Clone ID: PAT_MRT4530_24217C.1
aaaggggaanaaaaaattttnccccnccaanttcggggggatttccccccnnntggccaaanaggggaagaaaaaaaattntttnttttccgggtngggganttggaaaattaccaaaaaanaaatttccnnntnnnnttttnncctnnaaatttcnnttccgggtttcccttnnaaatttcncttntcccnttnaacccnaanttttaaatttngaaaaaaaaaanttnnaaanaactngntnngctgaaaaacnngnnnnttnntttttnnntnaagccnncgacanatatttaaaaaaatntnnacntnaatanntaaanagagnggntngnnntccgagaanaanaacccccnntnnntntanaatnacncagctnaaaanantnnntcanctaaaaaancnngnggggnngnnccnccccccnacggnggggnatttcctnacngnncgtngggngattnntannaannggntnccttctcnccccaanaancccccancacnaaaatgngntttataagnttngggggggggnccccccccccttttaaaaaaaaaancccntttttaaaaaaaaaaaaaaatttttgggggntttttttttttttnannngggggggtttttttttttttttnttngggggggntttttttttttttttggggggggggggtttttcccccccccnaaaaaaaaaaccccnttttnccccccnttttnggggggnttttttannnaaaaantttttaaaaaaaaaaaatttttncccccccccccccaaaaaaaaggannccccccccccccaaaaaatttttccccccctttttttncncncaaaaaaaattntnttttttngggggggnntgnttntnnatc

SEQ ID NO: 18683 - DNA, 3546 bp, Oryza sativa
  Clone ID: PAT_MRT4530_24218C.1
atggctactcctgctaggttttcaactaagcctcatgttttcgatggaacggatttttctcattggtgtagtaggatgcaatcttacattttggctgaagattatgatatttggagaaaagtttctcatccttatgtaattcctgaagctattaatactgctgctgaaaaaactgcatttgaacaaaattgcaaagctcgcaacattcttttgagtggtatttctcgttcggattatgatcgtgttgcgcactttcgaactgcttatgaaatttggaatgctttgagtaactttcttcaaggaacaaataacattaaagaacttcgtcgtgatattttcaaaaaggagtatattaaatttgagatgaaacctggagaagctttggatgactatctctctaagtttaataaaattttgagtgatcttagatctattgattcttcttatggtgctaattatccacaatatgagatttctcgtcactttttgaacggtcttgatatgtctatttgggagatgaaagttacatctattcaggagtcagttgacatgtctactttgactttggattcgctttatacaaaattgaaaacacatgagatgaatgttctttctcgaaaagttgattctaagtcgagtgttttggtttcttcttcttcttctttggatgttgaagcttcttcatctaagtcttcttttgttgctgtttttaatgccacatccgatgatcaactcgaacagatcgaggaggaggatttggctttggttgctgacagaattgctcgagctatagtgccaggaacaggaaaagaggtagggagaggcaaaagagaagacaaagatggcgagaagaccaacaacaacaagccgaagggttcatcccaagggaggaagctggagaatcttagtaaggcttttcaacaagtttgcgccgccttcgagccactaagtgatgtagatggtgaaagtggagatgatgataagggaaagaacatctccgatgtttgcttcatggcgcgtggtgaatctgacacaaagtatgaagataatgaggtttcttatttgaaaaattctttgctaagattttctgatggtaaaaagaacctcaacatgattttggatcaatcaaaggtgttggtgctagaagtggctttggtggcaaggaaggagaacgtgtggatcgtggatttcggttgttcgcggcacatgaccggtgataaaaattggttctcctcactcaaaaaggcatccaagactgaatcgattatcattggtgatgcttctacaagtgccgttctcgctataggtttggttaaggacgaaacttttcaaccctttcgtggtttgtttcttcgattggatcttgaatttcctggttctttgaaaagaattcgaagtgataatggtggtgaatttaaaaatacttcatttgaaaaattttgcaatgaaagaggtcttgaacatgaattttcttctcctcgtgtccctcaacaaaacggtgttgttgaaaggaaaaatcgtgttttggttgagatggctagaacgatgttggatgactataaaactcctagaaaattttgggctgaagcttttaacacagcttgttatatttcaactcgggttttcttgagatctaaacttggaaaaacttcttatgaacttcgatttggtcatcaacccaaagtttcacatttgcgtgtttttggttgcaagtgctttgtcttgaaatctggaaatttggataagtttgaggcacgttctaccgatggattgtttcttggttaccccgcacatactcgtggctatcgtgtacttattttggagactaacaaaatcgttgagacttgcgaagtttcttttgatgaggctagtccagaagtcgctgctcctttgcacattcaacaacgacatccgccggaacaaattattggtaatacaggtgagcggactacaaggtctaaggtaacgactcatgatgtttgtgtaaattctgcatttgttgcttcttttgaacccaaagatgtttcacatgcattaactgatgaatcgtggattaacgccatgcatgaagaacatgaaaattttgagagaaacaaagtttggactttagttgaaccaccttctggacataatattattggaaccaagtgggttttcaaaaataaacaaaatgaggatggtttgattgtgagaaataaagctagacttgttgctcaagattttacccaggttgagggtttggattttgttgaaacttttgctcctgttgctagaattgaggcaattagacttttgttggcttttcctgcttcaaaaggttttaaattgtatcaaatggatgtgaaaagtgcttttctaaatggtattatacaggaggaagtttatgtcaaacaaccaccaggttttgaaaatcctgattttcccaaccatgtttttaaattgtctaaagctttgtatggtttgaaacaagctcctagggcatggtatgataggcttaagaactttttgcttgtgaaaagtttttcaatgggaaaggttgacaaaacgctttttgttcttaagcatggtgataatcaactatttattcagatttatgtggatgatatcatctttgtttgttcgactcacgctttggttgtagattttactgagactatgcgcagcgaatttgagatgagcatgatgggtgagttatcgtactttttgggattgcaaattaagcaaacacctcaaggtacttttgtgcatcaaacgaagtatacgaaggatcttttgagaaggttcaagatggagaattgcaagccaatttcaacacctattggttctacagctgtgttggatcctgatgaagatggtgaagctgttgatcaaaaagagtatagaagtatgattggatctttgttgtttctaactgcttctaggccagacatacaatttgttgtgtgtttgtgtgcacgctttcaagcttctaggccagacatacatcgtcaagtggtcaagcgaataatgaggtatttgaatcatacacttgagtttggaatttggtattctacttcatcttctatatgcttaagtagatattcagatgctgattttggaggttgtagaattgataggaaaagtactagtggaatatgtcattttcttggtacatcattgattgcatggtcttctaggaaacaatctagtgttgctcaatcaactactgaatctgaatatgttgctgctgctagttgttgttcacagattctttggcttttatctactttgaaagattatggtcttacttttgagaaagtacctctcttttgtgataatactagtgctatcaatattgctaagaatcctgttcaacactcacgtacaaagcacattgatattcgttttcactttttgagggatcatgttgagaagagagatgttgaattgcagtttttggataccaagttgcaaattgctgatattttccataaacctttggatcataatcgctttgcttttcttcgttgtgaattgggaataattcatccttttggcatggtttga

SEQ ID NO: 18684 - DNA, 2046 bp, Oryza sativa
  Clone ID: PAT_MRT4530_24219C.1
atggctgaagattatgatatttggagaaaagtttctcatccttatgtgattcctgaagtaattaatactgctactgcaaaaactgagtttgaacaaaattgcaaagctcgcaatattcttttgagtgggatttctcgttcggatgatgatcgtgttgcgcattttcaaactgctcatgaaatttggaatgctttgagtaactttcatcaaggaacaaataacattaaagaacttcgtcgtgatattttcaaaaaggagtacactaaatttgagatgaaacctggagaagctttggatgactatctttctaggtttaataaaattttgagtgatcttagatctgttgattcttcttatgatgctaattatccacaatatgagatttctcgtcactttttgaatgctcttgacatgtctatttgggagatgaatgttacatctattcaggagtctgttaatatgtctactttgactttggattcgctttacacaaaattgaaaacacatgagatgaacgttctttctcgtaaagttgattctaagtcgagtgctttgatcgaggaggaggatttggctttggttgctaacagaattgctcgagctatgaataatgccaggaacaggaaaagaggtggtccaaatcgttgctttgaatgtggttcaattgatcatcttcgttcgcattgtcctaagcttgggagaggcaaaagagaagacaaagatggtgagaagaccaacgacaacaagcagaagggtacgttcaaaggaaggaggattatggagaatctcaataaggcttttgatcaagtctacgccgcatttgagccactaagcgacgtagatggtgatagtggagatgaagctaagggaaagaacatctccggtgtttgcttcatggcatgtggtgaatcggattcagagtgtgaaaacaatgagataagtgcttttgaggaagctattaatattttaagtgcaaaaaataagaagtgtgaaaagatatatagaaaacaggaatttatcattgaatctcttaattctgaaattgctagattaaaatctcttattcctaatgatgatgattgcaaaagttgtgaggttttaatgaatgagatttcaaaaattagagatattaatgctgcacatgatttgaaaaatagatcttttcttgctcttagttttgctttgcacacacgcactttggatgagttgtttttaactaaaaagttgttgcaaaaatatcaaattgcttttcatgctagtttgatgtttaacatgatttgtgctaaaaagttaaaacaacctcatgatgttttggattgctcaacatataatttgaataagatgaaattgaaagatgctttaggtcgtgttgagtacatggaagatgttgtgaaatacaatgaagtgatttcttgccccaagtgtcgtaaaagcaaaggtgtcatggtagattgtaaaaattgtgctaatttggaaaaagaggtttcttatttgaaaaattatttgctaagattttctgatggtaaaaagaacctcaacatgattttagatgaatctaaggtgttggtgcttgaagtggctttggtgccgcggaaggagaacgtgtggatcgtggattctggttattcgcggcacatgactggtgataaaaattggttcttctctctcaaaaaggcatccaagactgaatcgattatatttggtgacgcttctacaagtgtcgttctcgctacaggtttggttaagattctttggcttttatctactttgaaagattatggtcttacttttgagaaagtacctctcttttatgataatactagtgctattaacattgctaagaatcctgttcaacactcacgcacaaagcacattgatattcgttttcactttttgagagatcatgttgagaaaggagatgttgaattacagtttttggacacaaagtcgcaactcgctgatattttcgctaaacctttggattctaatcgctttgcttttcttcgtggtgaattgggcataattcatccttttggcatggtttga

SEQ ID NO: 18685 - DNA, 568 bp, Oryza sativa
  Clone ID: PAT_MRT4530_2421C.1
gggggtcgggcccgagggtgacgtggccacccctccctctgtctccccgaggggtcgggtcgctcccgcttcggccccgagggctggggcgccccgaccccctgtggttttggcaccacgtgtgtgggtcggattgacgagcgcgtcacgccgcatttaatgcggcgcagtgcgcgcttatccggtccgtgaccagtcgcagtgtgtgaccggtcacagaccgccggagccggcgtgctagctcctggagtgggtatgtcagtcccgatccaccagaacacaggagtagggtattacgcttctcagcggcccgaacctgtctacatcgcccgtgtcttgtgcatttgctctctcgcgaacattccacagatcgagggtgaagaacctcacttagcgcccccggccgaaccggcaaaggggggcctgcgcggtcttctgttttgccaagtaaaacacttattaggacatgacgtgcgcacacggggtgggcatgagacatgctagagcttgatttatgctctattattttttttacctcttgcatcatttttctatcttttatgtcttc

SEQ ID NO: 18686 - DNA, 2676 bp, Oryza sativa
  Clone ID: PAT_MRT4530_24220C.1
atgccgaccaccaagtgcgccgtcccgctggtgagcggcgccgccggcggcgggggatcggcggagctgacgcgtcagctgtcgtcgacgcaggcgagcccgcggttcagcttctcgagcggcgtgctgccgtcgctgggctccaggggcggcggcgagcgccacgcccggctccggcggttcatcgtgtccccctacgaccgccgctacgagctgtggaacaactacctcatcctcctcgtcgtctactccgcgtgggtgacccccttcgagttcggcttcgtcccggagcccgccggcgcgctcgccgccgccgacaacgccgtcaacgccttcttcgccgtcgacatcgtgctcaccttcttcgtcgcctacaccgaccccaagacgttcctcctccaagacgacccccgcaagatcgcgctccgctacattaccacctggttcgtcctcgacgtcgtcgccaccatccccaccgagctcgcccgccgcatcctcccaccggacctccgctcctacggcttcttcggcatcctccgcctctggcgtctccaccgcgtcggcatcctctttgctcgtctcgagaaggacaggaagttcagctacttctgggttcgatgcgtgaagctcgtttgcgtgacgctgttcgcggtgcactgctcggcttgcttctactacctcctcgccgacaggtaccctgacccgacgaacacctggatcagcgcctacatgcccaacttccacaaggccagcatctggagccgctacgtcgcctccatgtactggtccatcaccaccctctccaccgtcggctacggcgacatgcacgccgagaacaccggcgagatggtcttcaccaccacctacatgctcttcaacctcggcctcaccgcctacatcatcggcaacatgaccaacctcgtcgttcacggcaccagccgcaccaggaaattcagggacatgatccaagcggcgacgagcttcgcgcagcggcatcagctgccggcgaggctgcaggagcagatggtgtcacatctgagcctcaagttcaggacgaattcagaagggctccatcagcaggagacattcgaggcgttgcccaaggccatcaagtcaagcatctcacaccatctcttctttggccttgtccagaatgtctacctcttcgagggtgtctcaaacgatctcatctttcagctggtttcagagatgaatgctgagtactttgcgccgcgagaggatatcatactgcagaatgaagcgcctgcggatttctacatcatagtctctggtagtatgctagcagggatggccaagtcaggagatgtcgtcggcgagatcggggtcctgtgctacaggcctcagctcttcacagcaagaacaagatcactgtgccagcttcttcgcttggaccgggccgcattcctcaggatcatccagtccaacattgcagatgggacaattgtcatgaacaatcttattcagtatctgagagagaagaaagaaattgcctccattgttgctgtcgcaaaggagatcgatgacatgttggccaggggccaaatggatttcccaatcacactctgctttgcagcttccaaaggggatagcttcttgttgcatcagcttctgaagcgtggattagaccctaatgaatctgatcattatggccgcacagctctgcatatagcagcttctaatgggaatgagcagtgtgtcaggcttctgttggagaatggagctgattcaaattcgagagatccagaagggagagtgccactgtgggaggcgctgtgcaggaggcaccagaccgtggtgcagctgctggtggacgccggcgccgacctgtccggcggcgacgcggcgccgtacgcgcgcgtcgccgtcgagcagaacgacgccgcgctgctcggggagatcgtccggcacggcggggacgtgtccggcgcgtgctccggcgacggcaccaccgcgctgcaccgcgccgtcctcgacggcaacgtgcagatggcgaggctcctgctcgagcacggcgccgacgccgacgccgaggacgtcaacggcctcacccctcgcgccgtcgccgagcagggcggccacgccgacatgcagctcgcgttcgcgtcggcgacgcgccacgagccgcgcaaggctcggccgccaccgccggcgtcggcgatcgtgccggtgccgctccgcgacggcgtggactcctcgccgtcgtcgtcgtctcggcgagggcgcacgtcctccacctccgccgcctccgcgcgcagcacgccgcagcggatggccaacttccgcaactccctcttcggcgtcatctcctcgtcacacgcgttccatcacgaaggcggatacaggggcggcggcggaggcggcggcgccgccgccgagagggagaggtcgtcgagctcgccgccgctggtgagggtggccatctcctgcccggagtcgcgaggcgggaaggatcacagcagcaagctggtgttcatgccggagacgctgcgtggtctcctcgagctcggcgcggcgaggttcggggtgtcgccgacgagggtggtgacgagcggcggcgccgacgtcgacgacgcgcggctcgtcagggacggcgaccacctcctcctcgtcactgacaagtgggtcccacccgaaaatcgtagtaggaatcaatag

SEQ ID NO: 18687 - DNA, 2703 bp, Oryza sativa
  Clone ID: PAT_MRT4530_24221C.1
atggtactcagcgttgggcagctgctcggcgaggagtatcgccagctccgcggggtcggcggcgaggtcgctcagctgcgcgacgagctggccaccatgaacgccctcctccgcatgcagtcggaggccggcgagggcgccgtggaccacttcgtacgggagtggatgaggcaggtctgcgaggtcgcctacgacgccgaggactgcatcgacctctacttctgccgctgccgcgtcaggttgcagctgagtgacggcgtgctcagctgggccaggcacctggcctccacgctctttccgcggcgccgcctcgccggtgacatcaaggctctccgcgcccgggcgatcgagatcagcgagcgccacgcccggtacggcgtcaaccgcgaggaacttcgcggctggactgtgtctgctgctgctctggtccccgcgacagcggcggctttccacccagctgcctgtggctctgaccagttggtcggcatcgagggccaggctaacacactggcggacaagctgaaggcggtggacgaaagcagcaatctgaaggtgttctccatcgtgggcttcggggggctagggaagacgacgctggccatggaggtgtgccggaagctggagtcggtgttccagcgtcaggccatggtgtcggtgtcccaggcgttcgacgccagcaaggacctgcaggtactccttaagcgcatcattctgcagattatcaaaccgaaaaagagtaacgagaacagtatcaacgaagagcagtccaccggtgacatcgacagcatggatgtgagcacgctgttccaaaagctggaagtgagtctcactggaatgaggtacctcattgtgatcgacgacgtctggtccacatcagcatggaatgcaatccaatcaaaattgccagagaacaattgtggcagcataatcatggtaaccactcgggtagaaactgtggccaaagcaagcagttcaccgagtgtttctggagattatatgcacaagatcaatcccctaggtgaaaaggatgcagagaagctgttcgtgagcagagcatttggctacaaggagtcatgctgccccgaggatctgaaggaacaaatgaagagtattcttaaaaaatgtgccaggctgccattagccattgttagcatcgccggcctcctatcaagctacagatcatcgtcatcagggagcataaggatgtggcagagaatttctaactccattggttctcagatggagatacacccaactctagaggggatgaagcagataattgcacttagctacaaccacttgccccatcatctcaaggcttgcatgttgtatcttagcatttttccagaggattatgtgaccaagaagaagcggctgctgctcagatggatcgcggaaggctttgtcatggagaaacggggattgaccatgttcgaggttgcagaatcttactatgacgagctcgtaagcaggagtttgattgatgcagttagggtccgtttggatggaaccgtgaaggcggtgaaggtgcatgatatgatgctggaggtcatagtgtccaagtccctggagaactttgtcaactttttaggagcccaatacggcggagggacaccatcctacgacagcgtccgccgcctcgccatccatggagacggaggccccaagcatgtcgtggatgtgatgagcgcaacacacgtccggtcgcttagcacgtttggggctcaagggaatattgcagtgctccatcgcctcgcagagttcaccctgctcaaggtgcttgacctagaagactgcaaggaggtgaaagactgccatgtcaagtatatctgccggttgtttctacttaggtttctgagcttgaggaacactgatgtgagcaccatttctagccagatcagcaggctgcaacatttgcaaacgctcaacttatatggcacccgcatcgaaaatctcccaacatcggtgactatgctagagagacttgaatatctcttcttctctgagaggtggtcgatgcgtcgctgggaaattcccgttgggctgaagaaaatgatggcattgtgcacgctgagaacgatacgcctcccgaatgacccgaatgttgtcaaagaaataggtgccctggcacagctgcagactctcgatatcaccattctcaactccagcgaggaggtccttgcaaatctggccgatgcgctagataagaccaacaacctccggtcgctctacgcctacggtacaggaaaagatgagcacaaggataggttgctaaacttcctcctccgcctcaagacgccgccgcttctcctcgagagcgtgaggatcgacggggtcatggaccaactgcccaagtggttcaattcactgctgcctaacctggcgagcgtttcccttgggtatgacagctgcactgatgatgagctgcttgtacgttccgccttcaaattccctgcactcaaaagcttttatgtggacccttacattatgccgagagctatccgatttgagaagtcaaccatggaaaaaatcgagaccttcagagtgtttttctatgacaatgatgggactgggagaccgatccttgccggcattgagaacttgacaagcctcaagaagctggaagtgctcacccatagcataaatgctgagatcgagattctggaatggctcaaagttgagagagccaggcaccaagtttga

SEQ ID NO: 18688 - DNA, 550 bp, Oryza sativa
  Clone ID: PAT_MRT4530_24222C.1
gcaagtcagcctacgagtgcttctttgttggtacagttagatatgcacattggagaaagatttggaagaattgggcgccattgagatgcaagttctttacttgtcttgtgtttaacaaccgatgttggacagtggaccggcttgccagcacagggctgtcacaccgctctgcctgcgcgctttgtgatcaggcagaagaaaccatccatcaccttcttgtggaatgtgatttctcttggcaagtttgatatataatcctccaaaggatgggactggcccatatagccccaggtccagatacaaccaacttatcaaggtggtggtcaagggcactgagaggaagagacaaagacaccaagaaaggacttagctctctcatcattctggtgttgtgggagatttggaagcataggaatgactgtgtttttaacggtgataacccttgtgtagctactgtcctccaaacagtggcaaaagagtgtatcatgtggtcgctagctggagcttctaggctaaaggagttaattgataggtcaatagcccctcagag

SEQ ID NO: 18689 - DNA, 4499 bp, Oryza sativa
  unsure (1)..(4499): unsure at all n locations
  Clone ID: PAT_MRT4530_24223C.1
tcaaaccatgccaaaaggatgaattatgcccaattcaccacgaaaaaaagtaaattgattagaatccaaaggtttagtgaaaatatcagcaatttgcaacttggtgtccaaaaactgcaattcaacatctcccttctcaacatgatccctcaaaaagtgaaaacgaatatcaatgtgcgttgtgcgtgagtgttgaacatgattcttagcaatattgatagcactagtattatcacaaaagaaaggtactatctcaaaagtaagaccataatctttcaaagtagataaaagccaaacaatatgtgaacaacaactagcagcagcaacatattcagattcagcagttgattgagcaacactagattgtttcctcattattcgcttaaccgcttgacgatgtgaaacacgaggagaagcttgaaagcgtgcacacaaccacgcagccaaattgtatgtctggccttcgtttgatgcacaaaagtacttgaggggttgcttgatttgcaatcccaaaaagtacgataactcacccatcatgctcatctcaaattccctgtgcatagtctcagcaaaatctacaaccaaagcgtgagtcgaacaaccaaagatgatatcatccacataaatctgaacgaacggttgattatcactatgcttaagaacaaaaagcgttttgtcaacctttcccattgtaaaacctttcgcaagcaaaaagttcttaagcctatcatagcatgctctaggagcttgtttcaagccgtacaaaactttagacaatttaaaaacatggttgagaaaatcaggattttcaaaacctagtggttgtttgacataaacttcctcctgtataaaaccatttagaaaagcacttttcacatccatttgatacaatttaaaaccttttgaagcagcaaaagccaacaaaagtctaattgcctcaattctagcaacaggagcaaaagtttcatcaaaatccaaaccctccaccttagaccttgtagtccgctcacctatattaccaatgatttgttctggtggatgtcgtcgttgaatgtgcaaaggagcagcgacttctgaagttgatccacgttctgtatcagtactggtcgaagtagtaatctccggaggaccatctcgatcagcatcaacagtacccgaacccgacgtccttagccggtctgaccacacctcctgtgccggtctgaccagatgtgtgccggcggtctgaccggcctggcgcccggtctgaccggccgagccgacctcatcgtcgtcgttgtcgtcgctctcatcttcaaaaatacgaccatcctccccctgaacctgtgacagtgtacctgcaatgtcgggtctagtacctggactagcctcatcaaaagaaatttcgcaagtctcaacaattttgttagtctccaaaataagtacacgatagccatgagtatgtgcggggtaaccaagaaacaatccattggtagaacgtgactcaaacttacccaaatttctagatttcaagataaagcacttgcaaccaaaaacacgcaaatttgaaactttgggttgacatccaaatcggagttcataggaagtttttccaagttttgatctcaagaaaacacgatttgaaatataacaagcagtgttaattgcctcagcccaaaattttctaggagttttatattcatccaacatcgttctagccatctcaaccaaaacacggtttttcctttcaacaacaccgttttgttgaggaacacgaggagaagaatattcatgttcaagaccacgaaactgttgaaaagcttcgtccttagttgccataaagaaaacccaagaatatcgagaaaaatcgtcaacaataaccaacacataccactttcctccaacagattgcactctagctggaccaacagtgtccatatgtaatagctgtcccggtgcatccgtcatcacagaaacaataggagcatgtgaagaagcaaccatcttagcatgacgacacggtgtacaaaccaaatcaagatctttcttaagcttaggcaaaccacgaacaagatccaaatgacttaaccaagtgagatgatcaaaaccaacatgtccaagtctacgataccaaaacatcacatctttatcaaacttagcaaccaaacatgttatcacaggtgaaataggattttcaaaatcagctttaaacactcttccatagcgagaaatattcaacacagaatcaccacaagaatcaaaaactttacttccagttttcttaaagtgaacctcaaaattttcatcaacaatttgtgaaaccgaaagcaaattgtactttaagtcctcaaccaaagctacattcttcaattcaaaattttcatttaccttaaccaaacctgtagcgagaacggcacttgtagaagcatcaccaaagataatcgattcagtcttggatgccttcatctctagcaccagcaccttagattgatctaaaatcatgttgagattctttttaccatcagaaaatcttagcaaagaatttttcaaataagagacctctttttccaaattagcacaattttcacaatctaccatgacacctttgcttttatgacatttagggcaagaaagcacttcattgtttttcacaacatcttccatgtactcaacacgacctaaagcatctttcagtttcatcttattcaaattacatgttgagcaatccaaaacatcatgaggttgttttaactttttagcagaaatcatgttaaacatcaaactagcatgaaaagcaatttgatatttttgcaacaactttttagttaaaaacaactcatccaaagtgcgtgtgtgcaaagcaaaactacaagcaagagaagatctatttttcaaattatgtgcagcattaacatctctaatttttgaaatctcattcattaaaacctcacaatttttccaatcatcatcattaggaataagagattttaatctagcaatttcagaattaagagattcaatgataaattcctgttttctatacatcttctcacacttcttattttttgcacttaagatattagtaacttcctcaaaagcacttacctcatgatcttcatactctatatccgattcaccacgcgccatgaagcaaacaccagagatgttctttccctcatttttcatctccactctcaccatccttatcgtccctcctatttctcccaagtttaggacaatgcgaacgaaagtgatccgtagcaccacattcaaagcaacgatttggtccacctcttttcctgtgccgtcggtctgaccggtgtagatcaaatggtccgaccgccctgagatcgcctgcagctccctgtcgcagtcaccggtcttaccgccttgcgcccgccggtctgaccgccgcaatgccgccggtctgaccgctggtgtgtcgccggttagaccgccgaaacccggtgaaacacaaatcgaagaactcggtctgaccggcagcacctgcccagtctgaccggacccaatccagcagtacctgtagatcacccctcttgcatttgcactgaattttttgcccttcttaagaggtggcttcttaagaggccggccttcttcctcgctgccgcactttgcgcggcctgccgcccgggtggtcgccatcaccggtgttagccggcctccaatcgcccaagacaccaccaccaccacactcgccacctccacgcgacctcgttccgtgtaacaccctgaaaattccgccgccgcgtcatgtcgcgtcgccgtcgccgcgccgtctccaacccgccgcgtactgtcgccgtcgccgtcggctgcgccgcgccgagccccatgcgccgtcgcgtcgtcatcaccgttgtccgcgcttgcatgccctgcaggttcgactctaaagaatcccctctcccttcttccccacaccctcttggctgccatcacaaggccccaaaagcccccgagctcgtcctcccctctcagccactcctcctcccttctacacatttcatcgaacatcttgtgggcgtgctgcatcttcttctctactccacggccgcgacatcgaacttcgtcgttcgtccacccctcggtggtctgcaggttgcagctcaacagattgatgatgaagtaccaatcaggatcagtaaacttttctctgatttcgcctgattaattatgcgggtgatcagaaagtaaatgacatacaactcctatcttccagtggttcagaacatctctactgcaatgaacatgctgtcaatatgcagttgaaggtgcaaaagaacaccacggaatgaaaagagatagccatttgcatatccccgtgggtccattcttctaatatatttttgcggacggacanaagagttngcacaccatatatttctngtaatatatttgcggggcaatccctttgcgngtcgggaaaatatccccgaggtcctgggttatggcatggaantcccgntcctntgcntccgggcaacctgggaccttgt

SEQ ID NO: 18690 - DNA, 5119 bp, Oryza sativa
  Clone ID: PAT_MRT4530_24224C.1
tcaaaccgtgccaaaaggatgaattatgcccaattcaccacgaagaaaagcaaagcgattagaatccaaaggtttagtgaaaatattagcaatttgcaactttgtgtccaaaaactgcaattcaacatctcccttctcaacatgatccctcaaaaagtgaaaacgaatatcattgtgctttgtgcgtgagtgttgaacaagattcttagcaatattgatagcactagtattatcacaaaagagaggtactttctcaaaagtaagaccataatatttcaaagtagataaaagccaaagaatttgtgaacaacaactagcagcagcaacatattcagattcagcagttgattgagcaacactagattgtttcctagaagaccatgcaatcaatgatttaccaagaaaatgacatgttccactagtacttttcctatcaattctacaacctcgaaaatcagcatcagaatatccacttaagcatatagaagatgaagtagaataccaaattccaaactcaagtgtatgattcaaatacctcattattcgcttgaccgcttgacgatgtgaagcacgaggagaagcttgaaagcgtacacacaaacacacagcaaattgtatgcctggcctagaagcagttaaatacaacaaagatccaatcatacttctatattccttttgatcaacagcttcaccatcttcatcagaatccaacacaactgtagaaccaattggtgttgaaattggcttgcaattctccatcttgaaccgtctcaaaagatccttcgtatacttcgtttgatgcacaaaagtaccttgaggtgtttgcttaatttgcaatcccaaaaagtacgataactcacccatcatgctcatcttaaattccctgtgcataatctcagcaaaatctacaaccaaagcatgagtcgaacaaccaaagatgatatcatctacataaatctgaacaaaaagttgattatcaccatgcttaagaacaaaaagcgttttgtcaacctttcctattgtaaaacctttcgtaagcaaaaagttcttaagcctatcataccatgctctaggagcttgtttcaagccatacaaagctttagacaatttaaaaacatgtttgggaaaatctggattttcaaaacctggtggttgtttgacataaacttcttcctgtataaaaccatttagaaaagcacttttcacatccatttgatacaatttaaaaccttttgaagtagcaaaagccaataaaagtctaattgcctcaattatagcaacattagcaaaagtctcatcaaaatccaaaccctcaacttgagtaaaaccttgagcaacaagtccagctttatttctcacaatcaaaccatcctcattttgtttatttttgaaaacccacttggttccaataatattatgtccagaaggtggttcaactatagtccaaactttgtttctctcaaaattttcaagttcttcatgcatggcattaatccacgatttatcagttaatgcatgtgacacatctttgggttcaaaagaagcaacaaaagcagaatttgcacaaatatcatgagccgttaccttagaccttgtagtccgctcacctatattaccaatgatttgttccggcggatgtcgtcgttgaatgtgcaaaggagcagcgacttctgaagttggtccacattctgtatcagtactggtcgaagttgtaatctccgaaggaccatctcgaacagcatcacccgaacccgacaaccctggccggtctgaccgctcctcatgggtcggtctgatcggaggtgcgccggcgatctgaccggcctggcgcccggtctgaccggctgagccgacctcgtcgtcgtcgttgtcgtcgctctcgtcttcaaaaatacgactatcctccccctgaacctgtgacagtgtacctgtaatattggctctagtacctgggctagcctcatcaaaagaaacttcgcaagtctcaacaattttgttagtctccaaaataagtacacgatagccacgagtatgtgcggggtaaccaagaaacaatccatcggtagaacgtgcctcaaacttatccaaatttccagatttcaagacaaagcacttgcaaccaaaaacacgcaaatgtgaaagaccattatcacttcgaattattttcaaagaaccaggaaattcaagctccaatcgaagaaacaaaccacgaaagtgttgaaaagcttcgtctttagtttccataatgaaaacccaagaatatcgagaaaaatcgtcaacaataaccaacacataccacttttctccaacagattgcactctagctggaccaacagtgtccatatgtaatagctgtcccggtgcatccgttatcacagaaacaataggagcatgtgaagtagaaaccatcttagcatgacgacacggtgtacaaaccaaatcaagatctttcttacgtttaggcaaaccatgaacaagatccaaaccacttaacctagtgagatgatgaaaaccaacatgtccaagtctacgatgccaaaacatcacatctttatcaaacttagcaaccaaacatgttttcacaggtgaaacaggattttcaaaatcagctttaaacactcttccatagcgagaaatattcaacacagaatcaccacaagaatcaaaaactttacttccagttttctcaaagtgaaccacaaaattttcatcgacaatttgtgaaactgaaagcaaattgtactttaagtcctcaaccaaagctatattcttcaattcaaatttttcatttaccttaaccaaacctatagcgagaacggcacttgtagcagcatcaccaaagataatcgattcagtcttagatgccttctttagggaggagaaccaatttttatcactggtcatgtgtcgcgaacaaccggaatccacgatccacacgttctccttccttgccaccaaagccacttctagcaccaacacctttgattgatccaaaatcatgttgagattctttttaccatcagaaaatcctagcaaagaatttttcaaataagaaacctccttttccaaattagcacaattttcacaatctatcataacacttttgcttttacgacatttagggcaagaaagcacttcattgtttttcacgacgtcttccataaactcaacacgacctaaagcatcttttagtttcatcttgttcaaattacatgttgagcaatccaaaacatcatgaggttgttttaactttttagcagaaatcatgttaaacatcaaactagcatgaaaagcaatttgatatttttgcaacaactttttagttaaaaacaactcatccaaagtgcgtgtgtgcaaagcaaaactaaaagcaagagaagatctatttttcaaatcatgtgcagcattaacatctctaatttttgaaatatcattcattaaaacctcgcaatttgaacaatgatcatcattaggaataagagattttaatctatcaatttcagatttaagagattcaatgataaattcctgttttctatacatcttctcacacttcttattttttgcactcaaaatattaatagcttcctcaaaagcactcacctcactatcttcatactctgtgtcagattcaccacgcgccatgaagcaaacataggagatgttctttcccttgtcatcatctccactttcaccatctacatcacttagtggctcgaaggcggcgcaaacttgttgaaaagccttcctgagattgtccagcttcctcccttgggatgaacacttcgacttgttgttgggcttgtagttgttggtcttctcaccatctttgtcttctcttttgcctctcccaagcttaggacaatgcgaacgaagatgatcaattgaaccacattcaaagcaacgatttggaccacctcttttcctgttcctggcattattcatagctcgagcaattctgttagcaactaatgccaaatcctcctcctcgatttgttcgagttgatcatcggatgtggcattaaaaacagcaagaaaagaagacttagatgaagaagcatcaacatccaaagaggaaaccaaagcactcgacttagaatcaacttttcgagaaagaacattcatctcatgtgttttcaattttgtataaagtgaatccaaagtcaaagtagacatgttaatagattcctgaatagatgtaactttcatctcccaaatagacatgccaacaccattgaaaaagtggcgagaaatctcagattgtagataattagcatcataagaagaatcaacagatctaagatcactcaaaattttattaaaccgagaaagatagtcatccaaagcttctccaggtttcatctcaaatttaatatactcctttttgaaaagatcacgacgaagttctttaatattatttgttccttgaagaaaattactcaaagcagtccaaatctcatgagcagtttgaagatgagcaacacgatcataatccgaacgagaaataccactcaaaagaatattgcgagcctcgaattctacggagatcggtctgaccgaagttgatctgccggtctgaccgagtggatgccgctggtctgaccggtgttgaacctccggtctgaccgccgaagtcgcctgccgtgcctgtcgccgccgctggtctgaccgcccatatgccgccggtctgaccgccgcttgccgccggtcagatgctccccctctatttatacatgaggtaggcagcccaaagccacgaaccaaactcatactaggagtcctaaacaccttaggaaacccactagtacaagaaagaaactttacataaccaattgtaccaaatttgaactccttccaaatttaactccgcatcccatacacacacaataactccatcgtatgccatatgaaatctccatcaaccacgtgcatcaactctagccggctaccagagcccggtctgaccggtccacataaaatgataacctgtagattcacctgtgaaatccgatcatctccaaaaccacttcgtgaataaattccaaataacaaaaccgataatctccaatgcccaattgttcatcacagaataataatcaaaaacacctttgattttaca

SEQ ID NO: 18691 - DNA, 1687 bp, Oryza sativa
  Clone ID: PAT_MRT4530_24225C.1
aacatttttgttagtctccaaaataagtacacgatagccacgagtatgtgcggggtaaccaagaaacaatccatcggtagaacgtgcctcaaatttgtccaaatttccagatttcaagacaaagcatttgcaaccaaaaacacacaaatgtgaaactttgggttgatgaccaaatcgaagttcataagaagtttttccaagtttagatcgcaagaaaacttgatttgaaatataacatgcagtgttaatagcctcagcccaaaattttctaggagttttatattcatccaacatcgttctagtcatctcaaccaaaaacacggtttttcctttcaacaacaccgttttgttgaggaacacgaggagaagaaaattcatgtttaagatctctttcattgccaaattgttcaaaagaagcatttttaaactctccaccattatcacttcgaattctattcaaagaaccaggaaattcaagatttaatcgaagaaacaaaccacgaaagtgttgaaaagctttgtgcttagttgccataaagaaaacccaagaatattgagacaaatcatcaacaataccaacacataccacttttcttcaacatattgcactctagctggaccaacagtgtccatatataatagctatcccggtgcatccgtcatcacagaaacaataggagcatgtgaagtagaaaccatcttagcataacgacacggtgtacaaaccaaatcaaagtttaggcaaactacgaacaagatccaaaccacttaacctagtgagatgatcaaaatcaacatgtccaagtctacgatgccaaaacatcacatctttatcaaacttagcaaccaaacattttatcacaggtgaaacaggatgttcaaaatcagctttaaacactcttccatatcgagaaatattcagcacaaaatcaccacgagaatcaaaaactttacttccagttttcttaaagtgaacctcaaactcttcatcaacaatttgtgaaaccgaaagcaaattgtactttaaatcctcaaccaaagttacatttttcaaatcaaaattttcatttaccttaaccaaacctgtagcgagaacggtacttatagaagcatcaccaaagataatcgattcagtcttggatgcctttttaagggaggagaaccaatttttatcaccggtcatgtgctgcgaacaaccggaatctacgatccacacgttctccttccttgccaccaaagcctcttctagcaccaacacctttgattgatccaaaatcatattgaggttctttttaccatcagaaaatcttagcaaagaatttttcaaataagaaacctctttttccaaattagcacaattttcacaatctaccatgatacctttgcttttacgacatttggggcaagaaaacacttcattgtttttcacaacatcttccatatactcaacacgacctaaagcatcttttagtttcatcttattcaaattacatgttgagcaatccaaaacatcatgaggttgttttaactcattatcttcatactctgtgtcagattcgccacgcgccatgaagcaaatatccgagacgttctttcccttatcatcatctccactttcaccatctacatcacttagtggttcgaaggcggcgcaaacttgttgaaaaaccttcctaagattctccat

SEQ ID NO: 18692 - DNA, 567 bp, Oryza sativa
  Clone ID: PAT_MRT4530_24226C.1
atggcgcggccggcgacggcgtggataacggcgacgccgcggagacggaggccgacaacagcggcgttgtgccagcagatcgaggacggtagcatgggcgtgcagatcaggacgagaaggagccgctgcgaggaaagggagacggcggcgcggacgacggcggcggttgcggcgggagacgtcggcactgggggccatgcgagtgagaaagccggaattcatcggagtcacaacacaacactagtgtgttggacttggacttggacggtggagagcgaggtaggcagccatggcggagagtggctatgccggacggagggtaggctaaacttggtgatttccagtgccggtgaaagcgtggtgatgcaaaaaggtgatgcagaagtaacggaagaaacacagtgggagtggaccaaccttgatactgaagaagaagcaatgtgcaggatatggtacggtaaccaaaattcccaatgtgaacgctgcatcaagaaaaagaaaattacaatagcagcctcaacatatgcaactgcgaagaataaacagcaagacattctcacactcgca

SEQ ID NO: 18693 - DNA, 227 bp, Oryza sativa
  Clone ID: PAT_MRT4530_24227C.1
actggtggcacaacactggcccctggtgcaacttgccaacctgctgctgtgcctggtggggttgtgtggttggatgcacaacgtgtgggtgtaaccactggtgactgtctgacgtgaatgaaaggtggttggcatgacctgattcgtggtggccaacactagaaataagaacccttgaataaaatatcaatcattttcagacttcccaaaaaaaaaaaaaaaaaaaa

SEQ ID NO: 18694 - DNA, 162 bp, Oryza sativa
  Clone ID: PAT_MRT4530_24228C.1
ctagttcaactcaatctcagccgatcctagctgtagccgatcaggactccagccgattcctgctctgttccaaaactcgatctccgcctccaactcttcgttgatcaaatcccctttctcccaggctattcccctctcgacgagatccccacccgcggccat

SEQ ID NO: 18695 - DNA, 328 bp, Oryza sativa
  Clone ID: PAT_MRT4530_24229C.1
attcgttcccctccttttgatttcgagcctttgccccggttactcctatcctcctgtggctctttccccttcctctctctcgtgctcctatcaggcggacgccgcgagatcgggaggaggcggacgcggcgggagaggccatcggccatcgccatcgccttcaccatcaccgaccgcgcgccggcagcggcggtgctcgcgactcgcgcggtgtggatttgtggggggcaggggggattcgagtggcggcgcgtttggggttgtcgcgaggcggattccaggggggcgctgtgggagttggtctggggggagagatctgtaagggagc

SEQ ID NO: 18696 - DNA, 523 bp, Oryza sativa
  Clone ID: PAT_MRT4530_2422C.1
atggacatctctagggcaaatgaaagctacacgagctgcggcccggtagtcgagatgtcatggcacagggctggtgtcctgctgctaggggctcagtcctgcctacctgtcccggagccggaagcgacctctgacaagcagagcacacgcctcctgccccgctcgccagctttaccggtggacgcccatttcaaccttcattcaatggccagcgacttccttgccatgcttgcgccgaagcctggactggatctgaccgggactgacataccaactccaggagttagcacgccggctccggcggtctgtgaccggtcacacaccgcgactggtcacggaccggataagcgtgcgctgcgccgcattaaatgcggcgtggcgcactcgtccaacctgccacacacgtggcgccaaaaccacagggggtcggggcaccccagccctcggggccgaaacgggagcggcccgacccctcggggagacagagggaggggtggccacgtcaccgtcgggcccgaccccc

SEQ ID NO: 18697 - DNA, 638 bp, Oryza sativa
  Clone ID: PAT_MRT4530_24230C.1
gccagcgtacaacaaagctcgtcactctcggccatcgtgctcgccgctctcgccgcctgcggtggcatgctggcgctggggctacgcgcgacagcgaaagagttctgccgtgtggagaacgcggtgttccgctaccacagccactcgtgccgaaactacatagcgcggtggtgcggcaacagcgtaggccagatggactcccgtaagcagacccagctacagttcatgtagccaacatcccagtagttcagcagcaggcctatcaacagctcatgctactcgctcaacagtgctgactaccaggccattacacatgaggaaggcgatcgtgctacaggtacgatctgcacaaacgcagtgccgtctactgacatcagactcatgctcaagcacaaactgcgctctccttgatattgccatgcatatcgtggtatcatcaccgtacactactatatgtgctgccaatagcattggcactgatggaggagactgatactgaattgagacaatataatagtaagtatgccaaaaataaagtaatacatcatgatgtgtgactgtagatacttaggtccatataaagataaagtaaatcatttttcgtgataatgataataaaaagaaataaaatgaggaac

SEQ ID NO: 18698 - DNA, 1356 bp, Oryza sativa
  Clone ID: PAT_MRT4530_24231C.1
atggagcagccggaggatccgaaactgaacatggtagacctactacccgacgacgtgctcgccgacatcctccgccgcctcgcgccgcgcccactagccgcgtgccgctgcgtctgcaagccctggcgggccgtcgtcgacggccaccgcttgctgcgcgcggacctcctcccgctgtcactggggggcatcttcatcaacttccacgaggtgttgacgtccttcttcctccgccgcccgtccgcgcggccccctgccgcggcgatctccggcaagttcgaggacttcaccccctccgccgccaggagcaccgtcgtggatcactgcaacggcctgctcctgctccgcagccgctacgtggtcaacccggccacgcagcggtgggcggccttccctgaacccccgccacctcggcccgggatcacgaggagcttctatcatgacgagtacctcgtgttcgatcccaccgtatctccgcactacgaggtgttcctgatcccgagtgttactcccgaggaatttgtgtccaaaaaactgaggccaaaggttgaggaatcagagtggccaccctctccttgcttcttgagtgtgttctcgtcgagcacagggcaatgggaagagagatcctttgtacgtgaaggtgaggccgccgggacgatcgcggatatgagatcgcaaccgctattggaacagtacaacgcggtctattggaaacgtgcactctacgtacatagggaagctaattttgttatgagaatttctccgtcgaaaagtaagtatcaagtaattaaattgcctatagcgcaagatggatatgtggatccttttcttgcaagatcggagaagggcgtgtacctcgcagtacttgatcggtgccatctacgggtttggattctcaacgaatcatgtgagcagatgaagtgggaactgaaatacgacaaggaaattcaactctcgtttcagcgctggaactacgatgaggaaagtgtcggaccatggactttacactacagccgccgtgatgtttatgatggagatgacactaattacaatgcagaagtagcggaaaggaagttcgagtgggactctgacagcgatgatgttctcgacttggaggatagggttcaaaggtcttctcatggtggttttttaatccttggatttcatccttacaaagaagttatctttctagatgaaggatcaagcagaggattggcttatcacttgggtacctctaaggctcaagacttaggtaggttacgccccaattttttcgaccattggcacgtcgaaggcgttaatcggtcgttcgtgtatacgccttgctggattggagagctctctaatgggatatag

SEQ ID NO: 18699 - DNA, 227 bp, Oryza sativa
  Clone ID: PAT_MRT4530_24232C.1
gttactactaggaaaagcattatcgcaagcggccgaaaagggtcttcgcaggcagggcggccgtccgcctgtaagccaacgactgtgaagatcaccgatcttcgcaggcggggcggccgtccacctgcgaagataattttcgcagtcggacgttggctagtccggtccgcctgtgaaaataggaatcgtccgcttgcaaaaaaaaaaaaaacttccgcctgcgaaga

SEQ ID NO: 18700 - DNA, 593 bp, Oryza sativa
  Clone ID: PAT_MRT4530_24233C.1
tcacagccaaacaactttgcacgaatgattaaattgcatctcggaagtactactctattttaaagataatgaaggcttcataatgtgatcaaacttgtttttttctcctgttagtctatctcaacgcatcctaagtgatcatcggttatgagggcctaaacttttgacgttgtagttacttccaatgcatcaatgatcttgattccaatgaaggtcggccattaatgtatgatgatatagcgctggaattgccatttcttgcatggtatttaaaatgcatatatttttcttccattcttttactaccatgtatggtgctatcatggcattgtgctgcatcctgagcaatgttgtgtaaacatcaacatttcatatgtacatgttgccaaaggactcgagtagttcattttctgatcttggttgtaggtcttcttttattttctgtaccatacttactgttagagttaatttttgtgtaatatgggtggagagcgctggaaaggtgatataagcattgagtttcagcgcaatttgacagtgttaatagttttcctagcatggactcatcgctttgatatttacagttattattt

SEQ ID NO: 18701 - DNA, 273 bp, Oryza sativa
  Clone ID: PAT_MRT4530_24234C.1
ttttgcatgctactgtccaccgtacacgggaggcccactcgcagcttcctacgctaggagcaactccccccaaaggacttctggtgcatagtcctactgactcagagaagaccttattcaccatgggagtggccgatcatagccagctcaacctcatgaacgagactgacccagattagcccaccattaccctgagaccagaaaatcgctcatgctcctgagacatgcaacaagggccgccagcctgctccatgtgtgctatcatggaacaag

SEQ ID NO: 18702 - DNA, 2088 bp, Oryza sativa
  Clone ID: PAT_MRT4530_24235C.1
atgggacatgtggagtccagatgggtagtcgtcaacgagaaggaagaaaaagcaaccaaaatcctctctcgcgcgcgccaaatccaccggagatgccgccgccggagacctcgtcggcggcggcgccgtctcctccttcccctgaccccctcgcctccccgctcctcctccacccacgggagcgcgagattgaccccgcctctccccctccccctcccccgccgccagcccccgtggcgggatcagctcaccctccgcggcgtcgccgtcgcggcggtcctgggttcgctgctgtgcgtggtcatccaccgcctcaacctcaccgtcggggtcatcccggcgctcaacgtcgcctcgggcctcctcgccttcttcctcgccacggcgtggcgtggcgccgccgcagtgctagggctcggccaccaccgcgggaggccgttcaccaggcaggagaacaccgtcatccagacctgcgccatcgcctgcggcagcctcgccttcagcgggtgctcgtcctcgtatatctttgcgatggaccggaagacgtatgagcttgtgggacaagactatccagttcatacacgttacactgtaatggtaattgattataagctcgcattccctggtgggactgcaacagctctaatgattaatagcttgcatggaaaaacagaagccgatcttgcaggaagaaaagttcattgtctagtcaagtacatgagtcttagttttggctggagcttctttaagtggttcttcagtggagttggtgattcttgtggtttcgacaatttcccatcgtttggaattgaagcttttaagaacacgttttatttcaactttaatcctagttatgttgggtatggtcttatttccccccatattgtcaactgctcagtttttcttgggtcagtcatatcttggggttttctttggccatttatcgctaagcaagctggtgattggtacccagataaccttagtaacactgacttcagaggcctatatgggtacaaggttttcatagcaatttctgtcatacttggtgatggcctctacaacttggtaaaagtattccttattattgcaaaggaaatatgtaatgcacgatcaaaagaacatgacctacctgttcaagctctacttcaagatgatgacagttccagacaattattggacgagaaacgtcaaactgagatattccttaaagacagcatacctacttggcttgctgtttctggttacattgttcttgcagcaatatctaccgtggctgtacccatcatatttccccaactgaagtggtaccttgtccttgtctgctacttccttgctcctgccattgccttctgcaactcttacgggatgggcctcacaaacttgaaccttgcacccacatatggcaagattgccctcttcgtgtttgcctcgcttgttggcagtgatggtggtgtcattgctggccttgcagcatgtggtgtaatcatgtcaatcgtctgctccacagcggatctcatgcaggacttcaagagcggctatctcaccctctcctcgcctcgatcgatgttcatttcccagatgatcggtgtcgccctcgggtgcataatcgctccactcacactctggctcttctggacagcgtttgacatcggtgaccctgacggcgagtacaaggccccatttgccatcatcttcagggagatggccatcatcggcatcgaaggctttgcggcgctgccaaggcactgccttgagatctgctgtgtgttcttcttggcagcactgatcatcaacctcatgaaggatgttgtaccaaaccatgtctccaggttcatccccattccgatggcgatggccgtgccattctacattggcgcgtatttcggcgtggacatgttcatagggacattgatcctgttcgcctggcagaagatagaccggagagaggctgatgactatgcggtggcagttgcgtccggcttgatctgtggagatggggtctggagcattccttctgctgttctgtccatcctgggagttgatccaccgatctgcatgtccttcaggccatcttcagcttctgtatga

SEQ ID NO: 18703 - DNA, 627 bp, Oryza sativa
  Clone ID: PAT_MRT4530_24236C.1
atggagggcggcggtgctgcagatctacaggatggcgttgtagggcggcggtggtgcctgatgtcgctgttcggctggtgtgcagcggtgatgcgcgatggcacggtaggcaaggaggcggcgttgctgaacgacgcggcagtgaagtggacatctacaacaagtggttcaattggtaacatatttcctaccttcctgctcaatatccatgcgtccaccgtgccaaggaggcctctcaggtcgtcggccgactcggggacattggtgctggtgaccggcgccgccgagttcgtcgacacccactgctcccttgcgctccacaagcgcgacgacggcgtcggcatcaacgactactgcctcctcgccaagctcttcggcgtcgtcagcatcaacgacggccgcttcctcgctaagttcttcggcattgtgccattcacgcacgtgctccacctcacggtgcagcaccatggagaacctggcaaccggcgacaacagagagacgtcaagagggcgaaggcctcctcggccacagctgaccaacgaccattgtcacactggcccgccaccgactacttcctcgactgccacaccctaccgtcggttgcccactgccgcccctgcagaccg

SEQ ID NO: 18704 - DNA, 456 bp, Oryza sativa
  Clone ID: PAT_MRT4530_24237C.1
atgacaacgagaatctcctcagtaggcggcgcaccacatttgaggcactgtctgggctttggaccttgcgtcggagcaacagatgaagctacggttcatcatggacaggcgacgttgccgctcccgagggcggtactccggtacgagtacatgaggtggggggagccaatgatatccgaccccgtcacgctgttggagaaggaggtgatccctcttcctaatgcacggcaaggagagaaagagcatcaatgtcttgcttggccttccaacatctttcatggatgtcttccaagtgctcatggacgggggagggcgcgtgacacgggggagggggagggggatggggaggggggagaggagggagaagagttggccgctagcatgcatatgcatgtctcacatgagtccaactcatcacgtcagccaaacctggccactatgctgctgaaagattaa

SEQ ID NO: 18705 - DNA, 411 bp, Oryza sativa
  Clone ID: PAT_MRT4530_24238C.1
cggaggccgagcctgccaggaggcggcggcggctcgggttctgagtgggaaatcaagccatcgcctgcggcagcctcgccttcagcgggtgctcgtcctcgtatatctttgcgatggaccggaagacgtatgagcttgtgggacaagactatccaggtaatccgatggaagacataagagatccttctcttggttggaataacgggtttatgttcctaatcgctctcatcggtccatttagcattgtaatgctgcgaaaggtaatggtaattgattataagctcgcattccctggtgggactgcaacagctctaatgattaatagcttgcatggaaaaacagaagccgatcttgcaggaagaaaagttcattgtctagtcaagtacatgagtcttagttttggctggagct

SEQ ID NO: 18706 - DNA, 323 bp, Oryza sativa
  unsure (1)..(323): unsure at all n locations
  Clone ID: PAT_MRT4530_24239C.1
aaagaataattagttacacattagcattgatttatgaggagcatacatcatacaacagttacaactttctcgtacaagtagcgaaaagtacagatgctttaactttcaactgcatgaggttttgtaactgctactatttcacaagtatagtaacatttttatantcttgtacaaactgtatgtattgccgtttgaagttttgagttcctcagtttaccatcatatcaaggtaagatcatgtaatctttgttttgttttatcatgttgatagttcatcgcagtcatcgtatggaggagccaaggtactttcagctggtaaaact

SEQ ID NO: 18707 - DNA, 1428 bp, Oryza sativa
  Clone ID: PAT_MRT4530_2423C.1
atggaccatagctcttcagaagaatctgatgttagtgattcagatattggtgtgcacgaggaaaagacttataatcaactgagagccgaaaaagtgaaagtgaagcatggcaacaacacatttcgttgcccattctgcccagggaagaagaagcaggattacagctccaaggatcttctgcagcatgcctcaggagtaggggctgcttcgaagcgcaaggcgaaggttaaggcgacacacctagcacttgctcgctatctgaaggttgatctagctggctcactggaatcatcaccacaacttgctaccgttgagcatcaacctcctgggagtgaagagaagtatgtatggccatggatgggtatactggttaatctgccaactgagttgaaagggaaaggatttgttggggaaagcgaggagaggctaagagcacaattctcacgattcaaaccactccaagtaactatcctttggaattcaacagacaatgcagattatgctatcgtgaagtttgctgaaaactggaatggaatgaaggatgcattggcttttgaaaagcatttcaatgtggagaggtatggtaaaactgattggaacaaaataaactgtagaagagatgatctttttgggtgggttgcaagaagtgatgactataactctcttgagccaacgggaaagtacttgaggaaaaatggagagcttaaaggtgtatgtgatctggaacatgaaggccagcgaaaaatgggcaggcatgtgggtcattatgcttgccaaatcgaagagaagaacaaatacttagaagagttgaagcttatgaacaaccaaaatggcctaaaacttgaaaggatgatggaagagaaagatcaattgtttgaagaacataatagaaatataatagaactgcagcagcatgcttgcaaagattcaaagagaataattgatgaaaacctaaatctgtatgaagaactgcaggctaagaaacatgaaattgaccggagatgtaaggaacttaattatttggctacaaatactaatattgacagaggaaaactcgtagcagagaaagaaaagaatgcaaaggagaatgagcttcttaatttagcaaatctaaagcagaaggaggcagatgaagagcttttgcggcttgttgagaaacacaagccggaaatgacctctgacaagcagtacacacacctcctgctccgctcgtcagctctcccggtggacgcccgtttcaaccttcattcaatggccagcgactttcttgccatgcttgcgctgaagcctggaatggatctgaccgggactgacataccaactccaggagtcagcacgccagctccggctagagacgagagccaggaagctctcatcattccgacgggacggggcgaggcgtgcgacaggccgcctgttgccacctaa

SEQ ID NO: 18708 - DNA, 356 bp, Oryza sativa
  Clone ID: PAT_MRT4530_24240C.1
acaaaatccaaccaaacatagaacgtagaggaagagaaatcgaacgagaagaataataaaaaccgcacaaattccgtctttagtccgtgcattgcgcactctcctccctctgattcataccgctctgaacattcccacaaaccatatcccaatatcattcacaaattctaatcccaataaacttaatatcccaattcccaaatccaattcgaatatcagcgcaaaaaaaaaatattccaggaaagggaagataattccaaccatttacattatgtaggagggtagggggtgagccgggaaggtctttctgcttgatccttggtcccaacttttcttgctttgccacccttgtccgt

SEQ ID NO: 18709 - DNA, 295 bp, Oryza sativa
  Clone ID: PAT_MRT4530_24241C.1
ccggccggggcctaattccgacagccgccgcctacttcctgtcctcgatctacctacctatagtagcctcctccctcggtcgcgtccgctccggagccatgggggcctactgcggcatgtacaaggcacgagctagtcaagagcgctgcctacattggcactagtgacaagagtatccttgctgtcggtgagaacactggcaccattggcaagctctacggcagcatgatggtacaaaacggtgttgagaagccgccgatgccttcgtgaactcctcctgctgcacccgtggcgc

SEQ ID NO: 18710 - DNA, 2810 bp, Oryza sativa
  Clone ID: PAT_MRT4530_24242C.1
ccaaaaatacgaccatcctccccctgaacctgtaacagtgtacctgcaatatcgtgtctagttcctggactagcctcatcaaaagaaacttcgcaagtttcaacgattttgttagtctccaaaataagtacacgatagccacgagtatgtgcggggtaaccaaggaacaatccaacagtagaacgtgcctcaaacttgtccaaatttccagatttcaagacaaagcatttgcaaccaaaaacacacaaatgtgaaactttgggttgatgaccaaatcgaaattcataagaagtttttccaagttttgatctcaagaaaactcgatttgaaatatagcatgcagtgttaatagcctcagcccaaaattttctaggagttttatactcgtccaacatcgttttagccatctcaaccaaaacacggtttttcctttcaacaacaccgttttgttgaggaacacgaggagaagaaaattcatgttcaagacctctttcgttgcaaaattgttcaaaagtatttttaaactcaccaccattatcacttcgaattcttttcaaagaaccagaaaattcaaaatctaatcgaagaaacaaaccatgaaagtgttgaaaagcttcgtccttagttgccataaagaaaacccaagaatatctaaaaaaaatcgtcaacaataacaaacacataccactttctttaacggattgcactctagctggaccaacagtgtccatgtgtaatagctgtcccggtgcattcgtcatcatagaaataataagagcatgtgaagaagcaaccatcttagcatgatgacatggtgtacaaaccaaatcaagacctttcctaagtataggcgaaccacaaacaagatccaaaccacttaacttcgtcagatgatcaaaaccaacatatacaagtctacgatgccaaaacatcaaatcttaaatgaatttagcaactaaacatgtgaccacgggtgaaacaggattttcaaaaccagctttaaaaactcctccatagcaagaaatattaaacacataatcaacaatttgtgaaactaaaagtaaattatacattaagtcctataccaaagctacgtctttgaattcaaacttgtcacttaccaagacagataccgtagcaagaaagatagttgaagcatctccaaagataatcgattctgtcttggatgcttgtttgagggaggagaaccaatttttatcactggtcatgtaccgcgaacaactggaatccacgatccacatgttctccttcctttccaccaaggccggtgtcctcgagggaaaaccaaatttttgccactttgattttgcaaaagcaatctctctcttctttttctgtttatgagctaatctcaccacttctagcaccaacacctttgattgatccaaaatcgtgttgaggttctttttactatcagaaaatctttgcaaagaatttttcaaataagaaacctctttttccaaactagcacaattttcacaatctaccatgacacatttgctttcacgacatatggggcaagaaagcactttgttgtttttcacaacatcttccatgtactcaacatgacctgaagcatcttttagtttcatctcattatgttcaaactctatgtcagattcaccacgtgccatgaagcaaacatcggagatgttcttccccttatcatcatctccactttcaccatctacatcacttagtggctcgaaggcagcccaaacttgttgaaaagccttcctaagattctccatcttcctcccttgggatgtacccttcgacttgttgttgttgggcttgttgttgttcgtcttctcaccatctttgtcttctcttttgcctctcccaagcttaggacaatgcgaacgaagatgatcaattgaaccacattcaaagcaccgatttggaccacatcttttcctgttcctggcattattcatagctcgagcaatacggttagcgaccaaagccaaatcctcctcctcgatttgttcgagttgatcatcggatatggcattaaaagcagcaagaaaagaaggcatagatgaagaagcatcaacatccaaagaagaagtagaagaaaccaaagcagtcgacttagaatcaacttttcgagaaagaacattcatctcatgtgttttcaattttgtgtaaagtgaatccaaagtcaaagtagacatgtcaacagactcctgaatagatgtaactttcatctcccaaatagacatattaagaccattcaaaaagtgacgagaaatctctgattgcggataattagtatcataagaagaatcaataagatcactcaaaattttattaaacctagaaagatagtcatcgaaagcttctccaggtttcatctcaaatttaatgtactcctttttgaaaatatcacgacgaagttgttttatgttatttgttccttcatgaaagttactcaaagcattccaaatctcatgagcagttcgaagatgcgcaacacgatcataatcagaacgagaaataccactcaaaagaatgttgcgagctttgcaattttgttcaaaagcagttttttcagcagcagtattaatagcttcaggaatcacataaggatgagaaacttttctccaaagatcataattctcagccataattgtcacaccctcctctctccgccgccaccctcgccttagcccgccgccgtctgtagcgccgcctccgcgtgagctcttgcgccgccgtcgccgccgtttgtccagccgtgcaccgccatcgctccggtcgtcgtcatcgctcgggaaggccgccat

SEQ ID NO: 18711 - DNA, 374 bp, Oryza sativa
  Clone ID: PAT_MRT4530_24243C.1
gaaagggcggtcaacaactttgtttaaaacatagggggcggggtttcacgatgtttatagccttttacggggggcaccgccggaaaatttgaagggaaaaaaaaagcggtttttgggtttaaaaaaggggggccataaataaacaggggtttgggaacaggtccaatcacaaaagagtttcagggggcagctttttggttttaagttaaaaataacgttttgttcccccaagggggccatgggggggcctccaaatttcaaaaaggttttattttttttttttccctgggaacatgctccgactaaaaaaatttaaatttctaaataaaaattgttaagggggtttttataaaagttccaagggtcctttttgt

SEQ ID NO: 18712 - DNA, 3828 bp, Oryza sativa
  Clone ID: PAT_MRT4530_24244C.1
atggctactcccgctaggttttcaactaagcctcatgttttcgatggaactgatttttctcattggtgtagtaggatgcaattttatattatggctgaagattatgatatttggagaaaagtttctcatccttatgtgattcctgaagctattaatactgctgctgaaaaaaccgcttttgaacaaaattgcaaagctcgcaatattcttttgagtggtatttctcgttcggattatgatcgtgttgcccatcttcaaactgttcatgagatttggactactttgagtaattttcatcaaggaacaaataatattaaagaacttcgtcgtgatcttttcaaaaaggagtatattaaatttgagatgaaacctggagaagctttggatgactatctttctcagtttaataaaattttgagtaatcttagatccgttgattcttcttgtgatgctaattatccacaatctgagatttctcgccactttttgaatggtcttgacatgtctatttgggagatgaaagttacatctattcaggagtctgttaacatgtctactttgactttgaattcactttatacaaaattgaaaacacatgagatggatgttctttctcgaaaagttgattctaaatcgagtgctttagttttttcttcttcctctttggatgttgatgcttcttcatctaagccttcttttcttgctgtttttaatgccacatccgatgatcaactcgaacagatcgaggaggagaatttggctttggttgctaacagaattgctcgagctatgaataatgccaggaacaggaaaagagcttgggagaggcaaaaagaagacaaagatggtgagaagaccaacaacaacaacaagccgaagggttcataccaagggaggaagatggagaatcttaggaaggcttttcaacaagtttgcgccgcgttcgagccactaagtgatgtagatggtgagagtggagatgatgataagggaaagaacatctccgatgtttgcttcatggcgcgtggtgaatctgacacagagtatgaagataatgaggttttaatgaatgagatttcaaaaattagagatattaatgctgcacatgatttgaaaaatagatattctcttgcttgtagttttgcgttacacacacgcactttggatgagttgtttttaaccaaaaagttgttgcaaaaatatcgaattgcttttcatgctagtttgatgtttaacatgatttctgctaagaagttaaaacaacctcatgatgttttggattgctcaacatgtaatttgaataagttgaaatcgaaagatgctttaggtcgtgttgagtacatggaagatgttgtgaaaaacaatgaagtgctttcttgccctaaatgtcgtaaaagcaaaggtgtcatggtagattgtgaaaattgtgctaatttggaaaaagaggtttcttatttgaaaaattctttgctaagattttctgatggtaaaaagaacctcaacatgattttggatcaatcaaaggctttggtggcaaggaaggagaacgtgtggatcgtggattctggttgttcgcggcacatgaccggtgataaaaattggttctcctccctaaagaaggcatctaagactgaatcgattatttttggtgatgctgctacgagtgccgttctcgctacaggtatggttaaggtaaatgagaaatttgaattgaagaatgtagctttggttgagtacttaaagtataatttgctttcagtttcacaaaatgttgatgaaaattttgaggttcactttaagaaaactggaagtaaagtttttgattcttgtggtgattctatgttgaatatttctcgctatggaagagtgtttaaagctgattttgaaaatcctgtttcacctgtgataacatgtttggttgctaagtttgataaagatgtgatgttttggcatcgtagacttggacatgttggttttgatcatctcactaggttaagtggtttggatcttgtttgtggtttgcctaaacctaagaaagatcttgatttggtttgtacaccgtgtcgtcatgctaagatggttgcttcttcacatgctcctattgtttctgtgatgacggatgcaccgggacagttattacacatggacactattggtccggctagagtgcaatccgttggaggaaagtggtatgtgttggttattgttgacgatttttctcgatattcttgggttttctttatggcaactaaggacgaagcttttcaacactttcgtggtttgtttcttcgattggagcttgaatttcctggttctttgaaaagaattcgaagtgataatggtggtgaatttaaaaatgcttcttttgaacaattttacaacgaaagaggtcttgaacatgaattttcttctcctcatgttcctcaacaaaacggtgttgttgaaaggaaaaatcgtgttttggttgagatggctagaacgatattgaatgaatataaaactcctagaaaattttgggctgaggctattaacactgcttgttatatttcaaatcgggttttcttgagatctaaacttggaaaaacttcttatgaacttcgatttggacatcaacccaaagtttcacatttgcatgtttttggttgcaagtgctttgtcttgaaatctggaaatttggataagtttgtgggacgttctaccgatggattgcttcttggttaccccgcacatactcatggctatcgtgtacttattttggagactaacaaaatcgttgagacttgcgaagtttcttttgatgaggctagtccaggttttactcaagttgatggtttggattttgatgaaacttttgctcctgttgctagaattgaggcaattagacttttgttggcttttgctgcttcaaaaggttttaaattgtatcaaatggatgtgaaaagtgcttttctaaatggttttatacaggaggaagtttatgtcaaacaaccaccaggttttgaaaatcctgattttcccaaccatgtttttaaattgtctaaagctttgtatggtttgaaacaagctcctagggcatggtatgataggcttaagaactttttgcttgcgaaaggttttacaatgggaaaggttgacaaaacgctttttgttcttaagcatggtgataatcaactttttgttcagatttatgtggatgatatcatctttggttgttcgactcacgctttggttgtagattttgctgagactatgcgcagggaatttgagatgagcatgatgggtgagttatcgtactttttgggattgcaaattaagcaaacacctcaaggtacttttgtgcatcaaacgaagtatacgaaggatcttttgagacggttcaagatggagaattgcaaaccaatttcaacaccaattggttctacagctgtgttgggtcctgatgaagatggtgaagctgttgatcaaaaagagtatagaagtatgattggatctttgttgtatctaactgcttctaggccagacatacaatttgctgtgtgtttgtgtgcacgctttcaagcttctcctcgtgcttcacatcgtcaagcggtcaagcgaataatgagtgctatcaatattgctaagaatcctgttcaatactcacgcacaaagcatattgatattcgttttcactttttgagggatcatgttgagaagggagatgttgaattgcagtttttggacacaaagttacaacttgctgatatttttactaaacctttggattctaatcgctttgcttttcttcgtggtgaattgggcataattcatccttttggcatggtttga

SEQ ID NO: 18713 - DNA, 467 bp, Oryza sativa
  Clone ID: PAT_MRT4530_24245C.1
tagttgatgaggcgatctcacacgagcttgtgtcgccttttgaaagaatgatcgatctggaaaatgccaagagcagcgagtagatcgcagatgaggaagatctagaggtaaactttggcgcttcccagaagaagaaaggacttttctcctcgatgtctaacagcattgcagaccacaatctccttgatacgtctgacatccaacctgcccttaaagcgcttaaagatcggcttaccactaatagtgtggatgcccaaaagccacataaactttgtgactctctcccagagtagccttgaaggcaaaaagctgcgatccttcataaggatattctctactgttcagacagctatggaggaggctatctttctatcttaaccaaacgcgatctattgacatctaagggatggacatgctgacacagagcgtgccacgccctatgctattgttttttgtgtagtgaatgg

SEQ ID NO: 18714 - DNA, 5215 bp, Oryza sativa
  Clone ID: PAT_MRT4530_24246C.1
aaacatgccaaaaagatgaattatgcccaattcaccacgaagaaaagcaaagcgattagaatccaacggtttagtgaaaatatcagcaagttgcaactttgtatcaaaaaaactgcaattcaacatctcccttctcaacatgatccatcaaaaagtaaaaacgaatatcaatatgctttgtgcgtgagtgttgaacatgattcttagcaatgttagtagcactaatattatcacaaaagagtggtactttctcaaaagtaagaccataatctttcaaagtagataaaagacaaagaatctgtgaacaacaactagcagcagcaacatattcaaattcagtagttgattaagcaacactagattgtttcctataagaccatgtaatcaatgatgtaccaagaaaatgacatgttccactagtacttttcctatcaattctacaaccaccaaaatcagcatcggaatatccacttaagcatatagaagatgaagtagaatactaaattccaaactcaagtgtatgattcaaatacctcattattcgcttgaccgcttgacaatgtgaagcacgaggagaagcttgaaagcgtgcacacaaacacacaacaaattgtatgtctggcctagaagcagttagatacaacaaagatccaatcatacttctatactctttttgatcaacagcttcaccatcttcatcaggatccaacacagctgtagaaccaattggtgttgaaattggcttgcaattctccatcttgaaccgtctcaaaagatccttcgtgtacttcgtttgatgcacaaaagtaccttgagatgtttgcttaatttgcaatcccaaaatgtacgataactcacacatcatgcccatctcaaattccctgcgcatagtctcagtaaaatctacaaccaaagcgtgggtcgaacaaccaaagatgatatcatccacataaatctgaacgaaaagttgattatcaccatgcttaagaacaaaaagcgttttgtcaacctttcccattgtaaaacctttcgcaacaaaaagttcttaagcctatcctaccatgccctaggagcttgtttcaaaccatacaaagctttagacaatttaaaaacatggttaggaaaatcaggattttcaaaacctggtggttgtttgacataaacttcctcctgtataaaaccatttagaaaatcacttttcacatccatttgatacaatttaaaaccttttgaaacagcaaaagctaacaaaagtctaattgcctcaattctagcaacaggagcaaaagtttcatcaaaatccaaaccctccacttgggtaaaaccttgagcaacaagtctagctttatttctcacaatcaaaccatcctcgttttgtttatttttgaaaacccacttggttccaataatattatgtccagaaggtggttcaactaaagtccaaactttgtttctctcaaaattttcaagttcttcgtgcatggcattaatccacgattcatcagttaatgcatgtgacacatctttgggttcaaaggaagcaacaaatgcagaatttgcacaaacatcatgagtcgttaccttagacttgtagtccgctcacctatattaccaataatttgttctggcggatgtcgtcgttgaatgtgcaaaggagcagcgacttctgaagttgatccacgttctgtatcagtactggtcgaagttgtaatctccggaggaccatctcgaatagcatcaacagaaccctcagccgacgaccctggccggtctgaccgctcctcatgggccggtctgaccggccaagccgacctcgtcgtcgtcgttttcgtctctctcgtcttcaaaaatacgaccatcctccccctgaacctgtgacagtgtatctgcaatatcgggtctagtacctggactagcctcatcaaaagaaacttcgcaagtctcaacgattttgttagtctccaaaataagtacacgatagccacgagtgtgtgcagggttaccaagaaacaatccatcggtagaacgtgtctcaaacttatccaaatttctagatttcaagacaaagcacttgcaaccaaaaacatgcaaatgtgaaacaccattatcacttcgaattcttttcaatgaaccaggaaattcaagctccaattgaagaaacaaaccacgaaagtgttgaaaagcttcgtccttagttgccataaagaaaacccaagaatatcaagaaaaatcgtcaacaataaccaatacataccactttcctccaacagattgcactctagctggaccaacagtgtccatatgtaatagctgtcccggtgcatccgtcatcacagaaacaataagagtatgtgaagtagaaatcatcttagcatgatgacacggtgtacaaaccaaatcaagatctttcttaagtttaggcaaaccacgaacaagatccaaaccacttaacctagtgagatgatcaaaaccaacatgtccaagtccacgatgccaaaacatcacatctttatcaaacttagcaaccaaacgtgttatcacaggtgaaacagaattttcaaaatcagctttaaacactcttccatagcgagaaatattcagcacagaatcgccacaagaataaaaaactttacttccagttttcttaaagtgaacctcaaaattttcatcaacaatttgtgaaactgaaagcaaattgtactttaagtcctcaatccaagctacattcttcaattcaaatttttcatttaccttaaccaaacctgtagcgagaacggcacttgtagaagcatcaccaaagataatcgattcagtcttggatgccttcttgagagaggagaaccaatttttatcaccggtcatgtgccgcgaacaaccggaatccacgatccacacgttctccttccttgccaccaaagcctttgattgatccaaaatcatattgaggttctttttaccatcagaaaatcttagcaaagaatttttcaaataagaaacctcttttttccaaattagcacaattttcacaatctaccgtgacacctttgcttttacgacatttagggcaagaaagcacttcattgtttttcacaacatcttccatgtacttaacacgacctaaagcatctttcaatttcaacttattcaaatcacatgttgagcaatccaaaacatcatgaggttgttttaactttttagcagaaatcatgttaaacatcaaactagcatgaaaagaaatttgatatttttgcaacaactttttagttaaaaacaactcatccaaagtgcgtgtgtgcgaaacaaaactacaagcaagagaagatctatttttcaaatcatgtgcagcattaacatctctaatttttgaaatctcattcattaaaacctcacaattttcacaatcatcatcattaggaataagagattttaatctagcaatttcagatttaagagattcaatgataaattcctgttttctatacatcttctcacacttcttattcttttcactcaaaatattaatagcttcctcaaaagcacttacctcattatcttcatactctgtgtcagattcaccacgtgccatgaagcaaacatcggagatgttctttcccttatcatcatctccactttcaccatatacatcactcagtggctcgaacacggcacaaacttgttgaaaagccttcctaagattctccatcttcctctcttggtatgaacccttcggcttgtgattgttggtcttctcactatctttgtcttctcttttgcctctcccaagcttaggacaatgcgaacgaagatgatcaattgaaccacattcaaagcaacgatttggaccacctcttttcctgttcctggcattattcatagctcgagcaattctgttagcaaccaaagccaaatcctcctcctcgatctgttcgagttaatcatcggatgtggcattaaaaacagcaagaaaagaaggcttagatgaagaagtatcaacatccgaagaagaagaagaagaaaccaaagcactcgacttagaatcaacttttcgagaaagaacattcatctcatgcgttttcaactttgtataaagtgaatccaaagtcaaagtagacatgttaacagactcctgaatagatgtaactttcatctcccaaatagacatatcaagaccattcaaaaagtgacgagaaatctcagattgtggataattagtatcataagaagaatcaatagatctaagatcactcaaaattttattaaaccgagaaagatagtcatccaaagcttctccaggtttcatctcaaatttaatatactcctttttgaaaagatcacgacgaagttctttaatattatttgttccttgatgaaaattactcaaagcagtccaaatctcatgagcagtttgaagatgagcaacacgatcataatccgaacgagaaataccactcaaaagaatattgtgagcctcgaaatcgatggatcgcggtctgaccgaagtagttgcgccggtctgaccgcctgatgaacgtcagtctgaccgatgtagatcgatcggtcgaaccgccgagaaatcctgccgccgattcctgtcgccgccggtctgaccgccgtgtgcccgccagtcggaccaccgagatgcctccggtctgacgctccctctctatttatacgtgaggtaggtagcctaaagccacgaaccaaactcatactaggagtcctaaacaccttaggaaaccctctagtacaagaaagaaactttacataaccaaacgtaccaaatttggactccttccaaattcgactccgcatcccacacgcacacaataactctatcgtatgccatatggaaactccatcaaccacgtgcatcaactctagccggctaccagagcccggtctgaccggtccgcacaaaatgataaaatcctgcagattcatctatgaaatccaatcatctccaaaaccacttcgtgaataaattccaaatatcaaaaccaataatctccaatgcccaattgttcatcatagaataataatcaaaaacacctttgattttacaaaggcttccggactcctgattcctactcgtcatcaagagaagatctggagcgtcactgccaaccccacatccaaggccagcccaacctagcccaaaatcggcaggtggcctcctccgttgcttcacttcgtagacttgtgaattttggcccaa

SEQ ID NO: 18715 - DNA, 4718 bp, Oryza sativa
  Clone ID: PAT_MRT4530_24247C.1
tcacaccatgccaaaaggatgaataattcccaattcaccatgaagaaaagcaaagcgattagaatttaatagtttagtgaaaatatcagcaagttgcaactttgtatccaaaaatgtcaattcaatatctcccttctcaacatgatccctcaaaaagtgaaagcgaatatcaatgtgctttgtgcgtgaatgttgaacaggattcttagcaatattaatagcactagtattatcacaaaagagatgtgctttatcaaaagtaagaccataatctttcaaagtagaaataagccaaagaatctgtgaacaacaactagcagcagcaacatattcagattcagcagttgattgagcaacactagattgtttcctagaagaccatgcaattaatgatgtaccaagaaaatgacatgttccactagtactttttctatcaattctcattattcgcttgaccgcttgacgatgtgaagcataaggagaagttctatactccttttgatcaacagcttcaccatcttcatcaggatccaacacagctgtagaaccaattggtgttgatattggcttgtaattctccattttgaaccgtctcaaaagatccttcgtgtacttcgtttgatgcacaaatataccttgaggtgttggcttaatttgcaatcccaaaaagtacgataactcacccatcatgctcatctcaaatttcctgcgcatagtctcagcaaactctacaaccaaagtgtgagttgaacaaccaaagatgatatcatccacataaatctgaatgaatagttgattatcaccatgcttaagaacaaaaagcgttttgtcaacttttcccattcgaaaacctttcgcaagtaaaaagttcttaaccctatcataccatgctctaggtacttgtttcaagccatacaacaatttagacaatttaaaaacatggctgggaaaatcaggattttcaaaacctgatggttgtttgacataaacttcctccggaggtgtgccggcgatctgatcggcctgacgcccggtctgaccggccgagccgacctcgtcgtcatcgtcgtcgctctcgtcttcaaaaatatgaccatcctccccctgaacctgtgacaatgtacctgcaatatcgggtctagttcctggactagcctcatcaaaagaaacttcgcaagtctcaacgattttgttagtctccaaaataagtacacgatacccacgagtatgtgtggggtaaccaagaaacaatccattggtagaacgtgccttaaacttatccaaatttccagatttcaagacaaagcacttgcaaccaaaaacacgcaaatgtgaaactttgggttgatgtccaaatcgaagttcataagaagtttttccaagttttgatctcaagaaaacccgatttgaaatataacaagcagtgttaatcgcctctgcccaaaattttcttggagttttatattcatccaacatcgttctagccatctcaaccaaaacatggtttttcctttcaacaacaccgttttgttgaggaacgcgaggagaagaaaattcatattcaagacctcttttattccaaaattgttcaaatgaagcatttttaaactcaccaccattatcacttcgaattcttttcaaagaaccaggaaattcaagatccaatcgaaaaaacaaacctcgaaagtgttgaaaagcttcgtccttagttgccataaagaaaacccaagaatatcgagaaaaatcgtcaacaataaccaacacataccactttcctccaacagattgcactctagctggaccaacagtgtccatatgtaatagttgtcccggtgcatccgtcatcacagaaacaataggagcatgtgaagtagaaaccatcttagcatgacgacacggtgtacaaaccaaatcaagatctttcttaagcttaggcaaaccatgaacaagatccaaaccacttaacctagtgagatgatcaaaaccaacatgtccaagtctacgatgccaaaacatcacatctttatcaaacttagcaactaaacatgttatcacaggtgaaacaggattttcaaaatcagctttaaacactcttccatagcgagaaatattcaacacagaatcaccacaagaatcaaaaactttacttccagttttcttaaagtgaacctcaaaattttcatcaacaatttgtgaaactgaaagcaaattgtactttaagtcctcaaccaaagctacattcttcaattcaaatttttcatttaccttaaccaaacctgtagcgagaacggcacttgtagcggcatcactaaagataattgattcagtcttggatgccttctttagggaggagaaccaatttttatcaccggtcatgtgccgcgaacaaacggaatccacgatccacacgttctccttccttgccaccaaagccaacacacaggcagaagtcaaagcctcagtacgttggtctgcccagtgcccggtctgaccgaggctgttcagccggtctgaccggttgccggtccgaccgcgggacccactgcggtctgaccggtttcctcgagggaaaacccgatttttaccacattgattttgcaaagcaatctctctctcctttttatgtttatgagctaatctgaaacaaaaaccaataatatgtccatcttttccacaaaaagaacaagtatatttttcacgatgattagacacatcggtagcattagtagatttaacaacatgagcaacaacatgagattttgcatgcacaacattggattttgaagatgcactcatagtagacatgataccagcagatttaaacatagttttattagtatcagttttaaccaaaatctcaccacttctagcaccaacacctgacacaacaggaggatgtctagaattatgagcataaggattaaaacctaaaccacggttatgtgtgctaacctttgattgatccaaaatcatgttgaggttctttttaccataagaaaatcttagcaaagaatttttcaaataaaaatcctctttttccaaattagcacaattttcacaatctaccatgacacctttgtttttacgacatttggggcaagaaagtatttcattgtttttcacaacatcttcgatgtactcaacacgacctaaagcatcttttagtttcatcttattcaaattacatgttgagcaatccaaaacatcatgaggttgttttaactttttagcagaaatcatgttaaacatcaaactagcatgaaaagcaatttgatatttttgcaacaactttttagttaagaacaactcatccaaagtgcgtgtgtgcaaagcaaaactacaagcaagagaagatctatttttcaaatcatgtgcagcattaacatctctaatttttgaaatctcattcattaaaacctcacaattttcataatcatcatcattaggaataagagattttaacctatcaatttcagatttaagagattcaatgataaattccttttttctatacatcttctcacacttcttattttttacactcaaaatattaatagcttcctcaaaagcactcacctcattgttttcatactctgtgtcagattcaccacgcgccatgaagcaaacatcggagacgttctttcccttatcatcatctccactttcaccatctacatcacttagtggctcgaaggcggcgcaaacttgttgagaagccttcctaagattctccttgatcttcctccctttgaatgtacccttcgacttgttgttgttgggcttgttattgttggtcttctcaccatctttgtcttctcttttgcctctcctaagcttaggacaatgtgaacaaagatgatcaattgaaccacattcaaagcaacgatttggaccacctcttttcctgttcctggcattattcatagctcgagcaattctgttagcaactaaagccaaatcctcctcctcgatttgttcgagttgatcatcggatgtggcattaaaaacagcaagaaaagaagacttagatgaagaagcatcaacgtccaaagaggaagaagaagaaaccaaagcatgcactagacttagaatcaactttgtgagaaagaatattcatctcatgtgttttgagttttgtataaagtgaatccaaagtcaaagtggacatatcaacagactcttgaatagatgtaaccttcatctcccaaacagacatatcaagaccattcaaaaagtggcgaggaatcttagattgtgaataattagtgtcataagcagaatcaacagatctaagatcactcaaaattttgttaaacctagaaagatagtcatccaaagcttctccaggtttcatctcaaatttaatgtactcctttttgaaaagacctcgacgaagttctttaatgttatatgttccttgatgaaaattactcaaagcaatccaaatctcatgggcagcttgaagatgagcaacacgatcataatccgaacgagaaattccactcaaaagaatattgcgagctttgcaattttgttcaaactcaagttttaaagcggtagtattaatttcttcgggaatcacataaggatgagaaacttttctcccaaatatcataatctttagccataatgtatgattgcatcctactacaccaatgagaaaaatccgttccatcgaaaatatgaggcttagttgtaaatttattagaagtaaccat

SEQ ID NO: 18716 - DNA, 2784 bp, Oryza sativa
  Clone ID: PAT_MRT4530_24248C.1
atgagagaagatgctcagaaaggagatggagttgaggttcaagtgaagcaaagaaaggccatagaaattcaagacaagaaaaaaaaactcggaaggcggaggaagaaaaccgcaagaaacataatcttcgactacaactcaaaggtgatccaaaatctcaacatgattttggatcaatcaaaggtgttggtgctagaagtggctttggtggcaaggaaggagaacgtgtggatcgtggattctggttgttcgcagcacatgaccggtgataaaaattggttctcctcactcaaaaaggcatccaagactgaattgattatatttggtgatgcttctacaagtaccgttctcgctacaggtttggtaaaggtaaatgaaaaatttgaattgaagaatgtagctttggttgaggacttaaagtacaatttgctttcagtttcacaaattgttgatgaaaattttgaggttcactttaagaaaactggaagtaaagtttttgattcttgtggtgattctgtcttgaatatttctcgctatggaagagtgtttaaagctgattttgaaaatcctgtttcacctgtgataacatgtttggttgctaagtttgataaagatgtgatgttttggcatcgtagacttggacatgttggttttgatcatctcactaggttaagtggtttggatcttgttcgtggtttgcctaatcttaagaaagatcttgatttggttttctttatggcaactaaggacgaagcttttcaacactttcgtggtttgtttcttcgattggatattgaatttcctggttctttgaaaagaattcgaagtgataatggtggtgagtttaaaaatgcttcttttgaacaattttgtaatgaaagaggtcttgaacatgaatttttatctcctcgtgttcctcaacaaaacggtgtggttgaaaggaaaaatcgtgttttggttgagatggctagaacgatgttggatgaatataaaactcctagaaaattttgggctgaggctattaacactgcttgttatatttcaaatcgggttttcttgagatctaaacttggaaaaacttcttatgaactacgatttggacatcaacccaaagtttcacatttgcgtgtttttggtttcaagtgctttgtcttgaaatctggaaatttggataagtttgaggcacgttctaccgatagattgtttcttggttaccccgcacacactcgtggctatcgtgtacttattttagagactaacaaaatcgttgagacttgcgaagtttcttttgatgaggctagtccaggtactagacccgatattgcaagcacactgtcacaggtaaagggggaggatggtcgtatttttgaagacgagagcgaagatgacaacgacgatgatgacgtcggctcggccagtcagaccgggcgccaggccggtcacaccgccggcacacctctggtcagaccgcctcaggaggagcggtcagaccggccagggacgtcgggattgggtactgttgatgctgatcgagatggtcctccaaagattactacttcgaccaatgtgtcacatgcattaactgatgaatcatggattaatgccatgcatgaagaacttgaaaattttgagagaaacaaagtttggactttagttgaaccaccttctagacataatattattggaaccaagtgggttttcaaaaataaacaaaatgaggatggtttgattgtgagaaataaagctagacttgttgctcaaggttttacccaggtggagggtttggattttgatgaaacttttgctcctattgctagaattgaggcaattagacttttgttggcttttgctgcttcaaaaggttttaaattgtatcaaatggatgtaaaaagtgattttctaaatggttttatacaggaggaagtttatgtcaaacaaccaccaggttttgaaaatcttgatttttccaaccatgttttcaaattgtctaaagctttgtatggcttgaaacaagctcctagagcatggtatgataggcttaagaactttttgcttgcgaaaggttttataatgggaaaggttgacaaaacgctttttgttcttaagcatagtgataatcaactttttgttcagatttatgttgatgatatcatctttggttgttcatctcacgctttggttgtggagtttgctgagactatgcacagggaatttgagatgagcatgatgggtgagttatcgtactttttgggattgcaaattaagcaaacacctcaaggtacttttgtgcatcaaacgaagtatacgaaggatcttttgagacggttcaagatggagaattgcaagccaattttaacaccaattggttctacagctatgttggatcctgatgaagatggtgaagctgttgatcaaaaggaatatagaagtatgattggatctttgttgtatctaactacttctaggccagacataccatttgctattctttggcttttatctactttgaaagattatggtcttacttttgagaaagtatctctcttttgtgataatacaagtgctattaacattgctaagaatcctgttcaacactcacgcacaaagcacattgatattcgttttcagtttttgagggatcatgttaagaagggagatgttgaattgcagtttttggacactaagttgcaacttgctgatattttcactaaacttttggattctaatcgatttgcttttcttcgtggtgaattgggaataattcatccttttggcatggtttga

SEQ ID NO: 18717 - DNA, 566 bp, Oryza sativa
  Clone ID: PAT_MRT4530_24249C.1
cccttagacctgaaagcctgatatctttcacccttaactattaatatcggacgaattacacatatatatatatacatatatatatatatatatgtatatatatatatgtgtatatatatatatatatatgtgtatatatatatatatatgtgtatatatatatatatgtatatatatatatgtatatatatatgtatatatatatatatgtatatatatatatgtatatatgtgtatatatatatacatatatatatatatatatatatatatatatataacacacacacacatacctgaactgtggagttgcgagcatagctagtttcgccatgccctgcattcatatggcaactcataacacataatatatatatatatatatatatatatatatatatatatatatatatatatatatatatatatatatatatatatatatatatacttttatatatatatatatatatatatatatatatatatatgtgtgtgtgtgtgtgtacatatatacatacgtacatacgtacgtacatacatacacacacataattaaatatata

SEQ ID NO: 18718 - DNA, 336 bp, Oryza sativa
  Clone ID: PAT_MRT4530_2424C.1
gaagggttttcgaccaaattgatgagtgcgtgaggatagacggcgtacgggcgtgctatttctccagaaagatgggaggaagagcaccggggatggcctgtccacgtcgggaaacctgtcgtgccagctgcattaatgaattggccaacgcgcggggagagggcgggtgcgtattgggcgctcttccgcttcctcgctcactgactcgctgcgctcgggcgttcggctgcggcgagcggtatcagctcactcaaaggcgggaaaacggggggtgccccccggaagaaaccctcgggcgcgctctcgggtcgcacccggacgcgttacgggaaaacg

SEQ ID NO: 18719 - DNA, 3762 bp, Oryza sativa
  Clone ID: PAT_MRT4530_24250C.1
atgaaacctggagaagctttggatgactatctttctaggtttattaaaattttgagtgatcttagatctgttgattcttcttatgatactaactatccacaatctgagatttctcgtcactttttgaatggtcttgacatgtctatttgggagatgaaagttacatctattcaggagtctgttaacatgactactttgactttggattcactttatataaaattgaaaacacataagatgaatgttctttctcgaaaagttgattctaagtcgagtgctttggtttcttcttcttcttctttggatgttgatgcttcttcatctaagccttcttttcttgctgtttttaatgccacatccgatgatcaactcgaacagatcgaggaggaggatttggctttggttgctaacagaattgctcgagctatgaataatgccaggaacaggaaaagaggtggtccaaatcgttgctttgaatgtggttcaattgatcatcttcgttcgcattgtcctaagcttgggagaggcaaagacaaagatggtgagaagtccaacaacagcaagccgaaggattcatctcaagggaggaagctggagaatctcaggaaggcttttcaagaagtttgcgccgccttcgagccactaagtgatgtagatggtgaaagtggagatgatgataagggaaagaacatctccgatgtttgcttcatggcgcgtggtgaatctgacacagagtatgaatataatgagttaaaacaacctcatgatgttttggattgctcaacatgtaatttgaataagttgaaattgaaagatgctttaggtcatgttgagtacatagaagatgttgtggaaaacaatgaagtgctttcttgccccaaatgtcgtaaaagcaaaggtgtcatggtagattgtgaaatttgtgcaaatttagaaaatgtcgtaaaagaacctcaaaatgattttggatcaatcaaaggtgttggtgctagaagtggtgagattttggttaaacctgatactaataaaactgtgtataaatctgctggtatcatgtctactatgagtgcatcttcttcaaaatccaatgttgtgcatgcaaaatctcctgttgttgcttgtgttgctaaatcttctaatgctaccaatgtgtctaatcatcgtgaaaaatatacttgttctttttgtgacaaagatggacatattgttagtttttgtttcagattagctcataaacagaaaaaggagagagagattgcttttgcaaaatcaaagtggcaaaaaatcgggttttccctcgaggaaaccagtcagaccgcagtgggtcccgcggtcagaccggcgactggtcagaccggctacagagcgtcggtcagaccgggcaccggtcagaccggcggtacagaggcggctttggtggcaaggaaggagaacgtgtggatcgtggattccggttgttcgcggcacatgaccggtgataaaaattggttctcctcactcaaaaaggcatccaagactgaatcaattatttttggtgatgcttctacaagtgctgttctcgctacagtcaaaaaaaaatttgaggttcactttaagaaaactggaagtaaagtttttgattcttgtggtgatgctgtgttgaatatttctcactatggaagagtgtttaaaactgattttgaaaatcctgtttcacctgtgataacatgtttggttgctaagtttgataaagatgtgatgttttggcatcgtagacttggacatgttggttttgatcatctcactaggttaagtggtttggatcttgttcgtggtttgcctaaacttaagaaagatcttgatttgttttgtacaccgtgtcgtcatgctaagatggttgcttcttcacatgatcctattgtttctgtgatgacggatgcaccgggacagctattacacatggacactgttggtccggctagagtgaaatctgttggaggaaagtggtatgtgttggttattgttgatgatttttctcaatattcttgggttttctttatggcaactaaggacgaagctttccaacacttttgtggtttgtttcttcgattggagcttgaatttcctggttctttgaaaagaattcgaagtgataatggtggtacactgtcacaggttcagggggaggatggtcgtagttttgaagacgagagcgacgacgactacaacaacgaagtcggctcggccggtcagaccgggcgccaggccggtcagaccgccggcacacctccggtcagaccgccacaggaggagcggtcagaccggccaggttcgtcgggttccggtattgttgatgctgatcgagatggtcctccggagattacaacttcgaccaatactgatacagaacgtggctcaacttcagaagtcgctgctcctttgcactttcaacgacgacatccgccggaacaaatcattggtaatataggtgagtggactacaaggtctaaggtaacgactcacgatgtttgtgaaaattctgcatgtgttgcttcttttgaacccaaagatgtgtcacatgcattaactgatgaatcgtggattaacgccatgcatgaagaacttgaaaattttgagagaaacaaagtttggactttagttgaaccaccttctggacataatattattggaaccaagtgggttttcaaaaataaacaaaatgaggatggtttgattgtgagaaataaagctagacttgttgctcaaggttttactcaagttgagggtttggattttgatgaaacttttgctcttattgctagaattgaggcaattagacttttgttggcttttgctgcttcaaaaggttttaaattgtatcaaatggatgtgaaaagtgcttttctaaatggttttatacaggaggaagtttatgtcaaacaaccaccaggttttgaaaatcctgatttttccaaccatgtttttaaattgtctaaagctttgtatggtttgaaacaagctcctagggcatggtatgataggcttaacaactttttgcttgcgaaaggttttataatgggaaaggttgacaaaacgctttttgttcttaagcatggtgataatcaacttttcgttcagatttatgtggatgatatcatctttggttgttcgactcacgctttggttgtagagtttgctgagactatgcgcagggaatttgcgatgagcatgatgggtgagttatcgtattttttggtattgcaaattaagcaaacacctcaaggtacttttgtgcatcaaacgaagtatacgaaggttcttttgagacagttcaaaatggagaattgcaagccaatttcaacaccaattggttctacagctgtgttggatcctgatgaagatcgtgaagctgttgatcaaaaggaatatagaagtatgattggatctttgttgtatctaactgcttctaggccagacatacaatttgctgtgtgtttgtgtgcatgctttcaagcttctcctcgtgcttcacatcgtcaagcagtcaagcgaataatgagtgctattaacattgataagaatcttgttcaacactcacgcacgaagcacattgatattcgtttttactttctaagggatcatgttgagaagggagatgttgagttccagtttttggacacaaagttgcaaattgctgatattttcactaaacctttggattctaatcactttgcttttcttcgtggtgaattgggcataattcatccttttggcatggtttga

SEQ ID NO: 18720 - DNA, 3966 bp, Oryza sativa
  Clone ID: PAT_MRT4530_24251C.1
atggctactcctgctaggttttcaactaagcctcatcttttcgatggaacgaatttttctcattggtgtagtaggatgcagtcttacattatggctgaagattatgatatttggagaaaagtttctcatctttatgtgattcctgaagctattaatactgctgttgaaaaaactgcttttgaacaaaattgcaaagctcgcaacattcttttgagtggtatttctcattcagattatgatcgtgttgcacatcttcaaactgctcatgagatttgggttgctttaagtaattttcatcaaggaacaaataatattaaagagcttcatcgagatcttttcaaaaatgagtacattaaatttgagatgaaacctggagaagctttggatgactatctttctaggtttaacaaaattttgagtgatcttagatctgttgattcttcttatgatgctaattatccacaatctgagatttctcgtcactttttgaatggtcttgatatgtctatttgggagatgaaagttacatctattcaggagtctgtcaatatgtctactttgactttggattcacttcacaccaaattgaaaacacataagatgaatgttctttctcgaaaagctaattctaagtctagtgctttggtttcttcttcttcttctttgtatgtagatgcttcttcatctaagccttcttttattgctgtttttaatgccacatccgatgatcaactcgaacagatcgaggaggaggatttggctttggttgctaaccgtattgctcgagctatgaataatgccaggaacaggaaaagaggtggtccaaatcgttgctttgaatgtggttcaattgatcatcttcattcgtattgtcctaagcttgggagaggcaaaagagaagacaaagagggtgagaagaccagcaacaacaagcccaacaacaacaagccgaagggttcatcccaagagaggaagatggagaatctcaggaaggcctttcaacaagtttgcgccgccttcgagccactaagtgatgtagatggtgaaaatggagacgatgataaggggaagaacatctccgatgtttgcttcatggcgcgtggtgaatctgacacggagtttgaagataatgaggtttcctacttgaaaaattctttgcaaagattttctgatggtaaaaagaacctcaacaagatcaatcaaagattagttcataaacagaaaaaggagagagagattgcttttgcaaaatcaaagtggcaaaaatctggtgttccctcgagaaaaccggtcagaccgcagtgggtcccgcggtcagaccggcgacaggctttggtggcaaggaaggagaacgtgtggatcgtggattccggttgttcgcggcacatgaccggtgataaaaattggttctcctctctcaaaaaggcatccaagactgaatcaattatttttggtgatgcttctacaagtgccgttctcgctacaggtttggtaaaggtaaatgaaaaatttgaattgaagaatgtagctttggttgaggatttaaagtacaatttgctttcggtttcacaaattgttgatgaagagtttaaggttcactttaagaaaactggaagtaaagtttttgattctcgtggtgattctgtgatgaatatttctcgctatggaagagtgtttaaagctgattttgaaaatcctgtttcacctgtgataacatgtttggttgctaagtttgataaagatgtgatgttttggcatcgtagacttggacatgttggttttgatcatttcactaggttaagtcgtttggatcttgttcgtggtttgcctaaacttaagaaagatcttgatttggtttgtacaccgtgtcgtcatgctaagatggtttctacttcacatgctcctattgtttctgtgatgacggatgcaccgggacagctattacatatggacactgttggtctagctagagtgcaatctgttggaggaaagtggtatgttttggttattgttgacgatttttctatatattcttgggttttctttatggcaactaaggacgaagcttttcaacacttttgtggtttgtttcttcgattgaatcttgaatttcctggttctctgaaaagaattcgaagtgataatggtgttttcttgcgatctaaacttggaaaaacttcttatgaacatcgatttggtcatcaacccaaagtttcacatttgcgtgtttttggttgcaaatgctttgtcttgaaatctggaaatttggacaagtttgaggcacgttctaccgatggattgtttcttggttaccccacacatactcgtggctatcgtgtacttattttggagactaacaaaattcttgagacttgcgaagtttcttttgatgaggctagtccaggtactagacctgaaatttcaggtacactgtcacaggttcagggggagaatggttgtatttttgaagacgagagcgactacgacgacgacgacgaggtcgactcggccgatcagaccgggcgccaggccggtcagaccgccggcacacctccggttagactggcacaggaggtgtggtcagaccggccagggtcgtcggccgagggttctgttgatgcagatcgagatggtcctccggagattactacttcgaccagtactgatacagaacgttttactcaggtggaggatttggattttgatgaaacttttgctcctgttgctagaattgaggcaattagacttttgttggcttttgctgcttcaaaaggttttaaattatatcaaatggatgttaaaagtgcttttctaaatggttttatacaggacaaagtttatgtcaaacaaccactaggttttgaaaatcctgattttcccaaccatgtttttaaattgtctaaagctttgtatggtttgaaacaagttcctagggcatgttatgataggcttaagaactttttgcttgtgaaaggttttacaatgggaaaggtttacaaaacgccttttgttcttaagcatgatgataatcaactgttcgttcatatttatgtagatgatatcatctttggttgttcaactcacgctttggttgtagattttgctgagactatgcgtagggaatttgagatgagcatgatggcaaacacctcaaggtacttttgtgcatcaacgaagtatacgaaggatcttttgagacggttcaagatggagaattgcaagccaatttcaacaccgattggttctacagctgtgttggatcctgatgaagatggtgaagctgttgatcaaaaggaatatagaagtatgattggatctttgttgtatctaactgcttctaggccagacatacaatttgctgtgtgtttgtgtgtgtgctttcaagcttctcctcgtgcttcacatcgtcaagcggtcaagcgaataatgaggtatttgaatcatacacttgagtttggaatttggtattctacttcatcttctatatgcttaagtggatattccaatgctgattttggtggttgtagaattaataggaaaagtactagtggaacatgtcattttcttggtacatcattgattgcatggtcttctaggaaacagtctagtgttgctcaatcaactgctgaatctgaatatgttgctgcagctagttgttgttcacagattctttggcttttatctactttgaaagattatggtcttacttttgagaaagtacctctcttttgcgacaatacaagtgttattaacattgctaagaatcttgttcaacactcacgcacaaagcacattgatatttgttttcactttctgagggatcatgttgaaaagggagatgttgaattgcagtttttggacacaaagattcaaattgctgatattttcactaaacctttggattctaatcgctttgcttttcttcatggtgaattgggcataattcatccttttggcatggtttga

SEQ ID NO: 18721 - DNA, 306 bp, Oryza sativa
  Clone ID: PAT_MRT4530_24252C.1
atgtggcctttggaagaagaggcccagaaatcactcaccacattccatctcaacgtcggatcttggatctcgatcatcagctggtttgcgagaggtgtccggttaggcattgagtcgagcatgtggaacacggcggtgtgcagagggatgagcagaggagccgagcagtactacggaggggcagcatggacattggaggatccatacagtgttgtggaggtgcggcacataagcgcggaggaggtggtgttggtagaggcttgcgtggaggttgcatccaaagaagcaaatgccaacgctgcttag

SEQ ID NO: 18722 - DNA, 4542 bp, Oryza sativa
  Clone ID: PAT_MRT4530_24253C.1
atggctactcccgctaggttttcaactaagcctcatgttttcgatggaacagatttttctcattggtgtagtaggatgcaatcttatattatggctgaagattatgatatttggagaaaagtttctcatccttatgtgattcctgaagctattaatactgctgctgaaaaaactgcttttgaaaaaaattgcaaagctcccaatattcttttgagtggaacaaataattttaaagaaattcgtcgtgatcttttcaaaaaggagtatattaaatttgagatgaaacctggagaagttttggatgactatctttctcggtttaataaaattttgagtgatcttagatctgttgattcttcttatgatgctaattattcacaatatgagatttctcgccactttttgaatggtcttgacatgtctatttgggagatgaaagttatatctattcaggagtctgttaacatgtctactttgactttggattcactttatataaaattgaaaacacatgagatgaatgttctttttcgaaaagttgattctaagtcgagtgctttggtttcttcttcttcctctttggatgttgatgcttcttcatctaagtcttcttttcttgctgtttttaatgccacctccgatgatcaactcgaacaaatcgaggaggaggatttggctttggttgctaacagaatttctcgagttatgaataatgccaggaacaggaaaagaggtggtccaaatcgttgctttgaatgtggttcaattgatcattttcgtttgcattgtcctaagcttgggagaggcaaaagagaagacaaagatggtgagaagaccaacaacaacaagcccaacaacaacaagtcaaagggttcatcccaagggaggaagctggacaatctcagaaaggcttttcaacaagtttgcgccgtcttcgagccactaagtgatgtagatggtgaaagtggagatgatgataagggaaagaacatctccgatgtttgcttcatgacgcgtggtgaatctgacacagagtatgaagataatgaggtaagtgcttttgaggaagctattaatattttgagtgaaaagaataagaagtgtgagaagatgtatagaaaacaggaatttatcattgaatctcttaaatctgaaattgctagattaaaatctgttattcctaatgatgatgattgtgaaaattgtgaggttttaatgaacgagatttcaaaaattagagatgttaatgctgcacatgatttgaaaaatagatcttctcttgcttgtagttttgctttggacacacgcactttggatgagttatttttagctaaaaagttgttgcaaaaatatcaacttgcttttcatgctagtttgatgtttaacatgatttctgctaaaaagttaaaacaacctcatgatgttttggattgctcaacatgtaatttgaataagttgaaattgaaagatgctttaggtcgtgttgagtacatggaagatgttgtgaaaaacaatgaagggctttcttgccccaaatgtcgtaaaagcaaaggtatcatggtagattgtgaaaattgtgctaatttggaaaaagaggtttcttatttgaaaaattctttgctaagattttctgatggtaaaaagaatctcaacatgattttggatcaatcaaaggttagcacacgtaaccgtggtttaggttttaatcctattgctcataattctagacatcctcctgttgtgttaagtgttggtgctagaggtggtgtgattttggttaaacctgatactaacaaaactatgtttaaatctgctggtatcatgtctaccttgaatgcatcttcttcaaaatccaatgttgtgcatgcaaaatctcctgttgttgcttgtgttgctaaatcttctaatgctaccaatgtgtcgaatcatcgtgaaaaatatacttgttctttttgtggaaaagatggatatattgttggtttttgtttcagattagctcataaacagaaaaaggagagagaaattgcttttgcaaaatcaaagtggcaaaaatatggttttccctcgaggaaaccggtcagaccgcagtgggtcccgcggtcagaccggcgaccggtcagaccggcttctaagcatcggtcaaaccgggcaccggtcagaccggcggtacagaagcggtcagaccggcccccggtcagaccggccactatacctcgacttggacatgttggttttgatcatctcactaggttaagtggtttggatcttgttcgtggtttgtctaaacttaagaaagatcttgatttggtttgtacaccgagtcgtcatgctaagatggtttctacttcacatgctcctattgtttctgtgatgacggatgcaccgggacagctattacatatggacactgttggtccagctagagtgcaatctgttggaggaaagtggtatgtgttggttattgttgacgatttttctcgatattcttgggttttctttatggcaactaaggacgaagcttttcaacactttcatggtttgtttcttcgattggagtttgaatttcctggttctttgaaaagaattcgaagtgataatggtggtgagtttaaaaatgcttcttttgaacaattttgcaatgaaagaggtcttgaacatgaattttcttatcctcgtgttcctcaacaaaacggtgttgttgaaaggaaaaatcgtgttttggttgagatggctagaacgatgttggatgaatataaaactcctagaaaattttgggctgaggcgattaacactgcttgttatatttcaaatcgggttttcttgagatcaaaacttggaaaaacttcttatgaacttcgatttggacatcaactcaaagtttcacatttgtgtgtttttggttgcaagtgctttgtcttgaaatctggaaatttggataagtttgaggcacgttctaccgatggattgtttcttggttaccacgcacacactcgtggctatcgtgtacttattttgcagactaacaaaatcgttgagacttgcgaagtttcttttgatgaggctagtccaggtactagacccgatattgcaggtacactgtcacaggttcagcgggaggatggtcgtatttttgaagacgagagcgacaacaacgatgacgacgaggaggtgcggttagaccggccagggtcgtcggctgagggttctgttgatgctgttcgagatggtcctccggagattactacttcgaccagtactggtacagaacgtggatcaactgcagaagttgctgctcctttgcacattcaacgacgacatccgccggaacaaattattggtaatataggtgagcggacaacaaggtctaaggaggaagtttatgtcaaacaaccaccaggttttaaaaatcctgattttcccaaccatgtttttaaattgtctaaagctttgtatggtttgaaacaagctcctagggcatggtatgataggcttaagaactttttgcttgtgaaaggttttacaatgggaaaggttgacaaaacgctttttgttcttaagcatggtgataatcaactgttcgttcaaatttatgtggatgatatcgtctttagttgttcgactcacgctttggttgtagattttgctgagactatgcacagggaatttgagatgagcttgatgggtgagttatcgtactttttgggattgcaaattaagcaaacacctcaaggtacttttgtgcatcaaacgaagtatacgaaggatcttttgagacggttcaagatggagaattgcaagccaatttcaacaccaattggttctacagctgtgttggatcctgatgaagatggtgaagctgttgatcaaaaggaatatagaagtatgattggatctttgttgtatctaactgcttctaggccagacatacaatatgttgtatgtttgtgtgcacgctttcaagcttctcctcgtgcttcacatcgtcaagcggtcaagcgaataatgaggtatttgaatcatacacttgagtttggaatttggtattctacttcatcttctatatgcttaagtggatattccgatgctgattttggaggttgtataattgataggaaaaatactagtggaacatgtcattttcttggtacatcattgattgcatggtcttctaggaaacaatctagtgttgctcaatcaactgctgaatctgaatatgttgctgctgctagttgttgttcacatattctttggcttttatttactttgaaagattatggtcttacttttgagaaagtacctctcttttgtgataatactagtgctattaacattgctaagaatcctgttcaacactcacgcacaaagcacattgatattcgttttcactttttgagggatcatgttgagaagggagatgttgaattgcagtttttggacaccaagttgcaaattgctgatattttcactaaacctttggattctaaccgatttgcttttcttcgtggtgaattgggaataattcatccttttggcatggtttga

SEQ ID NO: 18723 - DNA, 2331 bp, Oryza sativa
  Clone ID: PAT_MRT4530_24254C.1
atgtctactttgactttggattcactttatacaaaattgaaaacacatgagatgaatgttctttctcgaaaagttgattctaagtcgaatgctttggtttcttcctcttcctctttggatgttgatgcttcttcatctacgtcgtcttttcttgctgtttttaatgccacatccgatgatcaactcgaacaaatcgaggaggaggatctggctttggttgctaacagaattgctcgagctatgaataatgcaaggaacaggaaaagaggtggtccaaatcgttgctttgaatgtggttcaattgatcatcttcgttcgcattgtcctaagcttgggagaggcaaaagagaagacaaagatggtgagaagaccaacaacaacaagcccaacaacaataggtcgaagcgttcacaccaggggaggaagatggagaatcttaggaaggcttttcaacaagtttgcgccgcattcgagccactaagtgatgtagatggtgaaagtggagatgatgataagggaaagagcgtctccgatgtttgcttcatggcgcgtggtgaatctgacacagagtatgaagataatgaggtgagtgatgaagctattaatattttgagtgctaaaaataaaaagtgcgagaagatgtataaaaaacaggaatttttcattgaatctcttaaatctaaaattgataggttaaaatctcttattcctaatgatgatgattgtgaaaattgtgagttaaaacaacctcatgatgttttggattgctcaacatgtaatttgaataagatgaaactaaaagatgatttaggtcgtgttgagtacatggaagatgttgtgaaaaacaatgaagttctttcttgccccaaatgtcgtaaaggcaaaggtgtcatggtagattgtgaaaattgtgctaatttggaaaaagaggtttcttatttgaataattctttgttaagattttctgatggtaaaaagaacctcaatatgattttggatcaatcaaaggtgttggtgctagaagtggctttggtggcaaggaaggagaacgtgtggattgttgattccggttgttcgcggcacatgaccagtgataaaaattggttctcctccctaaagaaggcatctaagactgaatcgattatctttggtgatgctgctacaagtgctattctcgctacaggtatggttaaggtaaatgataaatttgaattgaagaatgtagctttggttgaggacttaaaacttggacatgttggttttgatcatctcactaggttaagtggtttggatcttgttcgtggtttgactaaacttaagaaagatcatgatttggtttgtacaccgtgtcgtaatgctaagatggtttctacttcacatactcctattgtttctgtgatgacggatgcaccaggacagctattacatatggatactgttggtccagctagagtgcaatctgttggaggaaagtggtatgtgctggttattgttgacgatttttctcgatattcttgggttttcgttatggcaactaaggacgaagcttttcaacacttttgtggtttgtttcttcgattggagcttgaatttcctggtactttgaaaagaattcgaagtgataatggtggtgagtttaaaaatgcttcatttgaacaattttgcaatgaaagaggtcttttacaggaattttcttctcctcgtgttcctcaacaaaacggtgttgttgaaaggaaaaatcgtgttttggttgagatggctagaacgatgttggatgaatataaaactcctagaaaattttgggctgaggctattaacactgcttgctatatttcaaatcgagttttcttgcgttctaaacttcgatttagacatcaacccaaagtttcacatttgcgtgtttttggttgcaagtgctttgttttgaaatctggtaatttggataagtttgaggcacgctctactgatggattgtttcttggttacgccgcacatacacgtggctatcgtgtacttattttagggactaacaaaattgttcagacttgcgaagtttcttttgatgaggctagtctaggtactagacccgatatagcaggtacaccgtcacaggttcagggggaggatggtcgtatttttcaagacgagagcgactatgacgacgacgatgagggtcgtcggctgagggttctgttgatgcttatcgagatggttctccagaaattactacttcgatcagtactgatacagaacgtggatcaacttcagaagttactgctcctctgcacattcaacgacgacatccgccggaacaaattattggtaatatag

SEQ ID NO: 18724 - DNA, 1788 bp, Oryza sativa
  Clone ID: PAT_MRT4530_24255C.1
atggctgttaggttttcaactaagcctcatgttttcgatggaacggattttgaccgatatagagtgcagtcttacattatggctgaggattatgatatttggagaaaagtttctcatccttatgtgatctctaaacaacttagtactgctgctttaaaaactgagtttgaacaaaattgcaaagctcgcaatattcttttgagtggaatttctcgttcggactatgatcgtgttgctcactttcaaactgcccatgagatttggattgctttgagtaattttcatcaaggaacaaataatattaaagaacttcgtcgagatcttttcaaaaaggagtatattaaatttgaaatgaaacctagagaagctttggatgactatctttttaggtttaataaaattctgagtgatattagatctttagatttttcttatgatgttaattatacacagtctgagatttctcgccactttttgaataatcttgacaggtctatttgggagatgaaagttacatctattctggaatctattgatatgactacttcgactttggattcgctttacacaaaactgaaaacacatgggatgaatattctttctcgtaaagttgattctaagtcgagtgctttggtttcttcctcaactttggatgttgatgcttcttcatcaaagtcttcttttctagctttatttaatgccacatctgatgatcaactcgaacagatcgaggaggaggatttggctttggttgctaaccgtattgctcgagctatgaacaatgtcaggtttagaaaaagaggtggtccaaatcgttgctttgaatgtggatctattgatcatcttcatgcgcgttgtcctaagcttgggagaggcagaagggaagacaataatgctagagagaagaccaatgacaacaagccaaagggtacgttcaaaggggagaaggtcaaggaggttctcaagaaggcttttgatcaagtctacgccgcatttgagccactgagcgatgtagatggtgatagtggagatgaagataagggaaagaacatctccggtgtttgcttcatggcacttggtgaattggattcagagtgtgaagacaatgaggtaagtgctcttgaggaagctattaatattttgagagcaaaaaatatgaagtgtgagaagatgtatagaaaacaggagtttatcattgaatctcttaattctaaaattgctagattaaaatctcttattcccaatgatgatgattgcaaaaattattggctcataaacagaaaaaggagagagaggttgcttttgcaaaatcaaagtggcaaaaatctggttttccctcgaggaaaccggttagaccgcagtgggtcccgcggtcagaccggctactgtgcggcggtcagatcgggcaccggtcagactggcggtacagaagcggtcagaccggccactgtacctcggtcagaccggcctcggaggaattttgctgaaaattctcaaactgtttttgcacgtggatatatgcctattggatcttctggtcgtgtgcctcagtattggattcctaaatttttattatcatctaaccccagtactgaggcttcgacatcttcatgtgtgtacgctttggtggcaaggaaggagaacgtgtggatcgtggattccggttgttcgcggcacatgaccggtaataaaaattggttctcctccctcaaacaggcatccaagactgaatcgattatttttggtgatgcttctactagtgccgttctcgctacaggtttggtcaag

SEQ ID NO: 18725 - DNA, 418 bp, Oryza sativa
  Clone ID: PAT_MRT4530_24256C.1
atacagctcaacccgaaagcaagacctcatcaaaataaaaataaagcaaaagggactctatccatgcgcggcaatcatcttgaagcatatcaactcaacccgatgtcgtacaccaagtcgtattgtcggaatcagctgtatcggcttacccagtctgattcagacccagccgatcctgatcgtagccgatttggactccagccgattcttactctgttcccgaatcgatcttcgtcttcgattccacctcgatctaatcctcatctccaatgctgatattgctaaatttggtcgttaacagtaggatgtgagggggagcattttagtggccggtcagaccgccattatagcgccggtcagaccgccaggccccctgccggctgtgcacagcccttgcacaagccggcaaccccacaca

SEQ ID NO: 18726 - DNA, 599 bp, Oryza sativa
  Clone ID: PAT_MRT4530_24257C.1
cacaaaacaacaaaaaggatacacaaacttttttctctaagaacaatacagatgatgggcggggagagatcctttcttcccttcctaagctctttctgtgaagtctgtatcctaactccttctgcagtatgcccatattccacttgttattccaatcgtactctattctcagagtcagtggcacatatttcaggaatacacaaacgttttgcagccgctgatatatttgatcatccacagtcaaccatctgaatgactgtgagaacacatttgagagcaaaatgggacaggcaagcctcatgatattatatcaagctcacaatagttgcatgcaaactaaatcaaattttcaacagatgaacaactgcttgatctacttatcatttccctttattcacatgcagttctgaaaccacaatggtcacattattttaccaatgccttgccacacatataaaaactacactttcagatcaaatgccataatccttcaatcctaccaatacaaatggtagctgctgtgccactctagtgagaggtggaagagaattcagtactgaaaggcacatttagacatctgatgtaagaaatggatagtc

SEQ ID NO: 18727 - DNA, 2473 bp, Oryza sativa
  Clone ID: PAT_MRT4530_24258C.1
atggcggacgccgtgcagtaccgcctcgagcggatgtccgacgagctcgacgacctcgagcgccggggcctcttcacccgcgccgagctcgccgaggtcgtccgccgccgccgcgacttcgagttccgcctccgacgccgctccccgctccgctccgacttcctcgactacatcgcctacgagctccgcctcgacgccctccgcgacctccgcaagcgcgccatcatacgcgccacccccgacaccaccgaccacgatgctgacgccaccgacaacgacagcagcaagaagaagaagaagaagaggaacaagggcaaggccaagaagtggaagaagtccgtctccgacatcgccggagtcctccgcgtcctcgacatctacaggatggccaccgtcaggtacaagggggacctcgacctctggttccgttacctcgagttctgtcgcgacaagcgccatggtcggatgaagcaggcaagtctccccagaaccttcccaccttcctgtctcatcctgcccattacttctttctccatactatgcggcggtggggacatggctctggcacaagctattcgttaccaccccaaggttcctgggctctggatctatgcagcagcatgggaatttgatcagaacttaaatgttgctgcagcacgtgctcttatgcagactggtcttagatcttgtccagaatcagaggatatgtggattgagtatcttcgcatggagcttacctatcttaacaagcttaaggctcgaaaggtggctcttggagaggatgtgaagacactgcaaaagaagaataatgatgcaagcacttggaaagaggaaaataaagaactgttcatgtcactgaatgaacaagatgaaggtcccaaggagcctggctcacagggagttgctttggaggggaaggaagacctattctggcagcaagggctgctaatcattcaaaccatataccatggtgctacaaaagctcttccttcaagcttaaccttgcggaagaaattcttagagatattgagtagtgttgacctagcacattctgacgaactgaaggtagaggtcatggatgacctgaagaaagagttctctgacagtgaggactactgggattggcttgctaggcttcagcttagtgactcaactagttccagtaatttgaatagaatggaagctttatcaaataaactgaataaatcaatacaggtgtatgatgaagctgtcaggaggttgccaacttccagaatgtattccctgtatgcaaaattttggatgggtgttctgtttgctgatacagaagattccatctcattgtttcatggcggtgaatttgatgcttcagggttcacttcatgtatactgaaagtctatcaaaatgccgaatcaagcggttgtcttactgaagatcttgcttgccaatatgtgtctctttatttgagacttggaggtttggaggaggcacctggaagattagaggaagctaggaatcttgccaaaaagctctgcaatggtcctctttcacatgctgcggatttgtggaacctgagagcatctattgagatgaagtcacttgctacttctactggcatttcttcgttcagcaaggagaacttgagttctctatttgatctatttaatgttgcacttccaaagttacccatacctgaggctgaggaattgtggcacacggccatgaaattgttttctcatgagaaggtttatttcgaaaagctggtgaaatgtgcaatgttatcattaagttctgctggtggaaatgattgtggagcttcggtttcttctgctattgttggatggattttacaaagagatggtatcaagcaagctagaaagatgtataagagatttctggctttaccacgtccaagcttcaagttcttccagtactgcatagagttggaaacaaaccttgcatcaatcggaaaccaagacagccttgtgaatgctcgtaagctgtatgatgcagcgctcgatctctatccccaggaaagagaactttggaggaactactacaacatggagctgaagttgggaacatcagaaacagcaaatgctatatactggcgcgctcgtaaggtgctcggtgattccagtgccctggacattccccacagctagcaatgtgtgacttgtgtatcatgcaatatcatttttgatctgatttgattactttgttgtttaagcgtatcaagtcaagtagcgcggtggaagaaaattttggctagtctgtctgttggatttgtgttatgagcccctaactagggttaaaatttgcatgctctgtatgattgccgattaaaagcttgtacagatacggcgatagtggccgatccccgaaacatactactagctattggtgtttgtgtcaatttagtttgtgccaagcttgccttgacaaagaaaaaaaaaaaaaaaaaaaaaaaacctgcagcccggggatccacta

SEQ ID NO: 18728 - DNA, 1629 bp, Oryza sativa
  Clone ID: PAT_MRT4530_24259C.1
ctcgtgccctcgtagctgccctcgcgcgccaccaccatgccgtccgccatgaacatgatcaccgccgccttccgccgatacctcggctgcttctccgccggatcaacccaccgccgccgccgcggcgccgctgaacccgtcctcgccggctcacttacacttcccgccgccgccggcggtgacaacgcggccaggcgccttgatgtcgtcgtccccgcccccagccgccctgatggtgtcactgtgagcggcgaagatttcatcggtagccttcctggccatgtccgctccgccatcgtgtcgcgcctcccggtcgcggacgccgccgctcgcaccggcgtgctgtcgtcgtcgcagtggaacgggctctggtcgtcgacgccgctcgtgttccaggactccgacctcatcctcgccgcgaacttcaccagcgtggcccccgtcgccgccaccgtgtcccgcgtcatcgagaaccacccgggccccttccacaccgtcaccctgaccagctacttcccggagtccgagcgggacaccttcgccggctggatccgcgccgtcgccgccaagggcgtccgcgacctcaccctgcacaacatcccctggtcgggcctccacgtgctccccgccgacctcctccagtgctgcgccgccctggagcgcctccgcgtctgcgtctggcggttcccggccacggccggcgtcctccaccccggcggcggcgacggcgacggcgccgcgccgccgtcgttcccgcgcctgagggagctcgtcctcaacaggagcgccatcgaggaggccgacctggagaacgtggtggcgtgcagcccggcgctgcggacgctggtgctcgccttcagccgtggcgcgccggggcgcgtccgcctcgccagcggcagcctccggtgcgtcgtgctgtgccagtcgctggtggacgagctcgccgtcgtcgccgcgccgctgctggagcggatcgtgctgcggtggtgcgcgtcgggcacccaccacggtcacctcatgaggatcaggatcagccgggcctcgtcgatcaaggcgattggttacctcaaaccaacctgtcatggcctgcatattgatgccactgttataaagcctgggataacggctagccccgatgaagtggctgttccaagcgtcaagatattgggtttacaagttcgatttggagttgctgcggaagcaacgatggtgtcctgcatgctcagatgttttcctaacgttgaaacgctgcatatcatgcctatcgaagatcctcagtctacccagcttgatgactttgagttctgggaggagatcaattcagttgaatgtgtcagatccagcatcaagaaggtagtgttccatgggttctcctggaagaattctgagatagcgttcatcaattccatcgccgaaggaggactggtgctcgagaagatctgtatcttccagagtcgacatggtgctgccccagatgatgatgaactgaatgctaagctgagcatggtagcttctctgaacatcggccttggccgtacagagatcatattttcaggtgaagatccaacctggtgctatagggcggcggctgatctttctcgtgctgatccttttgattgctgccgttga

SEQ ID NO: 18729 - DNA, 365 bp, Oryza sativa
  Clone ID: PAT_MRT4530_2425C.1
atgggtcataccaacctccactccgccggaagcaggtgcaacgtggaagcacggttgtttgctgatgacgcgaccggcgtcagaccacctggaatgtatctggccggggctgacgtgccaactctaggagttcccacgccggctctggctagggacgagtgcctggaggctctcatcattccgacgggacggggcgaggcgtgtgtcaagccgcctggggtcggggcgccccagcccccggggggtcgaaacgggagcggcccgacccctcggggagatagagggaggggcggcctcatcaacctcgggcccgaccccccgagggggtcaggccacgtgggtgaccgcggctgcccaaacctcta

SEQ ID NO: 18730 - DNA, 606 bp, Oryza sativa
  Clone ID: PAT_MRT4530_24260C.1
atggcaatcaccttgaagcacatcaacttgaacccgatgacgttcaccggcgccgcggcgggggccggggtggcgggggtggtcggcgcggcggcggtcgcctcgccgccgcccgtcgaccgcgaccttcccgtccgcacccgccgcgatggccgccgcctgaaagcccgaccccgcgtcaccgccaaaggcgccgttggcgaagaagggggaaaggagaaaaattcagacttggagacgaagctggtcgtgggcatcgtcctcctactactggcggatgcgacgccattgccactgcggcgaaaggtgaggggcgccgctgcagcggggcggtgggcggcggtgcggtggtggctgctctcgctcgccgcgataggcgccaccatcaccgccgatgcaacgctgctcgtcgtcgcgctccacgtctcctcctcctccacctccggccccgcttcctcctccggcgtgccctatcgccactccaagcagccgcggaaggccgaggagctgcggtgggaacgccgccgcaactcgcttcgcgcccagccagctactggaggcgaccgccgcaacatggccccaccttttttattattttatgtgtaa

SEQ ID NO: 18731 - DNA, 3807 bp, Oryza sativa
  Clone ID: PAT_MRT4530_24261C.1
atggcggcactgaaaaagcaggtggccgatctcaaaggagtgaggatgttggaccaacagaggaacatttatctgggtcaggcaggagaagggaatcagtacgctgaggctgtcctcaaggggccaagattagaaatccctctgttcagtggagaagatccaatagattggcttaagcagtgtgagaagttttttgagattacgggtacccctctggatcaatgggtgaatttagcggtggctcatttgaatggcagggcattgaaatggttcggaggaattggtctgccatggcaagtgatagcttggccacaatggtgcagcatggtctgtactcgattttctgctgcgagtgaacatgaggcaattgagttgttccaaaatgtgaaacaatttggaacaacagtggagcaatatattgacaagggggtcctctaggtggatttagtaaagagagaccacccttatctccaggagcaatatctgaccagctgtttcattgggggattgagagcagatattaaatacgatgtgtgtgggctgctaatgccagaaaaatggtgggaaatttcaaccgaaacaggaatcagaatccacttggaggtaatcaggggcggaatgctaaccataggggacaaaacagaggtgagggagataggagagaggaaaagaagtgctggttctgtaaagaaccttggtttccaaggcaccagtgattatgcccttaggaattcttatcccttgaaaaatactgacacaaagaaagtagtagttgctggtggtggagaacttaagactgatgtcatggtgccagacatcagctatgagattcaaggagaatgctttactaaccaatttaagttgcttcctctcaagggatatgatattatctggggtgctgattggatctataattatagccccatttcgctggatttgaagcaaagaattttgggaattacaaagggaaacaaagtaatactcttacaagatttcactaaaccaaataagcactttcagatcagtggtaaaagattggagaaaatgttaaagaagggggctcttggtatggtgatacaagtcaatgtcatgtctgaaactgtggaggaagaagggcatgttatacctgaagacattagtgacattatacaacaatttccagctgtgcttaaagaaccaaaggggctaccacctaagcgagaatgtgaccatgtgattaatttacagagtggggctgtaccacctaacatcaggccatacagagtgccacattatcagaaggaagcgatggaaaatattatcaatgagctgattgaatctaaggagattcaaactagtgatagtccctattcatctcctgctgtgatggttcgcaagaaagatggatcttggaggatgtgtgtcgattaccgacaattgaatgcacagactgttaagaacaaattcccaatgccaatcattgaagacttgttagatgaattaaatggagcaaggatattctctaaactagaccttcggtcagggtatcaccaaattaggatggctgagaaggatgttcataaaacagcatttagaacacatcttgggcattatgaatatcaagtaatgccattcggtttgacaaatgaccctgccactttccagtcacttatgaatcatgtcctagcaccattcttaagaagatttgtgttggtgtttttcgatgacatattaatctatagcaaaacaagggcagagcatctggagcatgtgaagttagtaatgcaagctttgcaagacaaccatcttgtaatcaagcttaaaaagtgtgcttttggacttgcaagtgtgtcttacctaggacatgtaatctctcaggatggggtggctacagatcccaagaaggtggggaaaattaaaaattggcccacacccaaggatgtcactgatgtaaggaaattcctggggatgacaggatactaccgaaggttcattcaaggctatggtaccatttgtagacctattcatgacatgctgaaaaagaatgggtttcaatggggagcagatcagaccacagcttttgagactctaaagcataagctgagaaccagccctgtcttggctttgccagactttgatcaagcattcaccatagaagcagatgcttgtggagtcggcattggggcagtactaatgcagggagggcgacccattgcatttttcagtaaggctttgggacccaaggcagctgggcaatccatatatgagaaggaggctatggctattcttgaagctcttaaaaagtggaggcactatgtgttgggcagtaaattgatcattaagactgaccagcaaagtttgaaattcatgatgggtcagagattggtagaggggatacaacacaaattgttgctaaaattgatggagtatgattataccatagagtataaatctggaaaagaaaatttagtggctgatgctctgtccaggctaccacaaaaggaagctgttgcagacaggtgtcacccaatgactgtggtgatacctgagtggattgtggatattcagaggagctatgaaaatgatgtacaagcacacaaaattctcagtttgattggtactgcagcagatccagatagagaatataagcttgaagcaggattgctaaaatacaaagggaggatctatgtgggagaagccacggatatcagaaggcaattgatcacaacctatcattcatcttcttttgggggtcactcagaaataccagatatggcatggactcatattactatggactttatagaggggctaccaaaatcacaagggaaagatgttattctggtagtggtggatcgtctgaccaaatatgctcatttcatagcattagcccatccatatgatgtggagcaggtggtagaggcgttcatgaacaatattcacaaactgcatggtatgccgatggtcatcatcactgacagggaccggatttttactagcagtctgtttcaggagattttcaaagcaatgaaggtcaagctgagatttagtactgcttatcacccacaaatggatggacaaactgaaagagtcaatcaatgcctggagtcctaccttagaaatatgacgttccaagaacctcacaaatggtattcatggctggcactagctgagtggtggtataacaccactttccacaccgcaattcagatgactccgttcaaagcaatgtatggttattctcccccacaaatcaatgaattttcagtgccatgtaacatatcagaagaagctagggtgactattgaagaaaaggaagcaatactgaacaaactcaagaatagtttggctgatgctcaacaccgaatgaagtattttgcagataaaaatagaactgaaagaaacttagaagttggggatatggtatatttaaaattgaaaccctatagacagtctgcatttgggatcagagggtctctcaagctaagatccaagttttatggaccattcaaggttcttcagaagattggccaattagcttataagcttcagttacctgatgatgctcagatccaccctgtgttccatgttagtcagctcaagaagcatctggggaagcatgctattcccatgtccaatttaccctcagtaggaccagatgggcagattaaaacagaaccactagcagttctacagaggagaatggtacccaggaaaggagttgctgtgactcaatggttgatattatggcagaatttgtctcctgctgaagccacatgggaagacgcatcagtcattcaagcaatgtttccatcgtttaatccttga

SEQ ID NO: 18732 - DNA, 1050 bp, Oryza sativa
  Clone ID: PAT_MRT4530_24262C.1
aacacaactacgatgtaaggtgaattggaagcgagtctgcagaccgataaaatatggtggcttgggagtatcaaacctccgcataataggaaaggcgctccgactacgatggctttggtatgaatggaactttcactgacaagccatggatcggtatgccaacgccctgtgacgaccaagacaaggaactctttgctgcctcaacaacagtgttcattggagatgaaagaaagcattcttctgggaatctccatgggcatcctacagcacgctaaaggctatggcacctaacctctactgccactctaagagaaagaaaagaacggttgtcaaggccttagatggcaataagtggatcgatgacatcaggcacaaccttaccacatcactactgactaaattcttccaagtcttcgagctgatctagtccttggacactaccctaacccaaggagtggaggacaatattcgctggaaatggacaccgccgggaacctacactgctaaatcagcttaccagatgcaattcctgggtagcacatagtcagcttcagcaaacgcggtctggaaatgctgggcgccgtccaagtgcgaattcttcacctggctcctcctccaaaacagaatctggacggccgatagacttcaacagagggagtggccaaacaactatttctgtcaactctgcttcagaaacctcgagacggtccacccctcttctacgaatgtccaagcacgaggacaatctgggacactgtagtgacaaggctgaggattcctcagttacgaccgccgaattagcccaacacatcttcccttaaggattggtggatccagaccatccatgccatggctaaggaaaaaataaatatggtcaaatcgatccttattatactttcctgggaaatatggaaagaaaggaatagcagggttttccacaacatcgaagcttcattacaagtaaccattaatcgggcgattgatgaagtatggctatggcgtgcatgtggaccacgggcattcaatccctgcttccggacacccgtggaa

SEQ ID NO: 18733 - DNA, 447 bp, Oryza sativa
  Clone ID: PAT_MRT4530_24263C.1
atggccgggccgacggacggcgccggagggactggagacggcggcgagggcgggaagggcgggggaggcggactgcgacggagggggcggagaaggcgacgcgggcggaggagagggacggcgactgaggaggcggacaaggcggcgacggcgagcgatacggacggatgcgggcaaggcagcgacgccggggaaggaatagcctacgatgtgccccaacgatacggaggtgcgccaacgatacggtgccacatcactaatcaacgggagaagctgtcggccgctgccgcgccggccgccgccgcgccggccgccgacgcgctacccgccgcgaggccccgcggtccgccgccgcgccgcagcgccgcccaccaccgtgaggccgccacccgggcctgcgcccgcctgcgcgccacctgtgaggccgccggccacccgatgggatga

SEQ ID NO: 18734 - DNA, 102 bp, Oryza sativa
  Clone ID: PAT_MRT4530_24264C.1
atggcggacctcagcgacggcagcgcgaagctgcgggaggacacagagaggcatttgctggacggcaagctcagggtggcggtcgcatccaaggccagttaa

SEQ ID NO: 18735 - DNA, 298 bp, Oryza sativa
  Clone ID: PAT_MRT4530_24265C.1
gcacgaggctcatggctgaccctgctccacataatctgtttgcttgaagttgagcacagaatcatttgcagctaacttcatgacacatttttatgttgcatgcttcttttgcggtttagactggtgatagattatgaacatatttggggagagctttatttcgcagtttgctccgtttattcctttatcctgaatctcctggctgttgatatcccttcagtttttgtataaatgtgtcctaggagtgaactaaattggttaatgaaaaattatggtgctccatgcggctgtgactgac

SEQ ID NO: 18736 - DNA, 367 bp, Oryza sativa
  Clone ID: PAT_MRT4530_24266C.1
acttcaaatccaagctgcccatgaagatcaagcgcagttaacaaagcaggcacacgaatgcaactcactgccagctaccacactgaacacgagggggaaggcgcggatagaagactggcatgaaaaccgttaaaagacaggcctaggtgcagttgaactggatgaccgacttgacgccctgggagacggagtgcaagaacagcttaaccctgaggaccatgatgacggagggcttgatcttggggcaggtgatggtcagctgttagctccttcttgctaggcacggggtctacttcccgagtgttcggaacatgtccgtgattaacgattccatgaccgacatggactcggatgagattgaaatgtt

SEQ ID NO: 18737 - DNA, 1001 bp, Oryza sativa
  Clone ID: PAT_MRT4530_24267C.1
ctagccctgtctctgcccgatggcgccaccgccgccgcccaccaacgttgcctgcgacggaggaagggatggagaactagccccaattccgccgatgacagaggaagggatggagggcttagcccccgtctctcgggcgccgccgccacctctgtcggcatcaccgccgctgtgctgcttgccagatccaggcgagtcttgccatgtcgccccatccaggagtacggaggaggaagccacgccgccagccaaccatagggcgccacacctccagccaatacagagcatcgtagtgatggctaggatttgaaaaactgcaactgaatctgaagaaccaaaggagaaggggaggaaaagaaggggagaaggagatgatggagaggaaacaaggagggcgggggtggcgccgctgccggctccaccgccggtgacagcctcgccggtggcagcagggtcggccggtgggagatccttggtggcgaagttttttggtctcccgggttgctccgtgggagcgacacggaagttggttcgactcatcgtcgccgtcgcggagcggcggtgaaggcgggtgctatctccatcggcgacgaggtcggagcaccgacgaccacgccacaggtcccagtctccctcgaccctagcagccgcccttagccctccgccctctgccgcctctgtcccatccgccgccaccgtctccgtctccgtttccgtctccgctccgcctgcgccgttgccgagcgtctttccctcgcggcacgccgtcgccgtcgctgggtgcgccacctctgcatccgcctccatctcacgccgccactgccgccgtcgctgccgaccgccgacgtctggatccggcctcttggctcggcggggtccagctcggtggtgaggagatccaaggccgtcgagcgcatcctggatctccggcaccaattgaccgcgcgcatggaactggcagtggcagtgaggagcacggtgacggcgcgccaatttctgag

SEQ ID NO: 18738 - DNA, 870 bp, Oryza sativa
  Clone ID: PAT_MRT4530_24268C.1
atggcaacgatagtagttcctccagttaccccttctcctgctgaagatgctgatgcactcctgaaggctttccaaggctggggcactgatgagcaggcagtaataggcgtattagctcaccgggacgcaactcagaggaagcagatcagactgacctatgaagagaactacaacgaaaacctcatccagcgtcttcagtctgaactttctggtgatttggagagagcgatgtaccactgggtacttgaccctgttgagaggcaggccgtgatggtgaacaccgcgacgaaatgcatccacgaggactacgctgtcatcgttgagatcgcgtgcacgaactcgtcctcggagcttctagcgcttctgcttgctctagtgagcacctacaggtacgacggggacgaggtgaacgatgcattggctaaatcggaggcaaagattctccatgagactgtaacgaatggtgacacagatcacggcgaactcattcggatagtcggtacaagaagcagagcgcagctcaacgccacattcagctggttcagagatgagcgcggcactagtatcaccaaggcactgcagcatggagctgatccaacaggctactcgcacgcgctgcgaaccgcgttaaggtgcatctctgatgcgaacaagtacttcgtgaaggtgctaaggaacgcgatgcacaagtcagggactaacgaggacagcctgacccgtgtgatcgtgctgcacgcggagaaggacctcaagggcatcaaggacgcgttccagaagagggcctcggttgccctggagaaagccatcggcaacgatacatctggtgactacaagagtttcctgatggctctacttgggagtggcatctaa

SEQ ID NO: 18739 - DNA, 486 bp, Oryza sativa
  Clone ID: PAT_MRT4530_24269C.1
acgagtgtgtgcacacgcattgggagaataggcctccgaaaccacgcactgctgcgacgtttgcacggacgggcgggcgatcaggtttcttgggagcgcaaggcgcactcactgttagtcaacgtctacttcgtcttcaccaatatgtcgaacactggagacaacggcaacactggagacaaggagaaggaggttcccgtcaacaccaacggaggcaatactgcctcaaactctagcggaggaccattcttgggctccactgccttcgttgttatcgccgctgccacaacccaaccctccttcgccgtcatcaccgcgccgcaacccaaccctccaccgtccccgtaggcttgctgttgctgtagcctctagggctttcaccactgcaacccctagggcctctgccaccgtagcccctagggtttccgccactggtacccatagtgttttcaccaccgccgcccctagggttttcgtcaccagcgc

SEQ ID NO: 18740 - DNA, 492 bp, Oryza sativa
  unsure (1)..(492): unsure at all n locations
  Clone ID: PAT_MRT4530_2426C.1
tgtcattagcggggagaggagcgggagagagcgggtcggtattattccgagctcggtatccattgaaccgaaccagctctgagtgagagagagagagatcggagctgttgtttcttctcgtttctttgattggtggcggtgttgaattgaattgaattgatcgattgattgtttcttggtgtggtggtggccgcgacggcgagcagcgctccaaggtacatgacctcggcggcgccggcggcggcgcagttcgctgcgccggcgccggcggcgatggggatctacgaccgccggcaccatcctctcgccgccggcgtctggggagaccaccccttcatccgcccggacaccaccgncagcaccagcaacgccgccgncgnctgcatggtcgtcgcgccgtcgccgctaacagagcccaagttcgagagccagctagctctgcctctgcagcatggagacgatcaagacaacgctgcagctctgcaagaatcg

SEQ ID NO: 18741 - DNA, 438 bp, Oryza sativa
  Clone ID: PAT_MRT4530_24270C.1
gggaaacgaataaaatcattattgcaaaaacataattttattcttaatattgttagtgtacacaacaccaactggatcataatttcgtcgcactaaacccattttccccaaccgaaagacaacgaactcgctggccacaaaaccattcaaccacaattaaccactgctaagctacggtacccccacttgacttgccggggtacgaagtaggtggggtacgcccaggcgttgatggtgacggggtcggcaaggtggttcggagaggttctagagggggcaccttgccggtgactgatggacctggtacgcaagaagtccgaacataggagaacatggcgaggtcggccgatcttgatcttgtttaccttgagactccgagaacgcctcggggatattggtgaggcccagcggagtcaaaggcgctgacggagtagagcg

SEQ ID NO: 18742 - DNA, 1899 bp, Oryza sativa
  Clone ID: PAT_MRT4530_24271C.1
ttgttttttttttttcacagaaattgaaaattattatacataacccgtgtgtgcttcctcggacaaaaacatcttcagaggaaaggaagaaacaagctctgtgacactttattacatcgagcaaggaatagctgattatttattatacatcggtttagtaaatgaaataacgacaggatatactggacaagaattttcgaggtctgtctttctcaatcatggttttcaccatttatgacaaatggcctggtgtttctctggctctaaagcataaatacaaaacttcaagagtttcttgtctgggtcttaggtctgcaggaagctcgcgtacttcgcaccaaggaaaagcctctgcacgcagagcagggcattcttcctcacttcggcgttctcgtggttcatgagcttcatcactcggtccttcgccttcagatctgccaccacaatgcgcccagaagggtggtactgaaggaactgtgagaggtcatagcaggcgacagcaagagcagtcgtgtcggccgatgtgtcgatgattgtcataagcacacgtagaatctggaaatcattttcttcaaaattattaatgttctcgcgccagaaacttgggtctttgtgcattggagaccagtcaagatggccaagaagaacttgttgcttgtacttctcaaatgaactcaacttcttaaggttgtctttgagtcctatttctagctgattcagcgcatctaataaatcctcatcagtccatgcttgagctttcaaattctgtactatgtgtggcagtccaagatcaatcatttgggcagcaaacgcaccctttgcaagcaagttacggatagacatgataacgaccctgacaaccttctcttttgttgaacctttcacaacctctacaagtcttggcataacccttgtagtggacaaataatcaacggctgcatcataaaaggataaaagccagatgcagaggcaagtttcgtagagaagctggatcgactgttgtgtggaagctggagaaattaaaggaatgagcagttttacaccatccgcctgaacaaataaagctctaacatactgctctcttagcaaagtggcaagacaatgcatagcagtaggaacagaacagtttgggtgggtaggatatgtcagcttactcttgagattatcaacctatccatttggaactatgccattctgcatcttggttcgtgcacttattatttgggtcaatatcttacaacttttttcttgcacaaaccagttacctttcaagagcaatcttaggaaagggtcgtagatgtcttcaccagagagagagttatcatagaacagtgctgctcgtttaggatttactgcaagcatctcatcaatcagggcaagcacatattcaacagtatcttccttggagatgttccgcaagatattcaggaacactcgaacataggatggcccatcctcatcaagcaaaggacctcgttggctttctggtttgtggtcataacgtcgcaaaagctgaaggcatgtcccggaaatcagcttatttgccatgtatgattcccatggaatatccctcttgagaacctgctcggtggtcagctccgcgtgatccatcaccgggtgtccaaagagcccacctggcgcgatgggggaccgggcggagggagggatcgggaggtgcgcgccacggggcaggggggggaagagatgagacgtagactccttcccgatcgccgacgccgccgcctgctgctgctgctgctcctcctccccgtcgtcgccgtcctcctctcccccaccacctccaccgaaattcaggaccgagtcgatgaagtcatcctccaccttcacctcctccccgccgccgccgccgccgcccctcgccctcgcgcgccgcggcat

SEQ ID NO: 18743 - DNA, 221 bp, Oryza sativa
  Clone ID: PAT_MRT4530_24272C.1
gccacgcgtacctggatggctcctatcacggtgacttacggtgaaaacggatgggcctcgacaccgggccagagaacttcgagcggctgagggggtcggatgggtaacactgactgtgggccatgctcgttgtgcctgggatgttggtgacagaggcactgaagctgaacaactgggtgcaggcgcacgagtgggctggcagagaccgccgggcaggccac

SEQ ID NO: 18744 - DNA, 860 bp, Oryza sativa
  Clone ID: PAT_MRT4530_24273C.1
gaccacgcgtccgatcagtgacacacagagctagctagcgatggcggccggagccggaggagacggcggcggcgagctgaagcttctggggacgtgggcgagcccgttcgtgcagcgggtgcgcctcgcgctgaacctcaagggcctcgcgtacgagttcatcgaggaggagatcggcggcggcaagagcgagctcctcctcgcctccaaccccgtccacaagaaggtccccgtcctcctccaccgcagcaaccccatctgcgagtcccaggtcatcgtccagtacctcgacgatcgagcgcgcgttcgcggagctgtcgagggggaaggggttcttctccggcgaggacaggccggggttcgtcgacgtggtgctcggcgggttcgtgggctcgatgcgcgcgtacggcacggcggtcggcgtggaggtgctcgacgccgggcgcaccccgctgctggtggcgtgggcggagcgcgtcgcggcgctcgaccccgccaggggcgtcatccccgacgtcgaacgcgtcgtcgagctctcgcgctacgcgaggaagaagtagacacggtaacgatttgtgttgtcctgtgcgtgtttgtatcgtcaaaataaatgtggcccaaaggttgtcatcattagtgagcattcttgccggtttcttctccagtttaagtgtctgtgttgcttttgtttggactgcggggatgttagaatatatggtagttagagttatattagaatggactgatttgtgtggacttctttcatatctgtaattctttcttatcttctccccatgtactcctatatatcggcccctgaggctcaatataatgggtccaatattcatagtaaaaaaaaa

SEQ ID NO: 18745 - DNA, 393 bp, Oryza sativa
  Clone ID: PAT_MRT4530_24274C.1
atggccatccagcaacacctcagcgttgaaatagaggtagtggccagcgtcctgagggacccgaggtctggtggcaaagatgacgacgagagtactaggagcaagacacgagcctttgacgctactacccaagccacggtggaggaagacgagttgacaggtgccgaggagcaaggccatgacgagattagtcggagtgaggtgcatggctctagaagcaagccattgccaaggagcaacgtgacgatggtggcagactcatgtactcgacggatgggccaccaacacgagctcgaccatagtgccagatctggaaagagggaagaagaggtgggtagaagctcgtggtcatcggggagaaatcttttgggtggtgggtgtaagcgatgttag

SEQ ID NO: 18746 - DNA, 2469 bp, Oryza sativa
  Clone ID: PAT_MRT4530_24275C.1
atgaagtcgtcatccactttaagagttcttcgatttgtctttaccgggtttcggtggtctaaccggcgatataccggcggtcagaccggcgacaagcgtcggtcagaccggcggcggcgacagcaagcgacaactgatctcggcggtcagaccggagatctaatcgcggtcagaccgacggcaaccaggcggtcagaccggcagagcaacttcggtcaaactacgatccgtcgaattcgagggtttaataaaattttgagtgatcttagatctgttgaatcttcttatgatgctaattatccacaatctgagatttctcgtcactttttgaatggtcttgacatgtctatttgggagataaaagttacatctattcaggagtctgttaacatgtctactttgactttggattcactgtacacaaaattgaaaacacatgagatgaatgttctttctcggaaagttgattctaagtcgagtgctttggtttcatcatcttcttctatggatgttgatgcctcttcatctaagtcttcttttctggctatttttaatgccacatccgatgatcaactcgaacagattgaggaggaggatttggctttggttgctaatagaattgctcgagctatgaataatgccaggaacaggaaaagaggtggtccaaatcgttgctttgaatgtggttcaattgatcatcttcgttcgcattgtcctaagcttgggagaggcaaaagagaagacaaagatgggaggaagttcaaggagaatcttaggaatgcttttgatcaagtctacgccgcatttgaaccatcaagtgatgtaggtggtgagactggagatgaagataagggaaagaacatctccggtgtttgcttcatggcgcgtggtgaatcggatatagaatatgaagatcatgaggctttggtggcaaggaaggagaacgtgtggatcgtggattccggttgttcgcggcacatgaccggtgataaaaattggttctcctctcttaaaaaggcatccaagactgaatcgattatctttggtgatgcttctacaagtgtcattctcgctacaggtttggttaaggtacattgtcacaggatcagggggaggatggtcgtatttttgaagacgagagcgacaacaacgacgacgacgaggtcggctcggccggtcagatcaggcgctaggccggtcagactgccggcacacctccggtcagactggcacaggaggtgcggtcagaccggccagggttgtcggctgagggttctgttgatgctgttcgagatggtcctccaaaaactacaacttcgaccaatactgatacagaacgtggatcaacttcagaagtcgcgggtcctttgcacattcaacgacgacatccgccggaacaaatttattggtaatatagcttcttttgaacccaaagatgtgtcacatgcattaactgatgaatcgtggattaacgccatgtacgaagaacttgaaaattttgatagaaacaaagtttggactttagttgaaccaccttctggacataacattattggaaccaagtgggttttcaaaaataaacaaaatgaggatggtttgattgaggaagtttatgtcaaacaaccacctggttttgaaaatcctgattttcccaatcatgtttttaaattgtctaaagttttgtatggcttgaaacaagctcctagagcatggtatgataggcttaagaactttttgcttgcgaaaggttttacaatcggaaaggttgacaaaacgctttttattcctaagcatggtgataatcaactgttcgttcagatttacgtggatgatatcatctttggttgttcgactcacgctttggttgtagattttgctgagactatgcgcagggaatttgagatgagcatgatgagtgagttatcgtactttttaggattacaaattaagcaaacacctcaaggtacttttgtgcatcaaacgaagtacacgaaggatcttttgagacggttcaagatggagaattgcaagccaatttcaacaccaattggttctacagctgtgttgaatcctgatgaagatggtcaagctgttgataaaaaggaatatagaagtatgattagatctttgttgtacctaactgcttctaggtcagacatacaatttgctattctttggcttttatctactttgaaatatcatggtctaacttttgagaaagtacctctcttttgtgataatagtagtgctatcaatattgctaaaaatcctgttcaacactcacgcacaaagcacattgatattcgttttcactttttgagggatcatgttgagaagggagatgttgaattgccgtttttggacacaaagttgcaacttgctgatattttcactaaacctttggattctaatcgttttgcttttcttcgtggtgaattaggaacaattcatccttttggcatggtttga

SEQ ID NO: 18747 - DNA, 1615 bp, Oryza sativa
  Clone ID: PAT_MRT4530_24276C.1
cacgaacaagatccaaaccacttaacctagtgaaataatcaaaaccaacatgtccaagtctacgatgccaaaacatcacatctttatcaaacttagcaaccaaacatgttatcacaggtgaaacaggatttttaaaatcagctttaaacattctttcatagcgagaaatattcaacacagaatcaccacaagaatcaaaaactttacttccagttttcttaaagtgaacctcaaaattttcatcaacaatttgtgaaaccgaaagcaaattgtactttaagtcctcaaccaaagctacattcttcaattcaaaatttttatttatcttaaccaaacctgtagcgagaacgacacttgtagaagcatcaccgaagataatagattcagtcttagatgccttcttgagggaggagaaccaatttttatcaccggtcatgtgccgcgaacaaccggaatccacgatccacacgttctccttccttgccaccaaagcctcattatcttcatactctgtgtcagattcaccacacgccatgaagcaaacatcagagatgttctttcccttatcatcatctctactttcaccatctacatcacttagtggctcgaaggcggcgcaaacttgttgaaaagccttcctaagattctccagcttcctcccttgggatgaacccttcgacttgttgttgttgggcttgttgttgttggtcttctcaccatctttgtcttctcttttgcctctcccaagcttaggacaatgtgaacgaagatgatcaattgaaccacattcaaagcaactttttggaccacctcttttcctattcatgataaccctgtccaagctgagatttttcatgacgagagataaaaccttgacactcgacaccggcgttgtgaagttaacgacctcgaatccctctccatcgccatgactccaacagtagggagaatggaaggcgacgcctctagtggtaggggagttgatccggaggcatcggaatccgtagctatttctgagcagcaaaccttcgagggcagggcagccggcgatgatgctatggagggaagtttcggagattttcacctgccgtaatgagagcagcttgagatgggggaactggagcatcaggtcggtgcaatcagggacgcggcattggctgaaggcagcgacgcggagggtgttggagaagcggaaaatggatggcggcagcggaaggagttgtctcatatagcagaggtcttctgtgaactcgagctcctcgaggttgttgaaccttggcgatgtcagccagccttcgaccatggcggggcgctcgtggatctgctgcgcggggatgcagaagcggcgtacgggccccgcatgagcgaggagtacgccgtccttgctcgggaggagcgagatgatgatgccaagaacggcgtcagggaggtggctgacgaagtcgacgccctcctcgcggccgtctcctccaactccgagcggtggaggaacatggttgcgagcccttctgctccccgagcccagaggcggcgacggcttgcgtggaggtgctgcttcatccggggccgggtcgtcgcccttcgtgggcccccttcccctcttcctggagggcat

SEQ ID NO: 18748 - DNA, 811 bp, Oryza sativa
  Clone ID: PAT_MRT4530_24277C.1
cccatactgtgcttcttggggagagagaaggggagagagagagagagagagaatggcattgcagcaacgaccggggatgctcggcattggctgcagcaacgtcttggcacgagcaagggtgcagcaatgtctagcagcggcgtcccactccaatatgccatgtctacccgtcctcctgcatgtcaatggcagcaagaagcagggtagcagcttcctttcttctcagaggatcggcttaagtaggaggaggaggaggagggacctgagcggcgtcgttgtcgcggaagtgagcgccgccgccggtgtcacgccggcgtcgtcgtcgtcgtcgcctggcggcatcagcgtcagcgatgttctttggccctccgccggtgcattcctagcaatggccgtgctgggaaggatggatcagatgatggcgtacaagggagtatcattgacaattgcccctctcggagcagtctgcgatgtgcttttcaccgctccaggctcacctgctgccaagaaatacaacatgtttgttgcccagattggttgtgcggcatttggtgtgttagccctttccttatttgggcctggatggttggcaagaggtgctgctctttctgcatccatagcattcatgacaattacaggcgcctcacaccctccagctgcaagcttgcctctcttgtttattgatggtccaaagtttcaccacttgcaactctggtatgccctttttcctggagctgcaggctgcataattctttgcttgattgaagaggagaaaaagcagattgatcgatacctgattgtgaatttgtga

SEQ ID NO: 18749 - DNA, 413 bp, Oryza sativa
  Clone ID: PAT_MRT4530_24278C.1
tcttcccccctcgaatcccgataagcagaggcggaattctccaccgcggcagcaacctgcaacccccagttcgattcggctgcgaggtgaggtcgtccgattcccaattcggtcggaatcacgccgaattttttgtctctactagggtttggtttcggtctgaggatttctagtttggtggagaatcgaggtccgatcccccaatcgggtcggaatcacgcccaatttttgtctctatagggtttggtttcggtccgaggatttctagtttggtggagaattacctctgggattttgcggattcgacgtcggttgctagggtttgtgaggggagcgattcatggctcttgagagccacggagcgccctgttcactacgaaggccataggaagctggcccacaaggttggagcg

SEQ ID NO: 18750 - DNA, 4076 bp, Oryza sativa
  Clone ID: PAT_MRT4530_24279C.1
tcaaaccatgccaaaaggatgaattacacccaattcaccacgaagaaaagcaaagcgattagaatccaaaggtttagtgaaaatatcagcaatttgcaacttggtgtccaaaaactgcaactcaacatctcctttctcaacatgatccctcaaaaagtgaaaacgaatatcaatgtgctttgtgcgtgagtgttgaacaggattcttagcaatattgatagcactagtattatcacaaaagagaggtattttctcaaaagtaagaccataatctttcaaagtagataaaagccaaagaatctgtgaacaacaactagcagcagcaacatattcagattcagcagtcgattgagcaatactagattgtttcctagaagaccatgcaatcaatgatgtaccaagaaaatgacatgttccactagtacttttcctatcaattctacaacctccaaaatcagcatcggaatatccacttaaacatatagaagatgaagtagaataccaaattccaaactcaagtgtatgattcaaatacctcattattcgcttgaccgcttgacgatgtgaagcacgaggagaagcttgaaagcgcgcacacaaacacacagcaaattgtatgtctggcctagaagcagttagatacaataaagatccaatcatacttctatattccttttgatcaacagcttcaccatcttcatcaggatccagcacagctgtagaaccaattggtgttgaaattggcttgcaattctccatcttgaaccgtctcaaaagatccttcgtatacttcgtttgatgcacaaaagtaccttgaggtgtttgcttaatttgcaatcccaaaaagtacgataactcacccatcatgctcatctcaaattccctgcgcatagtctcagcaaaatctacaaccaaagcgtgagtcgaacaaccaaagataatatcatccacataaatctgaacgaaaagttgattatcaccatgcttaagaacaaaaagcgttttgtcaacctttcccattataaaacctttcgcaagcaaaaagttcttaagcctatcataccatgccctaggagcttttgaagcagcaaaagccaacaaaagtctaattgcctcaattctagcaacaggagcaaaagtttcatcaaaatccaaaccctcaacttgagtaaaaccttgagcaacaagtctagctttatttctcataatcaaaccatcctcattttgtttatttttgaaaacccacttggttccaataacattatatccagaaggtggttcaactaaagtccaaactttgtttctctcaaaattttcaagttctttatgcatggcgttaatccacgattcatcagttaatgcaagtgacacatctttgggttcaaaagaagtaacaaatgcagaatttgcacaaacatcatgagccgttacctttgaccttgtagtccgctcacctatattaccaataatttgttccggcggatgtcgtcgttgaatgtgcaaaggagcagcaacttctgaagttgatccacgttctgtttcagtactggtcgaagttgacttctctggaggaccatctcgatcagcatcaacagtatccgaacccgacgaacctggccggtctgaccgctcctcatgagccggtctaaccggaggtgtgccggcggtctgaccggcctggcgcccggtctgaccggccgactcgtcgtcgtcgtcgtagtcgctctcgtcttcaaaaatacgaccatcctccccctgaacctgtgacagtgtacctccaacagattgcactctagctggaccaacagtatccatatgtaatagctgtcccggtgcatccgtcatcacagaaacaataggagcatgtgaagtagaaaccatcttagcatgacgacacggtgtacaaaccaaatcaagatctttcttaagtttaggcaaaccacgaacaagatccaaaccacttaacctagtgagatgatcaaaaccaacatgtccaagtctacgatgccaaaacatcacatctttatcaaacttagcaaccaaaaatgttatcacaggtgaaacagaattttcaaaatcagctttaaacactcttccatagcgagaaatattcagcacagaatcaccacaagaatcaaaaactttacttccagttttcttaaagtgaacctcaaaattctcatcaacaatttgtgaaaccgaaagcaaattgtactttaaatccttaaccaaaactacattcttcaattcaaatttttcatttaccttaaccaaacctgtagcgacaacggcactagtagaagcatcggcaaagacaattgattcagtcttggatgcctttttgagggaggagaaccaatttttatcaccggtcatgtgccgcgaacaaccggaatccacaatccacacgttctccttccttgccaccaaagcctcttctagcaccaacacctttgattgatccaaaatcatattgaggttctttttaccatcagaaaatcttagcaaagaatttttcaaataagaaacctctttttccaaattagcacaattttcacaatctaccatgatacctttgcttttacgacatttggggcaagaaaacacttcattgtttttcacaacatcttccatatactcaacacgacctaaagcatcttttagtttcatcttattcaaattacatgttgagcaatccaaaacatcatgaggttgttttaactcattatcttcatactctgtgtcagattcgccacgcgccatgaagcaaatatccgagacgttctttcccttatcatcatctccactttcaccatctacatcacttagtggttcgaaggcggcgcaaacttgttgaaaaaccttcctaagattctccatcttcctcccttggttagaacccttcgacttgtagttgttgggcttgttgttgttggtcttctcaccgtctttgtcctctcttttgcctctcccaagcttaggacaatgcgaatgaagatgatcaattaaaccacactcaaagcaacgatttggaccacctcttttcctgttcctggcattattcatagctcgagcaattcggttagcaaccaaagccaaatcctcctcctcgattcgttcgagttgatcatcggatatggcattaaaagcagcaagaaaaaaaggcatagatgaagaagcatcaacaaccaaagaagaagaagaagaaaccaaagcactcgatttagaatcaactttgcgagaaagaatattcatctcatgagttttcaatttagtataaagtgaatccaaagtcaaagtagacatgttaacagactcctgaatagatgtaactttcatctcccaaatagacatgtcgagaccattcaaaaagtgacaagaaatctcagattgtggataattagcatcataagaagaatcaacagatctaagatcacttaaaattttattaaatctagaaagatagtcatccaaagcctctccagatttcatctcaaatttaatgtactcctttttaaaaagatctcgacgaagctctttaatattatttgttccttgatgaaagtttttcaaagcattccaaatctcatgagcagtttcaagatgtgcaacacgaacataatcagaacgagaaatcccactcaaaagaatattacgagctttgcaattgttttcaaattcagtttttaaagcatcagtattaatggcttcaggaatcacataaggatgagaaactttcctccaaatatcataattttcagccataatgtaagattgcatcttgatccgccggtctgaccgagctcgtgccgctggtctgaccagtgttgcgccgccggtctgaccgccggtatgtcgccggttagaccgcaaatttggactccttccaaattcgactccgcatcccatacgcacacaatacctccatcgtatgccatatggaatcttcaccaaccacgtgcatcaactctagccttagtatcccgcatgatatctgaccaccacggacatcgtcttaccatcaagccgactctcagtccatcaccgcaaatactcttccgaggcatcgagtcacc

SEQ ID NO: 18751 - DNA, 402 bp, Oryza sativa
  Clone ID: PAT_MRT4530_2427C.1
gatatattacatattaatctaacttgtaataactttttttttaaaaaaaaattcataactatttagttgacatgaaaaaaacggatggatgttcatccgagatattagaatccatcttcatggacttcgtccaaataaatattgctgtcgacgtggggattcctttgccgatggctaattggcaaagactagctagcctaggctgatgtggcgaatactttctcagttcattccacaaactaagttgccatcagttttgggcttttgggcagaaaacaatagacaaaatttcttatagaaaacttgataattaaaatattataggacactctattaatttgataggggacacccccagttattattttatcatttatgagtcaaccgtgggaaaaaaaaaag

SEQ ID NO: 18752 - DNA, 411 bp, Oryza sativa
  unsure (1)..(411): unsure at all n locations
  Clone ID: PAT_MRT4530_24280C.1
cactgaagtaacataaataaaattaatgacgtgcagtgcagatggtgctttgaaaatggaaacaagttcgtgtactgagcttactgggggcatcttttattgagtcttcacgctgctactactactactactaccactacatcgttttccctcagttaaggggagcaaagacaaggttccaaacagttctcaaaacgagatctaggacactccaatacacaaatcaacggcgacaaaacaggagacaacagggatcatcaggcataataaacagcattggcaaccgaacttttttgngatgtacccttgacacatgtatacacttcccaggttcttggccatctttgtcacttgcgactgggaaacaaaaaaccaaatcccgggcaactgacaagcaatatgcctgtctgc

SEQ ID NO: 18753 - DNA, 1608 bp, Oryza sativa
  Clone ID: PAT_MRT4530_24281C.1
atgggagagcccctcctcaccaccctgtccatggagaacaccaacagccatccctgcacccgcctctccatggatcccgccgggtcgcacgcggcctcgggtgactcctccggtggcggtggaggtggcggcagcaccggtgccggtggtggtggtggtggtggcggtggtgacagggaattgttcatcattccgcggcgtgaatctgcgcatccaggaccaccggacattaacctgcccctttctgcagacccctcaccaccaccgccgccgcatccgccgtcgtggggtatcgaccagttcgacatgcttgatgtcggtctcggcacgcagacttatgagtctgaggttgcgctcacgcttccaaagttgactggcaatggcaacactgcggttggcgtcggtgcgaggaagtgtgccaagaggggggacagcatttggggtgcatggttcttcttcaatcactacttcaaacctgcacttgtggaaaagccgaagggcaaggtgacacgggactcttctgggagcgtttcgggctttgagaagtctgatcttcgccttgatgtcttcctggtgcagcatgacatggagaacatgtacatgtgggtttttaaggaacggcctgacaatgccctcgggaagatgcagctccggagcttcatgaatgggcattccaagcatggtgagccatcctttccattcagtgcagataagggctttgcaaggtcacaccgcatgcaacgaaagcactatcgagggctgtccaacccacaatgccttcatgggatagagattgtgagttcaccaaatctgtcagctgttcctgaagctgaaatgaaaaggtgggcggaacttacaggaagagaacttaatttctcaattcctcctgaagcaagtgactttgaatcatggaggaatcttccaagcactgatttcgaacttgataggccactgccactgtcatcaaagattacacatggctctcacagtcacaaaaaggcactgaatggttcaggtcttaacctttctacgccaccatcatcagacgatgggatggacctttcaccaaaatgcgccaagcgacggaaggacttctttgctcatggtgcagatgaggattgcgtgatggcaaataattcttgttctgacagagagcaagagatagaagttcacacaggtgagccgtcatggatgcatgagttcactggtgtagcaaaacatgcaagtggacctgttacggctgccaagacaatatatgaggacgatgaaggctacttaatcatggtgagcatgctcttctctgatcctcacagtgtcaaggtctcttggaggaacacattgacacatggcattgtgaagatatcgtgtgtgagcactgctcgaatgccctttgttaagagacatgacaggacattcaagttgactgatcctttccctgagcactgccctcctggagaatttgtgagagagatacctttggctacaaggattccagaagatgcaaagctcgaagcgtattatgacgagactggcactggactggaaatcatggtccccaagcaccgagttggacccgaagagcatgaagtccaggaaagtaacaagtga

SEQ ID NO: 18754 - DNA, 853 bp, Oryza sativa
  Clone ID: PAT_MRT4530_24282C.1
ttatttcagtgaattccctttcgtgtatggcgccgagctagttctttccagccggctcggcggcgaggcagcaagtcgtctggcgcggccaagcagcccgcacaggatggcgaacgccacgaggcagaggttgacaacatcccggccgctcttgaggctaagcccgccccctcctcgatggtgctctcctccccctcctccccatggcctgcctcgccgcaccaccgacggcaagaacatgagcacgatcagcaagaagagcagcacgagcacccacaccttcgccccgccggcaccaccattgtcgtcgccgtcaatgctcatgtacgacggcgacgacgacgtcgtagcactagtagtagcaccaggacccgccctcgcgccatagccactcctcaccctggcgtccccgtccatcgccgccacgcaccagccacttcctccctcgattcgattcgattcctcagcacatgcacgcacgcagcgagccagcgatgcgacggcggcgaccacaggccggagcagctccaccggcatcagcccgcggctgccgctggcagagcttgtgggcttcacggacttccacgcgcggtcgatgcgcagcatctcaagccccacggcctcctccttcctgttgtccttgtcgctgtcgtcttcctcgtcttccggcgtggcggcgcagatgggggaaaaggcagcagcgcgcgcgtgcgtcggctgccgccggcggtggcggcatgcacgtgcgttggctggcggcggcggtgcagaagtgcatgcgatggcgtgcgttggtggcctgcgtgggctccggccgccatgcggaggtggtggcggcggtgctctggccagt

SEQ ID NO: 18755 - DNA, 660 bp, Oryza sativa
  Clone ID: PAT_MRT4530_24283C.1
atgccaattgttcatcacagaataataatcaaaaacacctttgattttacacagtttacggtgggcaacatcatgctaactggtccatcgtttgccacctcagcatatgcccccatcatctttaccctttgtctccatgacggtagccaagaagaggataacaatgagaatgaggtggaggtaatatacaatacctgcaacggtctcttcaacaactacaacagtaccataatcgagacagtcaacactgggtatggtcccgctgaggtgagctacgctgtgctgaccaacgccgttgaaggacaggtcacagtcaagctggtccgtcgagatgaacacaacgaccccactgcaatcaccggtgttcttgggaggatcatcacgcgcagcaagctcctcaatgttggttgtgtcctgttctacagcgactttggcagcatcccacacataggatcagacgggttgatcccattggcgaggcgtgcgcttgcagtgccagctatgatgccgttggacttgcgttcttcttccggtgatgagattgtcagagctgcagtcgagtttgaccctacgactagtgatcaacatgtggaacgtgttattggaatgggtggtcatgagatccaagtgacaatctcatggttggacttcccttggtag

SEQ ID NO: 18756 - DNA, 2193 bp, Oryza sativa
  Clone ID: PAT_MRT4530_24284C.1
tcatatagctggaatgtacaggacatcgttgaggtcagctgggtctagcatttgctcgccgtggctaccgcttccaaggaatcctgcgtgggacagcaaagcccacaggtgcgtcgtgagttcacctggcccacggagatgcacgtcgtgcttggccgccttggtggacgcggcaaggtgaagcaggaaccccctccaaaacctgctcaggtctctccacagcgcgacctgctcgtcgtcgccgtacgccagcctcagttgctccgccagctgcgcgcccatcttgactatcgacctgccttcactcccgtccggagttcttgccatccttgtcaggtttctgtagatgtctgccatggatttgcaaccagaaatggcactgctggcctctttctgcacaacctcgtagaccttgttcatgacgaggccattgtccggcaccagtgactgagtgaccaagtatgcgcagtgattggacaaggtgactgcagctatgtaatgttcccacagatcatctgcgataattgccgttttcttcacaagaggtcttgttattattccgaagctgtagatcgtccgcgccgatgcctgatcggagaggttgatctcacacaggcaggtggcgatgtgccagacgagtatcctgtgggtgtcggcctcaagctcatcccctgcccacgagatatcgctgacaatgtcctgttggttggttctaaatgcaagcggaaagtaggattccagatcattgtcattcgcgtttcgcagtgcactgaatgactcgaacaaggcgctcttaacctctccctgcagctttatcttcacagggagaaatctccctttgagatgacgatatgcgaacaggacgcttctttcttgaagaacatccaccaagatgttgtactggccgattcgctgattccatttggcattggtgattagtctgcagaaaaaccccaatgcacactcaaacagcggatgacgcaaccttgagtccttgacgtacttgcacagcaccagtactttggtccactgcgaaagaacgtaaattgcaatctcccagacctctttgatgacgacaaggacgatgatacagtaagtcacgaacaacttgctgtccgtgtccgggctcttggataagcgatgaacaacaaatccaagatacatgactgcactaaccagagatcctgccaggagcatcctccaacccgggaaccccttggcgaacatgattgcgtgtttgctatagtggaagtctctgagaaaccgcagctccacctcggtgacgcggaacgccctctcgtagtttttgctacctctttgcaggatgtaatcgaagacgagtctcttcgtcttgggttgccgggcctcgtgtatgggcaggttgccgaacctacgccggagaagcttgtacagcgcaaacgagagacaaacgtccttgagccggttgtcttgatccactcctccaccaccgagaaaccggctgccgcgaagactccataccctctcaacggtgaccatctcatcagggttcgtcacgtccagctcgagcttgaatactggaggctcgaccttcatctcctgcttgccttctcctaggaccaaatacctgtaccctgccatggtggctggatccacatcctcggggttgccaagttcatgctcgtatctcatgtagttgcttacgagcctcatgttgttggtgtggatatcaaatgcgctattggaggagatgaagaaggcgatgatccgcagcgcgttgacggaccagatgaaccagagagggatcttcaggctcagcacggtctgggatctgatgaggttggctgcccacagggacatgagcaggtcgatgagggacatgtccttgctcttcctgtacgggatgccgatcctcacgctgtactgcagagtgaccaagaggacagcccatacctggaagaagtcatctggtttttcgtcggacgatgagagctgcatgagtcccagggtgtagtgcaccaaggagtagttcaacagcaggatagctcggccggcgttgttcagtggcctcaaggagtagtacagtggcgcgatggcgccgacggcaaacttgagccgcaaggtcaccatggtcaccaccacccagaactccacaccaatcgtgccagtgctctcatcttgcttgaagatccctcggatggtttccacaaccat

SEQ ID NO: 18757 - DNA, 681 bp, Oryza sativa
  Clone ID: PAT_MRT4530_24285C.1
gttgcaaatattggaccacagattaaatgggccaactgggccaaacagatatacacaaagctcaatacaaatatgaagaaagcaccctcaagaagggagtaaatacacagctagctatacaatacatctaacacagactatgtgatatggtaatcgtatcaccatctttaacagaaagcttactgtccgtgtaagcatcgccttttaaaaacacaattgacttcattgcgacatttggatctgtagtccagcactgattttgtaaaattcattgcacttggaaaattcttgctgttgaaagtcccaaacctttgatgggaggtgaatggatttcaaaattaattcagaggctgtagaccacccgttaatatgtgctgctcccatatcatccagtgcttgaagccttgcaccaatatgtggattgaaagaatttaacacaagacttgatatatatttattcttcaaagtctcagctgtatggatgatcagtgcagccatcgagcgcttgtgtttatctgaatagttgtttggatcaaagtgagccaaattctgcagcatatccctcattgtactgtatactacttgaaacagaggcagtctgttaggtccaagaagagaaccataattgctatcatgccgtaagagaacagatcctctaatatacttttttggatggagtgt

SEQ ID NO: 18758 - DNA, 1575 bp, Oryza sativa
  Clone ID: PAT_MRT4530_24286C.1
atgcaggggatcaggaggagtaaagttcctttgaagataaaacattttgtttatcatgtgggcaggggaggattccttgtgcctttcagctggttaagaggaactggaagggaggagagaataaatgcagtgctgtgtggggtttctgaaactgttaatcatgtcttgttcaattgccctattgcaaaatttacttggtgtgtggtcaaggaagttttgcacttccctgcaatccctgtctctttctgggaaggcttagatttgttaaaacagaagttaggggggaagcttggtgtggtggtgtttgctagttggatttgggtagtttacatgataatttcgctgttacaacgctggaggctcattcaaaagaagaaaagaagagggtgtgggtgccctatgcctggttgctggaatttttccagtaacaacgatgctgtaaaatcaaaggagttcttcgatttgtttttcaccgggtttcgacggtctaactggcgacacaccggcggcatcgtggcggttagaccggcgggtgcaaggcggtcagaccggcggcggcaacaggggcgacaggcgattccagggcggtttaacaaaattttgagtgatcttagatttgttgattcttcttatgatgctaattatccacaatttgagatttctcgccactttttgaatggtcttgatatgtctatttgggagatgaaagttacatctgttcaagagtccgttaatatgtctactttgactttagattcgctttacacaaaactgaaaacacatgagatgaacattctttctcgtagagttgattctaagtcgagtgctttggtttcttcttcttcttctttggatgttgatgcttcttcatcaaagtcttctattcttgctttatttaatgccacatccgatgatcaactcgaacagttcaaggaggaggatttggctttggttgctaacagaattgctcgagctatgaacaatgtcaggttcaggaagagaggtggtccaaatcattgctttgaatgtggtttgattgatcatcttcgttcgcattgtcctaagcttgggagaggcaaaagggaagacaatgatagagagaagaacaatgacaacaagccgaagggtacattcaaaggaaggaagatcaaggagaatctcaagaaggcttttgatcaagtctacgccgcgtttgagccactaagcgacgtagatggtgatagtggagatgaagataagggaaagaacatctccgttgtttgcttcatggcacgtggtgaatcatattcagagtgtgaagacaatgagaagttaaaacaaccacatgatgttttagattgctcaacatgtactttgtataagaagaaactaaaagttgctttaggtcgtgttgagtacatggaagatgttgtgaaaaccaatgaagtgctttcttgctctaagtgtcgtaaaaacaaaggtgttatggtagattgtgaaaattgtgctaatttggaaaaagaggttttgtatttgaaaaattctttgcaaagattttctgagggtaaaaagaacctcaacatgattttagattaa

SEQ ID NO: 18759 - DNA, 258 bp, Oryza sativa
  Clone ID: PAT_MRT4530_24287C.1
gtcttggataagaatctacaacgcagtggaacgcccttgttgacgattctatactacgacggcatctagggctcctcgaataatgcgatatcccacaccgagtaaatccttaacccttcctcctcttactaatactacataatgttcttgtaaattatggccaataccaggtatataagcagcgatttcaaatcctacggttaattgtactctggcaattttccgtaaggcatagttgggtttttttggggttatagt

SEQ ID NO: 18760 - DNA, 1392 bp, Oryza sativa
  Clone ID: PAT_MRT4530_24288C.1
atgaagtcgtcatccactttaagagttcttcgatttgtctttaccgggtttcggtggtctaaccggcgatataccggcggtcagaccggcgacaagcgtcggtcagaccggcggcggcgacagcaagcgacaactgatctcggcggtcagaccggagatctaatcgcggtcagaccgacggcaaccaggcggtcagaccggcagagcaacttcggtcaaactacgatccgtcgaattcgagggtttaataaaattttgagtgatcttagatctgttgaatcttcttatgatgctaattatccacaatctgagatttctcgtcactttttgaatggtcttgacatgtctatttgggagataaaagttacatctattcaggagtctgttaacatgtctactttgactttggattcactgtacacaaaattgaaaacacatgagatgaatgttctttctcggaaagttgattttaagtcgagtgctttggtttcatcatcttcttctatgaatgttgatgcctcttcatttaagtcttcttttctggctatttttaatgccacatccgatgatcaactcgaacagattgaggaggaggatttggctttggttgctaatagaattgctcgagctatgaataatgccaggaacaggaaaagaggtggtccaaatcgttgctttgaatgtggttcaattgatcatcttcgttcgcattgtcctaagcttgggagaggcaaaagagaagacaaagatgggaggaagttcaaggagaatcttaggaatgcttttgatcaagtctacgccgcatttgaaccatcaagtgatgtaggtggtgagactggagatgaagataagggaaagaacatctccggtgtttgcttcatggcgcgtggtgaatcggatatagaatatgaagatcatgaggctttggtggcaaggaaggagaacgtgtggatcgtggattccggttgttcgcggcacatgaccggtgataaaaattggttctcctctcttaaaaaggcatccaagactgaatcgattatctttggtgatgcttctacaagtgtcattctcgctacaggtttggttaaggtaaatgaaaaatttgaattgaagaatgtagctttggttgaggacttaaagtacaatttgctttcggtttcacaaattgttgatgaaaattttgaggttcactttaagaaaactggaagtaaagtttttgattcttgtggtgattctgtgttgaatatttctcgctatggaagagtgtttaaagctgattttgaaaattctgtttcacctgtgataacatgtttggttgctaagtttgataaagatgtgatgtttggcatcgtagacttggacatgttggttttgatcatctcactaggttaa

SEQ ID NO: 18761 - DNA, 880 bp, Oryza sativa
  Clone ID: PAT_MRT4530_24289C.1
cagataagcaaccttccattcattgccgtgttcatcattaaactcaaaaatgtgtccgtctgcagtttggaaacctctcaaccacatatttctctcttcaattatggcagttactctgttagtaccatcagtgaaagcaatggtaaaaacatcagggccttcaggggtaagaacgaactcctttctcttagaacctttgaccttgacaatccttctgaacctacccgtgagatacgttcgggccttatcaatcttgctggtgaaagatttatgaactctatccaggtcattgctgtggctcaacctcaaatttagtgtaaacaatggttcatctggcatgtcataaattccatctgattgttgataatccattcgctacaatgattcttcagcctaaagtgaccttagatacttggagtagagaagatagttgcttggttgaaaaacattgtgttgtttgccttctccatctgctgttccgggatcgccgtcgccgaagcgccgctctcccgtcgtgagcagtcggagagaatattgttgttccggagacggagggagcaactggtgatggcttgacgcgcgaagcagtatcagcccgcaaaggatgagattccggaagcggacctggggacggcggtcgagaacgtggggctgtcgccggcgagcggagcagaggaggcggaaaccctcgccgccacttgggctccacggggagcggcacacgtgggctgtcgtcggcgaggaggatggaagccggggtccgaggtcggcgaggaggatggaggccggggtccgaggtcagcgaggcggacgggaggcggcggaaaccctcgccgccacttgggctccacggggagcggcgcggcaatcgggtttcgtt

SEQ ID NO: 18762 - DNA, 280 bp, Oryza sativa
  Clone ID: PAT_MRT4530_2428C.1
atgttgccactggacaccggccacgccgcgatcgcctcccgttgggctccagctgtcgtcaccaatcagcatgggttcttgctacccgcgtgcgccactgccagagcacgacagccctcgctgccgcgcttgcctccaccagccttctcttgcgcctcatcgatcctatcgtggcggcatcggatccgtcgcctagcgctgcgcagcgtcgccgcctcgtcttccccacacatcgcatgtcaagccgccttccccgcgccgaggtggagcgccgccgagg

SEQ ID NO: 18763 - DNA, 3791 bp, Oryza sativa
  Clone ID: PAT_MRT4530_24290C.1
tttgccatggctaataagtttacaactaagccccatgttttcgatagatcggattttccttattggtgtagtaagatgcaatcttacattatggctgaggatcttgatattttgagaaaagtttctaatccttatgtgattccttatcaaattaatattgctgatttaaaaactgcatttaaaaataattgcaaagcttgcaatattcttttgagtgggatttctcgttcggattttgatcatgtttctcttcttcaaaccgcaaatgagatttggattgctttgagaaattttcatcaatgaactaccaatattaaagaactttgtcgagatgttttcaaaaaggagtacataaaatttgagatgaaacctggagaagctttggatgactatctttctaggtttaacaaaattttgagtgatcttagatatgttgattcttcttatgatataaattacacacaatctgaggtttcacgtcactttttgaatggtcttgacatgtctatttgggagatgaaagttacatcaattcaggagtctgttgatatgtttgctttgactttggattcgctttacacaaaactcaaaacacatgagatgaatattctttctcgtgaagttgattctaagtctagtgctttggtttcttcttcgacttctttggatattggtgcttcttcattgaattctactattcttgctttaattaatgccatgtccgatgagcaactcgaacaattcaaggaggagtacttggttttggttactttcaagtttgctcgagctatgaacaatgtcaagtagaggagaagaggtggtccaaaccgttgttttgaatgtggtgctcttgatcacattcgattgcattgtcctaagcttgggagaggaaaaaggaagacaatggtggagagaagaccaaggagaacaagcccaagagcacatttaaggggaagaagattaaggagaatctcaagaagatgtttgaaaaagtctatgccggttttaagccactaagcgatgtagatggagagagtgaagatgaagataagggaaagaacatctccagtatttgcttcatgccgcgtggtgaatcggattcaaagtgtgaaaaacaatgaagctttggtggcgaggaaggagaacgtgtggatcgtggattccggttgttcgtggcacatgaccggtgataaaaattggttctcttccctcaaacaggcatctaagactgaatcgattatctttgctgatgcttctactagtgtcgttctcgctacaggtttggtcaaggtaaatgataagtttgaattgaaaaacgtagctttggttgaggacttaaagtacaaattgctttcagtttcacaaattgttgatgaaaattttgatgttcactttaagaaaactggaagtaaagtatttgattcttgtggtgattctgtgttgaatatttctcgctatgaaagagtgtttaaagctgattttgaaaatcctgtttcacctgtgataacatgtttggttgctaagtttgataaggatgtaatgttttggcatcctagactaggacatgttggttttgatcatctcaggaggttaagtggtttggatctttttcgtggtttgcctaaacttaagaaagatcttgatttggtttgtacaccgtgtcgtcatgctaagatggttgctacttcacatgctcctattttttctatgatgacggatgcaccaggatagctattacacatggatactgttgatctagctagaatgcaatccgttggaggaaagtggtacgtgttggttattgttgacgatttttctcaatatccttgggttttctttatggcaactaaggatgaggcttttcaacactttcgtgaagaatcatgttttggttgagatggctagaacaatgttggatgaatatcacactcccagaaatttttgggctgaggcagttcacactgtatgctatatttcaaatcgggttttcttgaggtcaaaatttggaaaaacttcttatgagcttcgatttggatgtcaaaccaaagtttcacatttgcgtgtttttggttgcaaatgctttgtcttgaaatctggaaatttggataagtttaagatacgctctaccgatggaatgtttcttggttaccccgcacactctcgtggctatcgtgtacttgttatttgttgagacttgtgaagtttcttttgatgaggctagtccaggtactagacccgaaattgcagatacattgtcacaggttcagggagaggacggtcatattttttaagatgagagcaacgatgacgacaacgaggtcggctcggcagatcagaccgggtgccaggccggttagaccgccggcaaacctccggtcagaccagcgcaggacgtgcggtcagaccggccagggtcgtcggattccagttctattgacgctgatcgagatggtcctccagaggctacaacttcgaccagtgagggtacggaacgtgaaacaagttcagaagtcactgctcctttgcatattcatcgacgacatccgtcggaacaaattattggtaatataggtgagtggactacaaggtctaaggtaacgtctcatgatgtttgtgcaaattctacatttgttgcttcttttgaacccaaagatgttactcatgcattaactaatgaatcatggattaactccatgcatgaagaatatgaaaattttgagagaaacaaagtttggactttagttgaaccaccttctggacataatgttattggaaccaagttggttttcaaaaataaacaaaatgaggatggtttgattgtgagaaataaagctagacttgttgctcaaggttttacccaggtggagggtttggatttcgatgaaactttttctcctattgctagaattgaggcaattagacttttgttggcttttgctgcttcaaaagctttatatgacttgaaacaagcacctagagcatggtatgataggctcaatgggaaagcttgacaaaacgttttttgttcttaagcatggtgataatcaactgttcgtttagatttatgtggatgatatcatctttggttgttcaactcatgctttggttgtggagtttgctaagactttgcgcaaggaatttgagatgagtatgatgggtgagttatcgtactttttgggattgcaaactaagcaaacacctcaagctgtgttggatcttgatgaagatggtgaagttgttgatcagaaggagtatagaagtatgattggatctttgttgtatctaacttcttctaggccagacatacaatttgatttgtgttagtgtgcacattttcaagcttgtcctcgtgcttcacatcgtgaagcggtcaagcgaataatgaggtatttgaattatacacttgagtttgcaatttggtattctactccatcttctatatgcttgagtggatattccgatgctgattttgctggttgtagaactgataggaaaagtgctagtggaacatgtcattttcttggtacatcattgattgcatggtcttctaggaaacagtctagtgttgctcaatgaactgttgaatctgaatatgttgctgctgctaattgttgttcacagattctttggcttatattaactttgaaagattatggtcttacttttgagaaagtgcctctcttttgtgataatactactgctataaacattgctaagaatcctgtacaaagcatattgatattcgctttcactttttgagggatcatgttgagaagggtgatgttgaattg

SEQ ID NO: 18764 - DNA, 898 bp, Oryza sativa
  Clone ID: PAT_MRT4530_24291C.1
gcgcgtggctcgcgagcccgcccgatcccctctcccagcgtccccgaggtccgcctccctgcgccagcccttcctcatggcgtcgccgccggggaagaagggggaaggcggcggcgatggcggcggcgggaaggcggagtggctgatctacgcgttcgtggcgcgcggcacggcggtgctggcggagtacaccgagttcaccggcaacttcccggcgctcgcggcgcagtgcctgcagcggctccccgcctcgggcggcggcggctccggcggtggcgcgccggcgcggttcagctacgcgtgcgacgggcacaccttcaacttcctcctccaccgcggctacgcctattgtgtagttgcaaaggaatctgtcccaaagaatgtctcggtggcttttctagaaaggttgaaagatgacttcatgaagagatatggaggtggtaaagctgatacagctcttgcaaaaagtctgaataaagaatacggaccagttataaagcagcacatgcagtatgttcttgatcattcagaagaaatagagaagacattgaaagtgcaagcccaagtttctgaagttaaaaatatcatgttagaaaacatagagaaggtgtggtccacatttgcagttggttgccctctgttttttaccgagttaatcttaatgggcttcctctttaaaaagactttgggtcgtggagaaaaactgagtgaacttcaagataagacttccgatctacaaagtcaggcccaggaattcaaaaagaagggagtgaaaattcgtaggaagacatggttgcagaacatgaaaatcaaattggtggttcttggaattcttttgcttcttgtaataatcgtatgggtgtctgtttgtcaagggtttgactgcaccaagcactga

SEQ ID NO: 18765 - DNA, 1162 bp, Oryza sativa
  Clone ID: PAT_MRT4530_24292C.1
tttttttttttttttttttttttttttttttttttttttttttttttttttttaaaacatctctatttttttttttttttttttttttttaatgtcaaatgggtaagcctcttatacatgagtactagccaagtaccacaggcacaaaaatgttacaatttcaccgccgaatccgaataaagaccccaaaacatcatgtctgtacataataaatgttccctttttcacatgagactgcaatagctgccctgtacatgaaattaaacgaaaacaaacaactgagaaaatacatccaaccactagctatctgaacttgacaccggtacactcacactgtcgcacacacatttacaacaacgacgacgacgacgacgatcaatggagatgaccgagaagagattcaaccgaagagcaacttcttgggcggctctcccttggcgcggtactttgctgcggcctcctcggccttcaccacctcctcccctcgccgcgcctccgtcgccgctcgcttctcctccgccgccctgtgcaccttcgccacgccgttcatcaacttctccacctgctccgccttcttcctctccaggtactcttggtacttcttaatctcggcctcgatctcggccaccttggagttctcccatgaggcgatgtcggccaacttcttggccgccttgttgtcggccttggccttttcgttctcctcccacgccttgatcagcgatatcctcttctccgtggcgaccgtcgtcaggagagcgtctctttcgtgtgagccacctgttgctgcagctttctcagcatcatcgacgacggtcatggccttcgactcctccggcgccggcacggcggccctctcctcggcgatgtccttggtcggctccggcgccggcgccggcggcgccacctccgccatctccaacaactcagccaaagaagctatctgcacgagttctctgacgacgtagcaaatatatcaaggaacaaatgagagaagcacacgaactgcttctacttcttgttcttctttgttttttaacaggagctggctggatggcgactgattagcccaggttggttgggagaagatcggacgcgtgggcggacgcgtgggcggacgcgtgggcggacgcgtgggcggacgcgtgggcggacgcgtggg

SEQ ID NO: 18766 - DNA, 150 bp, Oryza sativa
  Clone ID: PAT_MRT4530_24293C.1
atgggcccccaggcgatgtctgccatgcggaagtgcccgcccacctcctcgtctaaggctgccgccacctccccggcggtgacgctgaccaccaccaatcgttggaacgtggcggtggcggctgagtcgagcgagaacatggaggagtga

SEQ ID NO: 18767 - DNA, 329 bp, Oryza sativa
  Clone ID: PAT_MRT4530_24294C.1
caccagttggcaagaggcctggagcatactctatatccctgccgctgttccttttgtggggaggagaagattctgttaaggaaaggatctagccgatgggtacttacctccgcgtatttggctaatggcgcgacggacgggctggcggaggacgacatctctgtcaccacctgccatcttgtcgcgaccgagaaaattgccttttcccgaacgctagtgtattaatccccgtcccaggaaaagccggggtacaccacacaaacatgatacaaaaggcacatctttattatatcgataatatttacattattacaaaggcacttaaggcc

SEQ ID NO: 18768 - DNA, 319 bp, Oryza sativa
  Clone ID: PAT_MRT4530_24295C.1
aatagcaatagtatatatttattattattatttgattgctgcagacgcgctgggcatgcactcatgcatgcctgcatggggcataaacaactggacaagcatagccgcaccacgtaggggtaataggcctataacaatatttgacataatagtaatagtactggagtaactgcgaaggcacaagccggggcccaccaaccccaaacaaaaaccaattaacaaggggtaccttacttaggggcaaaaaaaaaacaagttccacttcaaaaaacagggtttcattgaaaacccccccggccttgttggattgcccccaagg

SEQ ID NO: 18769 - DNA, 139 bp, Oryza sativa
  Clone ID: PAT_MRT4530_24296C.1
gccaccagcaacagtgggcccccatcttagccattacactggcggcatgtcatgtgactctgcacaacagtgctacctcaatttcacgacgacttcttggcgctctcgaactaccaaattttgatgaaccgaggctcca

SEQ ID NO: 18770 - DNA, 195 bp, Oryza sativa
  Clone ID: PAT_MRT4530_24297C.1
acctaactaatgtggaaagatcaaccggcccaaaatgggggagagaatctcctacgacctctgggatacttaagtgaggacctacactcagggcatacgcctatgagagatgttcactggtcacctgtgcatacagaacgactcacacttacagaatgactaaaggactgacttgacagacgtaacgacactctg

SEQ ID NO: 18771 - DNA, 282 bp, Oryza sativa
  Clone ID: PAT_MRT4530_24298C.1
atggaactgcggagcgcggctatctgttacgtcttccttctgttaaaagggtttggcaccttgcgttggcttactgaggttgcattgtatgaacaactacttggggcggctattgcatcattctccactaatacagaatggatttttgtggatgaggctccctccaggctccaggcgatgcttagggtcaatgagaagtacaaatcaaaccctgataatgattttaattactatgcattactatttgctaagaacgacctcttggataggtcctatgtgtag

SEQ ID NO: 18772 - DNA, 445 bp, Oryza sativa
  Clone ID: PAT_MRT4530_24299C.1
gaactcttcaaatcccatggcggtgctcaaatctcttgttgcttgcaaaggcttggcgctgtgcgctccagcgattgctcagcgtcaccggaacacgccgttatctgcatcggctcatcgccggcaaatcctgatcaccggcttaacgatgaactcctcgggcatcaatagtgctttgccggtcagaggagctgcacaaatccctgcagttggttctggtcctccagcaccgtcaggaggaaatctcccagtacccagcatgccttcatgggccaaatgggtagttggggccatcattgttgctatacccatctacagaaagataagagcattggaagacaccgtggagaagacagcggaggtagcaatcgaggtggtcgacacggtggcggaggcgactgagaaggtcgccggcgagctggccgacgcttttcccggcaacgaa

SEQ ID NO: 18773 - DNA, 186 bp, Oryza sativa
  Clone ID: PAT_MRT4530_2429C.1
atgttggtccacgagtaccacctctggctcctcccctccttcctccacatcggctgcccgtgctcctcgttcttcactgcaatggagagatggaaaagtatgaagataagggagggtggaaggaagaaaataaatctgacgggtgggtctctcatacagatggagaagaagatggaaaccgtgacg

SEQ ID NO: 18774 - DNA, 630 bp, Oryza sativa
  unsure (1)..(630): unsure at all n locations
  Clone ID: PAT_MRT4530_242C.1
cncnnnnncnnnnnccccccccnccccccccccccccccccccccccccccccnncccccccccccccnnnccccccccccccncccccccccnccccccccccccccnccccccccccccccccccccccccccccccccncccccccccccccccccccccccccccccccccccccnnccccccccccncccccccccccccccnccccccccnncccccccccccccccccccccccccccccncccccccnccccccccccccccccccccccccttccccccnncccccnncccccccnccnncctttttccccncctccccctttcttctttttcctccctncctttttcttcctcctctcttcttctactctcttctttcttcttttcctttctccttccctcccgtaccctctctctcactttttttttctccccttctacctaatcatcttttcccctcttcttcatttttacccctcttactcataaccttttgccctatattttcttcggtctctcttatatccacatatatgactctctctccttttcggttgttctcctccttgccgtccgtctccacacgtnaatactcatgacgctactagcttattggctgtt

SEQ ID NO: 18775 - DNA, 1005 bp, Oryza sativa
  Clone ID: PAT_MRT4530_24300C.1
atggcggtgctcaaatctcttgttgcttgcaaaggcttggcgctgtgcgctccagcgattgctcagcgtcaccggaacacgccgttatctgcatcggctcatcgccggcaaatcctgatcaccggcttaacgatgaactcctcgggcatcaatagtgctttgccggtcagaggagctgcacaaatccctgcagttggttctggtcctccagcaccgtcaggaggaaatctcccagtacccagcatgccttcatgttttttcaatgtcatttcttcgattagtatatcttcttgcattccaacctatgcacctgtcagggccaaatgggtagttggggccatcattgttgctatacccatctacagaaagataagagcattggaagacaccgtggagaagacagcggaggtagcaatcgaggtggtcgacacggtggcggaggcgactgagaaggtcgccggcgagctggccgacgcttttcccggcaacgaaaatctcaaggaggttgcctccaagattaagaccgtagccgatgtgatagaggatgatgccgagaaagccgaggccctaatccagaaggagatcttagagaagcaggcagcaaaacatagactaacaggctacttgactataaaaaatggtgaaactcactgtaaatggcttaaaaaaagagttggtggcagtagtggatcccatcatcgacaagatagacaaggaagagctgtaggggaaggacccttttggcaggagggggaaagcaaacagaaactaaatacacatttagtagcaaagaaaactgctactgttacaactcagttttttagtttggtagcaccacgacaacaggcaaaatgcgtgtttgatgccattgccttcccgattgattgatgattgatataatagacgcttgcagcgcaggcgtgtgtttgtacagttcctgttggagtgttgtgttggccacaggatggtagtaataataactgccatcagactccactgatcgcc

SEQ ID NO: 18776 - DNA, 162 bp, Oryza sativa
  Clone ID: PAT_MRT4530_24301C.1
atggggactagagttcatggaacaggtgccactattgttagtaacctaatactgggcatgactaagctaatgaatattggcaagtcgtggactacggataatcatgagatcggagatggggagcccggctgccagtcggcgtgcggacgctttcggagttaa

SEQ ID NO: 18777 - DNA, 1879 bp, Oryza sativa
  Clone ID: PAT_MRT4530_24302C.1
gctcttgaaacctcgcgacctccaccaactccgatcgaacagcccaatcgaccatggccgccgccgccgcccgttccggcgcgcatccgccatcgttcgcctcctcgctcggccggtgcagggttcttccagtcgtggtggtgcgtcggccgggcggtgccgcgaggccgtcaccgctgctcgctccggcgaggtgcgccgccgccgtcgggacggcggcgcccaaggtggagggcggcggacggcggtcgtcggagcaggggcagctggcggtggcgccggcgcggctggtggatgagctggtcgaggaggcgctggtggggtcgtcgcagcacggcctcgtcgttggcgacaagaaccacccgggagactgctgtccgatcttagttgacccaactggaaatagccagctcgaccatactgagaatagatcaggaaaagctcccggtgttggtttgctccatgcccgatttgctctactgccaatgtcattttcgaaagtttactgggatcaggcggttgaattggctccccttttaaatgagcttgttgatcatgttggtttggatggggtttttttgcagtatgctatgacaagtagtagtttatcaatttacagaacgacagaggtagattcattcacaggtgggcttattgatctacaagcagagattaaggtactatactacaaagagaaagtaaggttgtgtcttactaagtcaaattacttgattgatgtggcctcaaaacaacttcaacaagatgaactcaacacccttgcgacttcatctgaaagtctagattaaagtgtatgtgaacttcacagaaacctgattaggcagcatgagagggagctcggtttggatccagagagtgttgttgggaacacagcaattgctcagcatgctgaagcattagctggagcatgggctgagttcaacaatcaaaggttttcagtagttctggtggttgttcaaccagaagaaagagatggattgccagttgctgttgtgtacttcagagcaggttatacaccaaatgattacccttcagaagcggaatggagagcaagactcttgattgagtgttcctctgctattaagtgcccatcaatagcacaccatcttgttggaaccaaaaagattcaacaagaattggcaaaagaaaatgtgctcgaaaggtttcttgacaacaaagccgacatagaaaaagttcggaaatgctttgcagggctatggagcttggagaatgacagtatagtcatgtctgctattgaatcaccagaattgtttgttctgaagccacaaagagagggtggaggaaacaacatttatggggacaatctgcgtgaaacactgataagtctgaagaaggatggaagcaatgaacttgcagcctacatcctaatgcagaggatctttccaccagcatcactctgctatctagtccgagatggcacatgcattcgggaaaatgcggtttctgaatttggaatttttggagcctacctgcggaacaaagacagggtcattataaatgaccagtgtggttatttgatgagaaccaaggctgcctcactgaacgaaggtggggtagttgctggatacgcatttttgaacagcgtattcctgacatgacatggtaagacatgcgaaacatgtgtatcggtttgaatatggataattctccaagcaggttatcagagaattcataatttgtatgctattacttttagcaggaatcataccaatgttatttccatgacacacttttttttatttggcatgatttcgctatcagccgagattgaggtaccattattcccatgtataaaaatgttatagctatcatattttaatgtatgagtatcaatttgctt

SEQ ID NO: 18778 - DNA, 748 bp, Oryza sativa
  Clone ID: PAT_MRT4530_24303C.1
cgacagatgcatgcatgctttgctttaatatttattgtaaacgagagagagtgatcttcacttctcctgctttgtgttgatgagtgacgattggttatcagtacttagtttgatttctcttctaggggtgacaacgaatctgctcaacccaactggtcactatgtggacggcaattcaacatatatcactaccaccggacgaggccgatcgaccacatctcttggaagctcaccagccatggggaatacaccgcctcctcagcttacaaagtgcaattcttcgggtcactcaaaacaaacttcgataccttaatctggaaagtctgggcccagaggaaatgcaaaaccttcgcatggctaattattcaaaacaggatatggacattagctagacaaactagaaacctgaggatggcaaaacaacggttattgtccgttatgccgttgcacaggggaaaccgcccttcacctaatgacggagtgcagatacacaaagagagtttgggaagcgatcgctacctggatagcctacgaccccatgaggctaaccaactgggtactggcgacaacagtctacgactggtagaaaaagctagcaacgcaccagggcgtcccgaaaaaaggtattcgatccctagtccttctaatctcttgggaaatatggaagaagctgaaccagagaatctttcggaataaggagctatcccatgtggatcttattgtgaaaattaaggaggagtcaagatct

SEQ ID NO: 18779 - DNA, 3288 bp, Oryza sativa
  Clone ID: PAT_MRT4530_24304C.1
atggaccggccgccgccgcctcccgcctccctctcgcctcaggagtgggagcagctcatcgacgatttccccaccccgcgccgccaccgatggctccacctccccctcctcgacctcgccctctcctccctcccgcgccgcgacctcccctcccacctcaggcccctcctcctctccttcctcgacgaccacctcctcccgccctcccccacccacctccccctccttctctcctccctcctctccttcccctccgaccacccgctccgggaccacctcctcctcaccgtcacatccgccttcgcctccgcgctctcccttcccgtctccaccgaccacgccgaccccctctccgccctcgtcaacgccctgctcgcctccgccaaccgccccaaccacgcacccgaccgcgccgcccgcgccctcgcctgcgacgccctgcgcgccctcgacgccgcgctcccgggcctcctcgccgacgtcctcggccacgtctacgctctcgccgccgccgagcgctcgccggccgcgcagtcctacctcctcctcctcgcctccgccgcccgccacgtcgtccgcctcggcaggctcccctccaccacctccatcttggcggtgtccggcccgcccacccccttctttgtgcccgcgcatctcctcgcacccgcaccagatcctgccaaccccgtgccgccgccttccgaggtgaatttgagggacataaggaaagtgctcgctctgatcatggacaggccgcaggtcctcacgcctgcatcgggcatggagatggcggccatccttgcagaggtgtccgcggctgtggtcgggtgggctccggcgatcgcagcgcacgtcaaggtgcagtttggcgggatggcacattcgtccagcctcatgcttctacactctctgctcacgctgttcatccagtttccagatgctttcggggccgaagacgagcgtaaaatggcacgccgtctagctttggctgcttgtgaggcacaccgcccgctcacagcgcgcttgctggcattacattggctgcttggatctggaaaattcagatatgcggtgcccggcctcgcgaaatggttttatcctggcgtgttcgacccccttgcagtcaaggccaagaagctagattgcctagctcttgttgctgctggcgttgatgctgacaagattgaaggaggcagagatgtggaccagacaattgggcttgtcgatgatggcctggcttgtgtttcagccttcaggtggctcccgggatggagtaccgagacttgtgtggcgttccgggcgctgcatgtggtcttggttgctgctgcccctcacagtactgatggctcaggttgctccggagctggtgagctcctgaattctactatcttccaccatttacaggctatgttggttgatatgacatcagaacatcgaggcttagtcccagtaattgctgatttcatcaaccgtcttctagcatgcaacactcatcggtgggcaggggagcagttgctgcaaacgcttgacgagaatctgcttccgaggcttgaaccaggctaccaactggcgtcatactacccactctttgagaagatcgcagagaatgagacagttcctcagctccgcctaatagagttgctcaccaagcagatggcttctcttgccaagaagcatgatccagagacagaactgaaaacatggtctcagggcagcaaggtcgttggcatttgtcgtgtcatgatgaagcaccatcacagctctcgcatcttctttcccctctcatgcctacttgtactcactatcaagtcctacccagacctggaggtccgggaccatgcaaggatttgtttgcggatgctgtcctgcattcctggaaagaagctgaggcatctcatgggaatcggagagcaacctgcaggtgttacaccatctcatccaggtcctttgtttgatgtcccatcaccacgtcctgctcaagatcttaagagcatgcctgatttggcgtcttacattcatcttgaaagagttgtgccactggtcgtgaaacagtcttgggccctcacattgcctaacttcagcattcagagcagagcatctggccaaattctaagtatacaggatgtaagctcaactcctccggagcaagaaaagacaccacaacctaccatcgagagaatcgcctacacacaagaagctcttcgtgtgatggattctaagggtgctgaaacactggaaatccttaggaggcactttgcatgcattcctgactacctccactcagttggtctcaaaataaaaataccttgcacatttaggttcgattcagagccattcaaccatgcttggggatccgattcagcagttccaggttctgaaggggttgatggtttgccggccctttatgcggcgacaattaacttttcatcaagtgcacagtttgggaaaattccctcatgtcatgtacctttccttctaggagaacctccaggttctggtatggacattatgcctttggataacggccaccggttagaatcaagttattgtgcttcagtagtgatagaattagagcctcgagaaccatcacctggtcttattgatgttgtcatcaccgccaacacagagaattgccaagtcatatctgggtccattcaacccattacagttggcattgaggacatgtttctgaaggccagtgtacctcctgatattctgaaagaggatgcagctgagtattaccaggatctgttccatgcgctatgggaggcctgcaacagttgttcgaacacaggtcgggagaccttccctttgacaggagggaaagggtcagctgcgattaatggaacacgatctgtcaaacttcttgaggtgactccaaaggttttgatcagagctattgaaagatacctggctcccttcgttgtcagcgttgctggagattcacttattaccatcctaagaggcaatgcaattattaaaaacgttgtgtgggaagaaagtgattcagctcctattgttggtgctgatgcattggttccatactcagtggacacaaacctttcgcttcagcgcattgatgaagacgaatttgaggttggcgcagagacttatgctcatctaagcaagagggatatgggcattgtgcgtgtcctaatatttctaccaccaaggtatcacctcctcttttcgatggaagtaggttatgcctccacattggtcagaataagaaccgatcattggccatgtttggcatatgtcgacgaatacttggaagcgttgctctaa

SEQ ID NO: 18780 - DNA, 3309 bp, Oryza sativa
  Clone ID: PAT_MRT4530_24305C.1
tcacaaaagattcttagcaatgttaatagcactaatattatcacaaaagagaggtactttctcaaaagtaagaccataatctttcaaagtagataaaagccaaaaaatatgtgaacaacaactagcagcagcaacatattcagattcagcagttgattgagcaacactagattgtttcctagaagaccatacaatcaatgatgtaccaagaaaatgacatgttccactagtatttttcctatcaattctacaaccaccaaaatcagcatcgaaatatccacttaagcatatagaagatgaagtagaataccaaattccaaactcaagtgtatgattcaaatacctcattatttgcttgaccggttgacgatgtgaagcacgaggagaagcttgaaagcgcgcacacaaacatacaacaaattgtatgtctggcctagaagcagttagatacaacaaagttccaatcatacttctatactccttttgatcaacagcttcaccatcttcatcaggatccaacacagctgtagaaccaattggtgttgaaattggcttgcatttctccatcttgaaccgtctcaagagatccttcgtatacttcgtttgatgcacaaaagtaccttgaggtgtttgcttaatttgcaatcccaaaaagtacaataactcacccatcatgctcatctcaaattccctgcgcatagtctcagcaaagtccacaaccaaagcgtgagttgaacaaccaaagatgatattatcaacataaatctgaacaaatagttgattatcaccatgcttaagaacaaaaagcgttttgtcaacctttccctttgtaaaacctggtggttgtttgacataaacttcctcctgtatagaaccatttagaaaagcacttttcacatccatttgatacaatttaaaaccttttgaagcagcaaaagctaacaaaagtctaattgcctcaattctagcaacagcagcaaaagtttcatcaaaatccaaaccctccaccttagatcttgtagtccgctcacctatattaccaatgatttgttccggcggatgtcgtcgttgaatgtgcaaagcagcagcaacttctgaagttgatccacgtcctgtatcagtacttgtcgaagtagtaatctccggaggaccatctcgatcagcatcaacagtaccggaacccgatgaacctggccggtctgaccgctcctcctgaggcggtctgaccggaggtgtgccggcggtctgaccggcctggcgcctggtctgaccggccgagccgacctcatcgtcgtcgttgtcgttgtcgttctcgtctccaaaaatacgaccatcctccccctgaacctgtaacagtgtacctgcaatatcgtgtctagttcctggactagcctcatcaaaagaaacttcgcaagtttcaacgattttgttagtctccaaaataagtacacgatagccacgagtatgtgcggggtaaccaaggaacaatccaacagtagaacgtgcctcaaacttgtccaaatttccagatttcaagacaaagcatttgcaaccaaaaacacacaaatgtgaaactttgggttgatgaccaaatcgaaattcataagaagtttttccaagttttgatctcaagaaaactcgatttgaaatatagcatgcagtgttaatagcctcagcccaaaattttctaggagttttatactcgtccaacatcgttttagccatctcaaccaaaacacggtttttcctttcaacaacaccgttttgttgaggaacacgaggagaagaaaattcatgttcaagacctctttcgttgcaaaattgttcaaaagtatttttaaactcaccaccattatcacttcgaattcttttcaaagaaccagaaaattcaaaatcactttctttaacggattgcactctagctggaccaacagtgtccatgtgtaatagctgtcccggtgcattcgtcatcacagaaacaataggagcatgtgaagtagaaaccatcttagcatgacgacacggtgtacaaaccaaatcaagatctttcttaagtttaggcaaaccacgaacaagatccaaaccacttaacctagtgagatgatcaaaaccaacatgtccaagtctatgatgccaaaacatcacatctttatcaaacttagcaaccaaacatgttatcataggtgaaacaggattttcaaaatcagctttaaacactcttccgcagcgagaaatattcaacacagaatcaccacaagaatcaaaaactttacttccagttttcttaaagtgaacctcaaaatcttcatcaacaatttgtgaaactgaaagcaaattgtactttaaatcctcaaccaaagctacattcttcaattcaaatttttcatttaccttaaccgaacctgtagcgagaacggcacttatagaagtatcaccaaagataatcgattcagtcttggatgccttcttagagggaggagaaccaatttttatcaccggccatgtgccgcgaacaaccggaatccacgatccacatgttctccttccttgccaccaaagcctcatgatcttcatactctgtatccgattcaccacgcgccatgaagcaaacactggagatgttctttcctttatcttcatctccacactcaccatctacatcgcttagtggctcaaatgcggcgtatacttgatcaaaaaccttcctgagattctccttgaacttcctcccttgggatgtaccctttggcttgttgttgttggttttctcaccatctttgtcttctcttttgcctctcccaagcgccgagatcagctcttgtcgcttgttgccgaagccggtctgaccgccgtgtccccgccggtctgaccgctgtgacgctgccggtctgaccgccagtgcaccgccggttagaccgccgaaacccggtgaaacacaaatcgaagaactcttaaagtggatgacgactttattgattctctccgaggtaggcagcctccacagacgtcgtcttatccccaagccgactcccggtccatcaccgcaaatactctcccgaggcatcgagtcactgtgtcgccgcccgcctcgccggctggccggagggtgtcaacggcgccggcgagaccccccggccagcctcctccccctcccccctccttcctccccgagcgtcggcaacgagatgcccccgccgccaacgccggcccaccgccgtcctctagccccatggctccggcgccgctgccgacgcctcgccgctcacccgatacgccgcccaccgccgggctgccgcctcccccggccat

SEQ ID NO: 18781 - DNA, 720 bp, Oryza sativa
  Clone ID: PAT_MRT4530_24306C.1
atgggcctcctccacaatcttctcggagagccggccaactccctcctcctccttcctcccggcctgccttggcccaagcctccccgcccccttccacccggggcgcctcctggcccaagccgagccacgctcgcccacgccctcacgcgcgccgcacaagcgttgactgcgcgcctcccgatggcgttgctgccactgcaccgcctccagccgcctctgctgccgcgcctaagcatcggtcggctgtgtcgtcgcctccctcagctccgcagcatcgtcctcctccccggcctcaccatctcctcgcccgaagctcgctggagttgtgtccacgccggcggcggcaaggtcatcctcggcctcgcctcccctcctcccgaaccccgccgatcttcgtcgtcgtcatccggcgtgttccacgtcgtcctcgcctccccaccggcgttcgccgcggtcgtcgtcgtcctctcgtcgttcctggttgcgctcgtcgtggcgtccgtcctccgtcaagtcgttctcgtccgcgtccgtcaagtgagctgctgcagccccgttgtcgtcttcgtcctcggctccgcgtcgtcaagccctgcgccggccgtgtctcgcctccgtccaaggatcgccgccgaagtcgttccctcgccgttcgcctccgtcgtccccgagccgtctccgccgcgcccgttcgccgtcgtcgttcccacgcctcgttga

SEQ ID NO: 18782 - DNA, 709 bp, Oryza sativa
  Clone ID: PAT_MRT4530_24307C.1
acccgcaaagatggatatctatcttattgcagtatgacatggattttggggacgaccatatggaggccgacagcatggcgattcctcaaccccaatcgatgaagaagagcagaaaggcgcactcttctcctcagagaattactctcgataaacctacttcaagggggagaggaagaggaggaaaggtgcaggcctcatttttggctccgaagaagctagatctgggcaaggggcatgaagagactaaggggaaggaggtccagaagaagtacgtcgctccacaagagttccaactaggtatgccattgattggagacgacgtgctagccacaatgggcacctcttgcaaggaccttcacgtatactaaatggagaaatctaacgccaggagacagaatatagctagcaatatccttggagaccacgatcgaaagccattccttggtccaacaaattatatcgtggtcaactttaaggatctattcgacctcgacaggctccgagcggtggacacaaacctacttaagtgctactccttgttaagttggcagtggtgtcaggagaatgcaccggaacttgccttctttgatccacaagtggtcactgtcacaaatctcgagaataaccattaaggattggtcaactacatctacgacaccttttggtcctaccaagacaaggagtacattatgtgtgcctataataaata

SEQ ID NO: 18783 - DNA, 4547 bp, Oryza sativa
  Clone ID: PAT_MRT4530_24308C.1
aatcatgccaaaaggatgaaatattcccaattcaccatgaagaaaaacaaagcaattagaatccaaaggtttagtgaaaatatcagcaagttgcaactttgtgtccaaaaactgcaattcaacatctcccttctcaatatgatccctcaaaaaatgaaagcgaatatcaatgtgctttgtgcgtgagtgttgaacaggattcttagcaatgttaatagcactattattatcacaaaagagaggtactttctcaaaagtaagacaataatctttcaaagtagataaaaaccaaataatctgtgaacaacaactagcagcagcaacatattcagatttagcagttgattgagcaacactagattgtttcctagaagaccatgcaatcaatgatgtaccaagaaaatgacatgttccactagtacttttcctatcaattctacaaccaccaaattcagcatcggaatatccacttaagcatatagaagatgaagtagaataccaaattccaaactcaagtgtatgattcaaatacctcattattcgcttgaccgcttgacgatgtgaagcacgaggagaagcttgaaagcgtgcgcacaaacacacagcaaagtgtatgtctggcctagaagcagttagatacaaaaaagatccaatcatacttctatattccttttgatcaacagcttcaccatcttcatcaggatccaacacagctgtagacccaattggtgttgaaattggcttgcaattctccatcttgaaccgtctcaaaagatccttcgtatacttcgtttgatgcacaaaagtaccttgaggtgtttgcttaatttgcaatcccaaaaagtacgataacttacccatcatgctcatctcaaattccctgcacatagtctcagcaaaatctacaaccaaagcgtgagttgaacaatcaaagatgatatcatccacataaatctgaacgaacaattgattatcaccatgcttaagaacaaaaagcgttttgtcaacctttcccattgtaaaacctttcgcaagcaaaaagttcttaagcctatcataccatgccctaggagcttgtttcaaaccatacaaagctttagacaatctaaaaacatggttgggaaaatcagaattttcaaaacctggtggtcgtttcacataaacttcctcctgtataaaaccatttagaaaaatacttttaacatccatttgatacaatttaaaaccttttgaagcagcaaaagctaacaaaagtctaattgcctcaattctagcaacaggagcaaaagttttatcaaaatccaaaccctccacctgggtaaaaccttgagcaataagtctagctttatttctcacaatcaaaccatcctcactttgtttatttttgaaaacccacttggttccaataatattatgtccagaaggtggttcaactaaagtccaaactttatttctctcaaaattttcaagttcttcatgcatggcgttaatccacgattcatcagttaatgcatgagacacatctttgggttcaaaagaagcaacaaatgtagaatttgcacaaacatcatgagtcgttaccttagaacttgtagtccgctcacctatattaccaataatttgttccggcggatgtcgtcgttgaatgtgcaaaggagcagtgacttctgaagttgatcctcgttctgtatcagtactggtcgaagtaggaatttccggaggaccatctcgatcagcatcaacagaaccctcagccgacgaccctggccggtctgaccgcacgtcctgcgccggtctgaccggcctggcgcccggtctgaccggccgagccgacctcgtcgtcgtcgtcgttgtcgtcgtcgctctcgtcttcaaaaatacgaccatcctccccttgaacctgtgacaatgtacctgaaatttcgggtctagtacctggactagccttatcaaaagaatcttcgcaagtctcaacgattttgttagtctccaaaataagtacacggtagcgacgagtatgtgcggggtaaccaagaaacaatccatcgatagagcgtgcctcaaacttgtccaaatttccagatttcaagacaaagcatttgcaaccaaaaacacgcaaatgtgaaacaccattatcacttcgaattcttttcaaagaaccaggaaattcaagattcaatcgaagaaacaaaccacgaaagtgttgaaaagcttcgtacttagttgccataaagaaaacccaagaatatctagaaaaaacgtcaacaataacaaacacataccactttcctccaatggattgcactctagccgaaccaacagtgtccatgtgtaacagctgtctcggtgcatccgtcatcacagaaacaataggagcatgtgaagtagaaaccatcttagcatgacgacacggtgtacaaaccaaatcaagatctttcttaagtttaggcaaaccacgaacaagatccaaaccacttaacctagtgagatgatcaaaaccaacatgtccaagtctacgatgccaaaacatcacatctttatcaaacttagcaaccaaacatgttatcacaggtgaaacaggattttcaaaatcagctttaaacactcttgcataacgagaaatattcggcatagaatcaccacgagaatcaaaaactttacttccagttttcttaaaatgaacctcaaacttttcatcaacaatttgtgaaaccgaaagcaaattgtactttaaatcctcaaccaaagcaaatttgtgaatctgcatgcgtttgtttgctttcgagtgttaggaagcttgtgagttagtggtgtaagagctttcagttataatgtaataatgaaactcagttaagagtttttgagggaggagaaccaatttttatcgccggtcatgtgccgcgaacaaccggaatccacgatccacacgttctccttcctttccaccaaggcctttgattgatccaaaatcgtgttgaggttctttttactatcagaaaatctttgcaaagaatttttcaaataagaaacctctttttccaaactagcacaattttcacaatctaccatgacacatttgctttcacgacatatggggcaagaaagcactttgttgtttttcacaacatcttccatgtactcaacatgacctgaagcatcttttagtttcatcttattcaaattacatgttgagcaatccaaaacatcatgaggttgttttcactttttagcagaaatcatgttaaacatcaaactagcatgaaaagtaatttgatatttttgcaacaactttttagttaaaaacaactcatccaaagtgcgtgtacgcaaggcaaaactacgagcaagagaagatctatttttcaaatcatgtgcagcattaatatctctaatttttgaaatctcattcattaaaacctcacaatttgagcaatcatcatcattaggaataagagattttaatcttgcaacttcatatttaagagattcaatgataaattcctgttttctatacatcttctcacacttctttttttttcactcaaaatattaatagcttcctcaaacgcacttacctcattatgttcaaactctatgtcagattcaccacgtgccatgaagcaaacatcggagatgttcttccccttatcatcatctccactttcaccatctacatcacttagtggctcgaaggcagcccaaacttgttgaaaagccttcctaagattctccatcttcctcccttgggatgtacccttcgacttgttgttgttgggcttgttgttgttcgtcttctcaccatctttgtcttctcttttgcctctcccaagcttaggacaatgcgaacgaagatgatcaattgaaccacattcaaagcaccgatttggaccacatcttttcctgttcctggcattattcatagctcgagcaatacggttagcgaccaaagccaaatcctcctcctcgatttgttcgagttgatcatcggatatggcattaaaagcagcaagaaaagaaggcatagatgaagaagcatcaacatccaaagaagaagtagaagaaaccaaagcagtcgacttagaatcaacttttcgagaaagaacattcatctcatgtgttttcaattttgtgtaaagtgaatccaaagtcaaagtagacatgtcaacagactcctgaatagatgtaactttcatctcccaaatagacatattaagaccattcaaaaagtgacgagaaatctctgattgcggataattagtatcataagaagaatcaataagatcactcaaaattttattaaacctagaaagatagtcatcgaaagcttctccaggtttcatctcaaatttaatgtactcctttttgaaaatatcacgacgaagttgttttatgttatttgttccttcatgaaagttactcaaagcattccaaatctcatgagcagttcgaagatgcgcaacacgatcataatcagaacgagaaataccactcaaaagaatgttgcgagctttaaattcctccgaggccggtctgaccgaggtacagtg

SEQ ID NO: 18784 - DNA, 2469 bp, Oryza sativa
  Clone ID: PAT_MRT4530_24309C.1
ctagtggatccccgggctgcaggtttttttttttttttttttttttttttttttttttatttttttttttttttttggaagacgcttggtttcctcagcatgaatgttataacaaaataccagcagaatttattataggttacagtatatcaatagaatgaagcattacaccttaaatagcataaacacaaactaaattgtagtatataatcaactgtaactctagatgaaaattgaagcatattctttttttgaagactacatttattctatcctccagttgtaccaactagcaattgtgtccatcagtatactctttaactgcaatgttcacagaaaattcgccactacaatgttcacagaaaaattcgccgctgcagtatacctgcacagggaaaagcagcgccaggactctgctcatgtgctttcaaggttactgataccattatccgcgtgactaccaccactccacaagttcttggttgtattggccctctcaagaatcaagaatggtgttgcttgtgctaaaatatggtgctatggggcttattctgcatcaaaacctaaaatccgcctcaaatattccaattgctcaaactcgccttcgaggttctcccactcttgatgagataaagaaacaaggttccatccagcagcagcaatgtaacgtcgtttaaatgctgtgtggcctaatggtgtacctaaattccttgagaaatgtgatggtccgtctatttcaaatgcaagcttctcgtcaaccaacaccgcgtcaacagtgtagccatcaattgtatactctttattccattcatgccctgtactacataggagacgcccaacctccttttgaaacgaggaggtcatcttctgattgaaccgtttgctccttccagtttttgttaaattctcttcaagatcacctcgtaagcacatatcaagatgtgggtattctagcttcaaagactgatttgcaagataaacttgtgaaacaaacatcatatcttctctatactgatctgagattttccgttcttcaaattgacttagagttttccagatccctgagaagaacggacggtccatttggcctaaaacagcataggaccaagcaatatttccaatctgatctcgggtaaagttcagagcataggcattgctactgtttttcaggctagaagcttctttgtctgagctctgccacatgccaggcactgtatcatgtagatggcaatcgaaactaggagcatccctgcaagcagtatcaagtgcatcaagtagaggatacggacactcgttaagagaagcgcatccccacaagaactgggcgagctcttgctccttgaaggtgtacactagttctgctgctctccgggtcaatgctgagataaggtccggtgctgagtggcgcatggaagcgaatgatccggctacattggcaacattctgtgcattgaagctgtcaaccttggtgatggctacctgggcaatcctatccatctccggcaagtagagcaggtcacccccaatcttggacaaagcccaggagatgttagaaacaccctgcggtgagcattccggcagggccaccattgccagccccacgagcatggacatgtccctgctgcgcgcgaagccgagccggtgcgtctgtagcatggacaccgcctccatgttcttggcgatgcggtggagcgcggtggcgatgttgagcggcgtgagcggggacgggctgaggcctttggccacggcggcgaccacctcggcggtgagcgcgagcacctcgtcggcggtgcgagcctcgacgatggacctgttgagggacacctcctggctccggttggacggcgcggcgggtgagaaggcggagagcgtctggatgaactgctccctgttcctctggcgcttttcgtcgaacatgccatcggcgaactgcgcgaccctgagctcgaggtcgtccagctcaccccctcctgccaggagggcctccagatcatcgtccgcttcctcctcgtcgtcctcatcgtcgtcggtgtcgcgaggaggcttgggctcggcggccttcttctgcttcaagttcgtcttcttggacttcttcttcttgttcttcttcttgggcgaggccaccatccgctggagcgagggggagaggccacgcgcctcgatggagcggagagcggagcggcgcgcgcggacgcaccagtcgttggtctcggcggggagggagaggtcgaggtcgaggtcgtcgtcgtcgtcgccgccgtctgcctccgtgtccgcttccgcgcccaggaaatcgagctgccattgcggcgtggcgcggcagcggcatgcggggggagcgagcttcctgggcttccccgcagcggcggcggcggcggcggaagggagtcgagagacggagaaggcgatggcgatgctgacgccgcctcgggcagcgaggggaggaggacggaggagagcggcttccat

SEQ ID NO: 18785 - DNA, 519 bp, Oryza sativa
  Clone ID: PAT_MRT4530_2430C.1
atctcctttcactctctgcccatttctcttctccatctggaaaccatacgcccccgccaggaggatggagcttgacaccgtcaccagctagagcctgcagacagaccgagaggatgatattgtcgtcctcgttgcttgtgccgccccttaactcctactgcagcgtacaaggagctgacgctaaccaatatgtgcatagctactatgctctatatggaaatgaggaatccgaggagcggacatcaggccgccgatcgaacgaccatcctatgacaactaaacgtgtgtgagatgcggagcactctgctgacgatgagcggtaatggagcaactgtggagtacgagagcaagagcttcaccgtttgggagtgtgagaggcagcgacacagcaggcccatagtgaggcactatttgcagagaacgccagtgcctcatatttagtcggaacagcactgacacacagcgagtccagaggccacacgataatgctccaccgcctgcagtacgatgatgagctac

SEQ ID NO: 18786 - DNA, 4461 bp, Oryza sativa
  Clone ID: PAT_MRT4530_24310C.1
aaccatgccaaaaggatgaattatgcccaattcaccatgaagaaaagcaaagcgattagaatccaaaggtttagtgaaaatatcagtaatttgcaacttggtgtccaaaaactacaattcaacatctcccttttcaacatgatccctcaaaaagtgaaaacaaatatcaatgtgctttgtgtgtgagtgttgaacaggattcttagcaatgttaatagcactagtattatcataaaagagaggtaagtaagaccataatctttcaaagtagataaaagtcaaagaatctgtgaacaacaactagcagcagcaacatattcagattcagcagttgattgagcaacactagattgtttcctagaagaccatgcaatcaatgacgtaccaagaaaatgacatgttccactagtactttttctatcaattctacaaccaccgaaatcagcatcggaatatccacttaagcatatagaagatgaagtagaataccaaattccaaactcaagtgtatgattcaaatacctcattatttgcttgaccgcttgacgacgtgaagcacgaggagaagcttgaaaacgtgcacacaaacacagagcaaactgtatgtctggcctagaagcagttagatacaataacgatccaatcatacttctatattccttttgatcaacagcttcaccatcttcatcaggatccaacacagctgtagaaccaattggtgttgaaattggcttgcaattctctaccttgaaccgtctcaaaagatccttcgtatacttcgtttgatgcacaaaagcaccttgaggtgtttgcttaatttgcaatcccaaaaagtacgataactcacccatcatgctcatctcaaattccctgcgcatagtctcagcaaaatctacaaccaaggcgtgagtcgaacaaacaaaaatgatatcatccacataaatctgaacgaaaagttgattataaccatgcttaagaacaaaaagagttttgtcaacctttcgcattgtaaaacctttcgcaagcaaaaagttcttaagcctatcataccatgccctaggagcttatttcaaaccatacaaagctttagacaatttaaaaacatggttgggaaaaatcaggattttcaaaacctgatggttatttgacataaacttcctcttgtataaaaccatttagaaaagcacttttcacatccatttgatacaatttaaaaccttttgaagcagcaaaagctaacaaaagtctaattgcttcaattctagcaacaggagcaaaagtttcatcaaaatccaaaccctcaatttgagtaaaaccttgagcaacaagtctagctttatttctcacaatcaaaccatcctcattttgtttatttttgaaaacccacttggttccaataatattatgtccagaaggtggttcaactaaagtccaaactttgtttctctcaaaattttcaagttcttcatgcatggcgttaatccatgattcatcagttaatgcacgtgacacatctttggtttcaaaagaagcaacaaatgcagaatttgcacaaacatcatgaatcgttaccttagaccttgtagtccgctcacctatattaccaataatttgttctggcggatgtcatcgttgaatgtgcaaaggagccacgacttctgaagttgatccacgttatgtatcagtactggtcgaagttgtagtttccggaggaccatctcgaatagcatcaacagaaccttcagccgacgatcctggccagtctgaccgcacctcctatgccagtctgaccggaggtgtgctggcggtctgaccggcttggcgcccggtctaaccggccgagccgacctcgtcgtcgtcgttttcgtcgctctcgtcttcaaaaatacgaccatcctccccctgaaataataggagcatgtgaagaagcaaccatcttagcatgacgacacggtgtacaaaccaaatcaagatctttcttaagtttagacgaaccatgaacaagatccaaaccacttaacctagtgagatgatcaaaaccaacatgtccaagtttacgatgccaaaacatcacatctttatcaaacttagcacccaaacatgttatcataggtgaaacaggattttcaaaatcagctttaaacactcttccatagcgagaaattttcaacacaggatccccacaggaattcaaaaactttatttccagttttcttaaagtgaacctcaaaattttcattaacaatttggaaaccgaaagcaaattgtactttaagtcctcaaccaaagctacattcttgaattcaaatttttcatttaccttaaccaaacctgtagcgagacggcatttgtagcagcatcaccaaagataatcgattcagtcttgcatgcctttttgagtgaggagaaccaatttttatcaccggtcatgtgccgcgaacaaccggaatccacgatccacacgttctccttccttaccaccaaagcctttgattgatccaaaatcatattgaggttctttttaccatcagaaaatcttagcaaagaatttttcaaataagaaaccactttttccaaattagcacaattttcacaatctaccatgacacctttgcttttacgacacttggagcaagaaagcacttcattgtttttcacaacatcttccatgtactcaacacgacctaaagcatatttcaatttcaacttattcaaattacatgttgagcaatccagaacatcatgaggttgttttaactttttagcagaaatcatgttaaacatcaaactagcatgaaaagcaatttgatatttttgcaacaactttttagttaaaaacaactcatccaaagtgcgtgtgtgcaaagcaaaactacaagcaagagaagatttatttttcaaatcatgtgcatcattaacatctctaatttttgaaatctcattcattaaaacctcacaattttcgcaatcatcatcattaggaataagagattttaatctagcaatttcagatttaagagattcaatgataaattcctattttctatacatcttctcacacttcttattcttttcactcaaaatattaatagcttcctcaaaatcacttacctcattttcttcatactctgtgtcagattcaccacgcgccatgaagcaaacattggagatgttctttcccttatcatcatctccacttagtggctcgaaggcggtgcaaacttgttgaaaagccttcctgagattctccagcttcctcctttgggatgaaccctttggcttgttgttgttggtcttctcaccatctttgtcttctcttttgcctgtcccattcttaggacaatgcgaacaaagatgatcaattgaaccacattcaaagcaacgatttggaccacctcttttcctgttcttggaattattcatagctcgagcaattctgttagcaaccaaagccaaatcctcctcctcgatttgttcgagttgatcatcggatgtggcattaaaaacagcaagaaaagaaggcttagatgaagaagcatcaacatccgaagaggaagacgaagaaaccaaagcactcgacttagaatcaacttttcgagaaagaacattcatctcatgtgttttcaattttgtgtaaagtgaatccaaagtcaaagtagacatgttaacagactcctgaatagatgtaactttcatcttccaaatagacatgtcaagatcattcaaaaagtgacgagaaatctcagattatggataattagcatcataagaagaatcaacagatctaagatcactcaaaattttattaaacctagaaagatagtcatctaaagcttctccaggtttcatctcaaatttaatgtactcctttttgaaaagatctcgacgaagttctttaatgttattagttccttgatgaaaattactcaaaacattccaaatctcatgagcagtttgaagatgagcaacacgatcataatctgaacgagaaatcccactcaaaagaatattgcgagcctcgaaattgacggaagtcagtctgaccgagattgatctgccagtctgaccgagtggatgttgccagcctgaccggtatagattacccggtctgaccgccgatgtcgcctgctgcgcctgtcgccgccgctggtctgaccgccgccttgtcgccggtccaaccgccggtgagtcatcggttagacgctccccctctattttatacatgaggtaggcagcctaaagccacgaaccaaactcatactaagagtcctaaacaccttaggaaaccctctagtacaagaaagaaactttatataaccaatcgtaccaaatttggactccttccaaattcgactccgcatcccatacgtacacaatacctccatcgtataccatatagaatctccatcaaccacgtgcatcaactctagccgatcgcccttcccaacagttgcgcagcct

SEQ ID NO: 18787 - DNA, 4281 bp, Oryza sativa
  unsure (1)..(4281): unsure at all n locations
  Clone ID: PAT_MRT4530_24311C.1
ggattgtcctctcaaaaaaatcatactagaagtcctaatccacataggaaaccttcccgtacaagaaacaaactttacaaactccaatcataccaaatttggactccttccaaattcgactccgcatcccatacgcacacaatacctccattgtatgacatatcgaatattcaccaaccacaacaaagatccaatcatacttctgtactccttctgatcagcagcttcaccatcttcattaggatccaacacagctgtagaaccagttggtgttgatattggcttgcaattctccatcttgaaccgtctcaaaagatctttcgtgtacttcgttcgatgcacaaatgtaccttgaggtgttttcttaatttgcaatcccaaaaggaatgaaactcacccatcatgctcatctcaaattcactacccatagtctcagcaaactccacaaccaaagcgtgagttgacaaccaaagatgatatcatnacataaatctaaacgaacagttgattatcaccatgcttaagaacaaaaagtgttttgtcaacctttcccattgtaaaatctttcacaagcaaaaagttcttaagcctatcataccatgctctacgtgcttgtttcaagccatacaaagctttagacaatttaaaaacatggttgggaaaatcaagattttcaaaacctggtggttgcttgacataaacttcctcctgtataaaaccatttagaaaagtactttttacatccatttgatacaatttaaaaccttttgaagcagcaaaagccagcaaaagtctaattgcctcaattcaagtaacaggagcaaaagtttcatcaaaatccaaaccctccacctgcgtaaatccttgagcaacaagtctagctttatttatcacaatcaatccatcctcgttttgtttatttttgaaaacccacttgtttccaataatattatgtctagaaggtggttcaactaaggtccaaactttgtttccctcaaaattttcaagttttttcatgcatggcattaatccacgatacatcagttaatgcatgagtaacatctttgggttcaaaagaagcaacaaatgcagaatttgcacaaacatcatgagtcattaccttagaccttgtagtccactcacctatattaccaatgatttgttttggcggatgtcgtcattgaatatgcaaaggagcagcgacttatgatgttatatcacgttttgtaccagtactggtcgaagttgtaccctctagaggaccatctcgatcagcatcaacagaaccggaagccaacgatcctggccagtctgaccgctcatcctgagtcggtctgaccgggggtgtaccggcggtctgaccagcctggcgcccggtttgaccggccgagccgacctcgtcgtcatcgtcatcgctctcgtcttcaaaaatacgaccatcctccctctgaacctgtgacattgtacctgcaattttggctctaatacctggactagcctcatcaaaagaaacttcacgagtctcaataattttgttagtttccaaaacaagtacacgatagccacgtgaatgtgcggggtaaccaagaaacattccattagtagagcgtgcctcaaacttatccaaatttccatatttgaagacaaaacatttgcaaccaaaatcacgcaaatgtgaaagaccattatcacttcgaattattttcaaagaaccaggaaattcaagatccaatcgaagatacaaaccacgaaagtgttgaaaagcctcatccttagttgccatgaaaaaaacccaagaatatcgagaaaaatcgtcaacaataaccaacacataccactttcgtccaacagattgcactctagctggaccaacaatgtccatatgtaacagccgtcctggtgcatccgtcatcacagaaacaataggagcatgtgaagaagcaaccatcttagcatgacgacacggtgtacaaatcaaatcaagatctttcttaagtttaggcaaaccacaaataagatccaaaccacttaacctagtgagatgatcaaaacaaacatgtccaagtctacgatgccaaaacatcacatccttatcaaacttagcgaccaaacatgttatcacaggtgaaacaggatttcgaaaatcagctttaaacactcttccatagcgagaaatattcagtacagaatcaccacaagaatcaaatactttactttcagttttcttaaaatgaacctcaaaattttcatcaacaatttgtaaaactgaaagcaaattgtactttaaatcctcaactaaagctacgtttttcaattcaatctgtcatttaccttgagcaaacctgtagcgagaactgcactagtagaagcatcaccaaagataatcgattcagtcttggatgcctgtttgagggaggagaaccaatttttatcaccggtcatgtgccgcgaacaaccggaatccacgatccacacgttctccttcctcgccaccaaagccctattgtaactagtcactttagattgatccaaaatcatgttaagttgtttcttaccatcagaaaatctttgcaaagaatttttcaaataagaaacctctttttccaaattagcacaattttcacaatttaccatgacacctttgcttttacgatatttggagcaagaaatcacttcattagttttcacaacatcttccattgactcaacacgacctaaagcatcttttagtttcatcttgtttaatgtacatgttgagcaatccaaaacatcatgtggttattttaactttttggctcaaattatgttaaacatcaaactagcacgaaaagcaatttgatatttttgcaacaactttttagtcaaaaacaactcatccaaagtgtgtgtgcgcaaggcaaatccaagatctagagaagatctatttttcaaatcatgtgcagcattgacatctctaatttttgaaatttcattcattaaaacctcacaacttttgcaatcacaatcattgggaataagatattttaatctagcaacttcagaattaagagattcaataataaactcctgttttctatacatcttctcacacttcttattttttgcacttaaaataagaatagctttctcaaaagaacgtacctcattgtcttcacactccgaatccgattcaccacgtgccatgaagcaaacaccggaaatgttctttcccttatcttcatcttcactttcaccatctacatcacttagtggctcaaaagcagcatagacttgatcaaaagccttcttgagagtctccttcttcttcttccctttgaatgtgctcttcggcttgttgtcattggtcttctctccaccattatcttccatcttgcctcttccaagctttggacaatgcaaacgaaggtgatcaagagaaccacattcaaagcaacaatttggaccacctcttttcctgtacctaacattattcatagctcgagaaaacttgttagtaaccaaaaccaaatcctcctcgaattattcgagttgttcatcggatatgccattaattaaagcaagaataaaagacttcgatgaagaggcaccaacatccaaagaagtcgaggaagaaacctaagcactagacttagaatcaactcttcgagaaagaatattcatctcatgtgttttgagttttgtgtaaagcgaatccaaagtcaaagtagacctatcaacatactcctgaattgatgtaagtttcatctcccaaatagacatgtcaagaccattcaaaaagtgacgagaaacctcagattgtgtgtaattaacatcataagaacaatcaatagatctaagataactcaaaattttgttaaacctagaaagatagtcatccaaagcttctccaggtttcatctcaaattttatatactccttttttaaaagatcccgatgaagttctttaatattggtaattccttgatgaaaattactcaaaacaatccaaatctcattagcggtttgaagatgagaaacacgatcataatccgaacgagaaatcccactcaataaaatattgtgagctttgcaattttgttcaaatttagttcaattttgtacttgacgccggccggcaactccgccactctgcctcctcgaccactcgtctccgccatccgctggccacaacgccggccggcaactctgccactccgctccgtctgccccgtcaaaggccaaacacttttgtagcatgccttctgctgcagaactccccnagacgggaattcattttcatta

SEQ ID NO: 18788 - DNA, 700 bp, Oryza sativa
  Clone ID: PAT_MRT4530_24312C.1
atgggggcactgcacgtcggcgagccgcgggtcagcttccagcagcagcagcagcagcaggtcggcaagaacgggcagcaagggcatggccatggcgccgtggtggaggagatacacgggctcatcaaggtttacagggacgggttcgtggagcgcatcccggcgatccccgacgtgccgtgcacgtggggcacgacggcgtcggtgccgggcgtcgtcatcgcgcgcgacgctgtggtcgaccgtgccacgagggtgtgggcgcggctgtacgcgcctgcggcggcggcggcggcggggagggtgcccgtggtggtgtacttccacggcggcgggttctgcgtcggctccgcggcgtggagctgctaccacgagttcctcgccaagctggccgcgcgggcggggtgcgccgtgatgtcggtcgactaccgcctcgcgccggagaaccgcctccccgcggcgttcgacgacggggtcacgacggtgcggtggctgcggcagcaggcggcgatctccagcgcggccgacgagctctcctggtggcgcggccgctgccgcttcgaccgcgtattcctcgcgggggacagcgcgggcgccaccatcgccttccacgtcgccgcgcggctcgggcacggccagctcggcgccctgaccccgctcgacgtcaagggcgccatcctgatccagcccttcttcagcg

SEQ ID NO: 18789 - DNA, 255 bp, Oryza sativa
  Clone ID: PAT_MRT4530_24313C.1
atggcgaggattagaagaggtaggaacgtggagaacacgtatggcaccgaccgctaccttctcccggacaaagtcatggtggtgttgaaggcactggttgggaagcctggtcccattgggagggggcccctgggaacgaactcgtgggctgaattgtcggtggagcctggactgcttggcacatgccgacgtgctgcacagggtagtgcaccggctgaaaagtccgctgcacagggaggcctagaggcggcctag

SEQ ID NO: 18790 - DNA, 1417 bp, Oryza sativa
  Clone ID: PAT_MRT4530_24314C.1
tcgccatgcgtccggaaggagatcaggagaaggatgcagcggcggccggcagcaataggaggcggagcgatgaggaggggaggcggcggcgtttcgggatggcggataggcgggcgagaattttcagaatatgccatcgaatacgcaatgcttttaggatttaccatttaatttgtgctactttcagaatacgctatcggagtgcgaattttcttcgttcggtgccattccgtacccccaacgtcaatcacaccgtcatcgtccatctcccggcgccgccgacgtcagttcgccacctcccgcgctcgcgggcgtcacgccgtcgtccgtccgccgccgcccgctctcatgtgcgccacgcagtcgtccgtccgcccggcgccgccgtcgtcagtccgccaccgcctgtacccgcgtcagccgcgccgttgtccgttcgccgccgccatcgtcgtcgtcctccgcagcttcagggcaagcaagcgcggccaccgcgcgtgtttggggcggagctccgcatgtggggcgcggcgatgctccagggctgagcccggagctgcgtcaagatggcgacgatatgacgcgggctcctcgttgcctggattggtgtcgtcgatgccctggacgtcgacacgacgatgcgaccaccaaggccgtagaggccatcgccgtcgaggcctcatgccgcgaccgtgagaacacctcggttttaatcaccggggaaaaaaaggagtggctgtgtggggaacaagtagaggccgccacatacgacaacgtcgacgagctgttggtgaggacgacgacggggcggctgatggtgggcgacgacgacggccaagctgatggtggcaaacgacaagataggggaagcctcgaggttggacctgacgcaaccaccaacgtcggaggagagtggagaagagccgagaggagtaggaaggcgacgacggtgacgatggagcgaggcaccggcaatgccacaaaagaaagagtaggggccggtgttggcagcagcaggggcctgggagtccaaaaccttgatttttatggatctcgattctcgagcgacgagaggttgctggcaacaatgggagcaaggcgggccccacactcattgctacaggaaagaggggcgaggggcgaggcagccaacggggagaggagcggcggcgccgcggggcaggtcgccggcgagctcgatctgcaaccggcaccgtcgctactagggccacccgatgttgtcgtcgctgctcgggccgtccctccacccggcgcctccgtcgggacggggtcgacgttgttgccgctgctcggtacggggggcgccagatctgagtgctgcgccggcgctgccctcgccgccgcgctctgccgacgggtgtcgaaacaagaattcggcaataataaaagggggtag

SEQ ID NO: 18791 - DNA, 1856 bp, Oryza sativa
  unsure (1)..(1856): unsure at all n locations
  Clone ID: PAT_MRT4530_24315C.1
cttccggttcgtatgttgtgtgaattgtgaaccggatacaagtttcacacagaaaccagctatgcccatgattacgccaagctatttaggtgacactatagaatactcaggcttgaaagcgtgcacacaaacacacagcaaatctgtatgtctggcctagaagcaatcagatgcgataaagattcaatcatgttgttagttacagcttcaccatcttcatcaggatccaacatcatcatgcttatcttaaactccctgcgcatagtctcagcaaactccacaaccaaagcgtaagttgaacaaccaaagatgatatcatccacataaatctgaacgaacagttgattatcaccatgcttaagaactaaaagtgttttgtcaacctttccaattgtaaaacatttcgcaagcaaaaaatttttaagcctatcataccatgctctagttgcttgtttcaagccatacaaagctttagacaatttaaaaacatggttgggaaaatcaggattttcaaaacatggtggttgtttgacataaacttcctcctatataaaaccatttagaaaagcacttttcacatccatttgatacaatttaaaaccttttgaaatagcaaaagctaacaaaagtctaattgcctcaattctagcaacaggagcaaaagtttcaccaaaatccaaaccctccacttgggtaaaaccttgagaaccaagtctagctttatttgtcacaatcaaaccatcctcattttgtttatttttgaaaacccacttggttccaataatattatgtccagaaggtggttcaactaaagtccaaactttgtttctctcaaaattttcaagttcttcatgcatggcgttaatccacgattcatcagttaatgcatgagtaacatctctgggttcaaaagaagcaacaaatgcagaatttgcagaaacatcatgagtcgttaccttagatcttatagtccgctcacctagattaccagtgatttgttccggcggatgtcgtcgttgaatatgcaaaggagcagcgacttctgaagttgtttcacgttctgtaccagtattggtcgaagttgtagcctctggaggaccatcacgatcagcatgaacagaacgggaagccaacgaccctggccagtctgaccgctcatcctgaggctgtctgaccggaggtgtgccggcggtctgatcggcctggcgcccggtctaaccggccgagtcgacctcgtcgtcgtcgtcactctcgtcttcaaatatatgaccatcctactcctgcacctgtgacaatgtacttgcaatttctggtctagtaccaggactagtctcaacaattttgttagtttccaaaataagtacacgatagccacgagggtgtgcggggtaactaagaaacattccatcggtggagcgtgcctcaaacttatccaaatttccaggtttcaagacaaagcatttgcaaccaaaaacacgcaaatatgaaactttgggttgacgtccaaatcgaagctcataagaagtttttccaagttttgaaatatagcatgtagtgttaaccgcttcagctcaaaattttctaggagtgtgatactcatccaacatcgttctagccatctcaaccaaaacacgattttttctttcaataacaccattttgttgtggaacacgaggagaagaaaattcatgttcaagacctctttcattgcaaaattgttcaaatgaagcattttcaaattcaccaccattatcacttcgaatttttttcaaagaaccaggaaattcaacatccaatcgaagaaacaaaccacaaaatcacaagggtaccgagctcgtntgtcaatcacacggcgg

SEQ ID NO: 18792 - DNA, 453 bp, Oryza sativa
  Clone ID: PAT_MRT4530_24316C.1
atgggaccaccgccgccgccttcgtgccctcgaccgacttcgtccccgccgccttcagccaccgtcgcccagcgccgcgcgcccctaccttcgccgtcgccctccccgcagccagtcgccgccctgctagatccggccggagcggcccggatctggcagtcaccgcacctagggcggctcccctacccacccggtaagggccttagaattgatcctacgctcaacccccgtggtctatgggttccacgtcggagcgagctccatctagccctccccttctttgctctccctgttgtacggtggcaccgcgccaatgggaagaagaccgttgttgccatcgagaagacgaatggcccacgagcagacccggttgtcagcctcaccaatctactatcagatccgctcagtggcctcgccgagccaaccaatagcgtgggatggctctggctctag

SEQ ID NO: 18793 - DNA, 735 bp, Oryza sativa
  Clone ID: PAT_MRT4530_24317C.1
atggacctccagaggctacaacttcgaccagtgaaggtgagcggactacgaggtctaagaattttggcaattagacttttgttagctgttgctgcttcaaaaggttttaaattgtatcaaatggatgtgaaaagtgcttttttaaatggtttatacaagagaaagtttatgtcaaacaaccaccagatttatgtggatgatatttactttggttgttcaactcacgcttgggttgcagagtttactgagactatgcacagggaatttgagatgagcatgatggatggtcaagctgttgatcagaaggagtatagaagcatgattggatctttattgtatctaactgcttctaggccaaacatacaatttgttattcgttgtctaatatcaatttcgaaagattatggtcttacttttgagaatgtacctcttttttatgataatactagtgctattaacattgctaagaatcctgtacaacactcacgtacaaagcacattgatattcgctttgactttttgagggatcatgttgagaaggaagatgttgaattgacatttttggatacaaatttattggtgaagtggtttttggagatgaataggtactgctggagatttggtcctgtcagaccgggcagtgggtgccggtcagaccggtgtgctcaggtaatcttgacacctcgggagagtgttgctggtgatggatcgggagtcaactttgagatatggtaa

SEQ ID NO: 18794 - DNA, 4786 bp, Oryza sativa
  Clone ID: PAT_MRT4530_24318C.1
tcaaaccatgccaaaaggatgaattattcccaattcaccacgaagaaaagcaaagcgattagaatccaaaggtttagtgaaaatatcagcaatttgcaacttggtgtccaaaaaccgaaattcaacatctcccttctcaacatgatctctcaaaaagtgaaaacgaatatcaatgtgctttgtgcgtgagtgttgaacaggattcttagcaatgttaatagcactagtattatcacaaaagagaggtactttttcaaaagtaagactataatctttcaaagtagataaaagccaaagaatctgtgaacaacaactagcagcagcaacatattcagattcaacagttaattgagtaacactagattgtttcctagaagaccatgcaatcaatgatgtaccaagaaaatgacatgttccactagtacttttcctatcaattctacaacctccaaaatcagcatcggaatatccacttaagcatatagaagatgaagtagaataccaaattccaatctcaagtgtatgattcaaatacctcattattcgcttgaccgcttgatgatgtgaagcacgaggagaagcttgacagcgcgcacacaaacacacagcaaattgtatgtctggcctataagcagttagatacaacaaagatccaatcatacttctatattctttttgatcaacggcttcaccatcttcatcaggatccaacacagctgtagaaccaattggtgttgaaattggcttgcaattctccatcttgaaccgtctcaaaagatcattcgtatacttcgtttgatgcacaaaagtaccttgaggtgtttgcttaatttgcaatcccaaaaagtacgataactcacccatcatgctcatctcaaattccctgcgcatattctcagcaaaatctacaaccaaagcgtgagtcgaacaacaaaagatgatatcatccatataaatcttaacgaaaagttgattatcaccatgcttaagaacaaaaagcgttttgtcgacctttcccattgtaaaacctttcgcaagcaaaaagttcttaagcctatcataccatgccctaggagcttgtttcaaaccatataaagctttagacaatttaaaaacatggttgggaaaatcaggattttcaaaacctggtgattgtttgacataaacttcctcttgtataaaaccatttagaaaagccaacaaaagtttaattgcctcaattctagcaacatgagcaaaagtttcatcaaaatccaaaccctccacttgggtaaaactttgagcaacaagtctagctttattcctcacaatcaaaccatcctcattttgtttatttttgaaaacccacttggttccaataatattatgtccaaaaggtggttcaactaaagtccaaactttgtttctctcaaaattttcaagttcttcatgcatggcgttaatccacgattcatcagttaatgcatgtgacacatctttgggttcaaaagaagcaacagacgcagaatttgcacaaacatcatgagtcgttaccttagaccttgtagtccgctcacctggactagcctcatcaaaagaaacttcgcaagtctccacaattttgttagtctccaaaataagtacacgatagccacgagtatgtgcggggtaaccaagaaacaatccatcggtagaacgtggctcaaacttatccaaatttccagatttcaagacaaagcacttgcaaccaaaaacacgcaaatgtgaaactttgggttgatgtccaaatcgaagttcataagaagtttttccaagtttagacctcaagaaaacccgatttaaaatataacaagctgtgttaattgcctcagtccaaaattttctaggagttttatattcatccaacatcgttctagccatctcaacaaaaacacaatttttcctttcaacaacaccgttttgttgtggaacacgaggagaagaaaattcatgttcaagacctctttcattgcaaaattgttcaaatgaagcatttttaaactcaccaccattatcacttcgaattcttttcaaagaaccaggaaattcaagctccaattgaagaaacaaaccacgaaagtgtttaaaagcttcgtccttagttgccataaagaaaacccaagaatatcgagaaaaatcgtcaacaataaccaacacataccactttgctccaatagattgcactttagctggaccaacagtgtccatatgtaatagctgtcccggtgcatccgtcatcacagaaacaataggagcatgtgaagtagaaaccatcttagcatgacgacacggtgtacaaaccaaatcaagatctttgttaagtttaggcaaaccacggacaagatccaaaccacttaacctagagagatgatcaaaaccaacatgtccaagtctacgatgccaaaacatcacatctttatcaaacttagcaaccaaacatgttatcataggtgaaacaggattttcaaaatcagctttaaacacttttccatagcgagaaatattcaacacagaatcaccacaagaatcaaaaactttacttctagttttcttaaagtgaacctcaaaattttcatcaacaatttgtgaaactgaaagcaaattgtactttaagtcctcaaccaaagctacattcttcaattcaaaattttcatttaccttaaccaaacctgtagcgagaacggcacttgtagcagcatcaccaaagataatcgattcagtcttagatgccttctttagggaggagaaccaatttttatcaccggtcatgtgccgcgaacaatcggaatccacgatccacacgttctccttccttgccaccaaagccacttctagcaccaacacctttgattgatccaaaatcatgttgaggttctttttaccatcagaaaatcttaacaaagaatttttcaaataagagacctctttttccaaattagcataattttcacaatctaccatgacacctttgctttgacgacatttagggcaagaaagcacttcattgtttttcacaacatcttccatgtactcaacacgacctaaagcatctttcaatttcaacttattcaaattacatgttgagcaatccaaaacatcatgaggttgttttaactttttagcagaaatcatgttaaacatcaaactagcatgaaaagcaacttgatatttttgcaacaactttttagttaaaaacaattcatccaaagtgcgtgtatgcaagtcaaaactacaagcaagagaagatctattttttaaatcatgtgcagcattaacatatctaatttttgaaatctcattcattaaaacctcacaattttcacaatcatcatcattaggaataagagattttaatatatcaatttcagatttaagagattcaatgataaattcctgttttctatatatcttctcacacttcttattttttgcactcaaaatattaatagcttcctcaaaagcactcacctcattatcttcatactctgtgtcagattcaccacgcgccatgaagcaaacatcggagatgttgtttcccttatcatcatctcctctttcaccatctacatcacttagtggctcgaaggcggcgcaaacttgttgaaaagccttcctaagattctccatcttcctccctttgtatgaacccttcgacttgttgttgttggacttgttgttgttgatcttctcaccatctttgtcttctcttttgcctctcccaagcttaggacaatgcgaacgaagatgatcaattgaaccacattcaaagcaacgatttggaccacctcttttcctgttcctggcattattcatagctcgagcaattctgttagcaaccaaaaccaaatcctcctcgatttgttcgagttgatcatcggatgtggcattaaaaatagcaagaaaagaagacttagaatcaacttttcgagaaagaacattcatctcatgtgttttcaattttgtataaagtgaatccaaagtcaaagtagacatgttaacagattcctgaatagatgtaactttcatctcccaaatagacatgttaagaccattcaaaaagtggcgagaaatcttagattgtggataattagcatcataagaagaatcaacagatctaagatcactcaaaattttattaaaccgagaaatatagtcatccaaagcttctccaggtttcatctcaaatttattatactcctttttgaaaagatcacgacgaagttctttaatattatttgtttcaaatttggactccttccaaattcgactccgcatcccatacgcacacaatacctccatcgtatgccatatggaatctccatcaaccacgtgcatcaactctagccttagtatcccgcatgatctctgaccaccacggacgtcgtcttatccccaagctgattccaggtccatcactgcgaatactctcccgagacatcgagtcacagggcgccgccttcgccgccgtctcgccacttcccgatgccgcccgccgttttgcgccgccgccgtcgtcttgccttcgacgcgaaggatccgtcaccaacgtcagcggagcttcgcaagccaaaccctcgcgccaccaactccgcctcgtcgaggtgattccacttttccctttcccgatcactccaccttgagataaaccgccaccaccacgttctcttatcggccggtctgagatcttgctaccgccgttccggccatctccctctctccctccgccttccaccactttccccgggtgcgcgttgctcggaaacaccat

SEQ ID NO: 18795 - DNA, 288 bp, Oryza sativa
  Clone ID: PAT_MRT4530_24319C.1
atggcccgactggggttcgtgcccgtgccatcccggcccgactatcgggccgtgcctgggcttccccaccggcacgctaggccggcatggcatgagcgggccgacatggccaagcttgcccaaagaagaaggaggggaaatagacttatttcaaataaggcacaatgtgccaccagttccttcgggccggcatggcccgacccgactgctggtgggccgtgcctgggtctgaggcatggcacgtgggccagcacaggccggcatgaagagccgaccgtgccgtactag

SEQ ID NO: 18796 - DNA, 498 bp, Oryza sativa
  Clone ID: PAT_MRT4530_2431C.1
cccacgcgtccgcggacgcgtgggggttttttatcgctttctgaaactaggtggcaagatatatacctattctgaagcaatgagtttcctgctgaagactaggagtgaatctgacaagccgaagtcgccatcttctgaagaactgcagcaaaagatagttcaagtccgggaactcctgggaagcctggcagctgagatgccggcattcttatcagacaccaccatccgccgtttcctaagggcaaggaactggagcacggaacaagcaaccaagtcgctcaaagaaactgtcaagtggaggcgtcagtacaggccagaaagcatttgctgggtgctctcacaaatcccaaatcaacccctttgttgagtttgtaccaattgttttttctaaagcataattgtttgtaattattatgttttggacgacattgctgacaaggagtatgagggtaggagagcatatatagctgactaccttgatgccaaaggaagatctat

SEQ ID NO: 18797 - DNA, 783 bp, Oryza sativa
  Clone ID: PAT_MRT4530_24320C.1
atggggagagcagtggagcagcagcagggtggatgctgctcggagaagaagaagaagctgaggaaagggctatggtcgccggaggaggacgagcggctggcgacgcacatcgcgcggttcggcgtcagctgctggagctcggtgcccgacctcgccgggctgcagcgctgcggcaagagctgccgcctccggtggatgaactacctccgccccgacctcaagcgcggccgcttctcccaccacgaggaggagctcatcttggctctccatgacaagctcggcaacagctggtcacagatcgcggcgaggctgccggggaggtcggacaacgagatcaagaacttctggaacgcgcggctgcgcaagaagctccggcagacggagtcgtcgtcgtcggcgacgacggcggcgggggcggcggcgaccggacaccgccgcggcgaggctgaccggagtcgaccgccgccgcctgcatcgttcaacaccttctctcacgacgaccggacgactcctgctcctgccgcccacattgccgccgccgccgccgtcgaagcacccgcagcgatgacgacgacgggcggcgccgtcggcggcggtgttctcgtggacaacagtggtggtcaccgtgatgcggtggcggaggcggcgcggggacacgtcggcagcggcgacgacgatggcttcttggccgtgctgcttggggagtactacctcgacgccggcggccacggcgacggattcagcttcttgggcggcggcggcggcggccacgtgttcagctaa

SEQ ID NO: 18798 - DNA, 5478 bp, Oryza sativa
  Clone ID: PAT_MRT4530_24321C.1
aaccatgccaaaaggatgaattattcccaattcaccacgaagaaaagcaaaacgattagaatcgaaaagtttagtgaaaatatcagcaatttgcaactttgtgtccaaaaactgcaactcaacatctcctttctcaacatgatccctcaaaaagtgaaaacgaatatcaatgtgcttggtgcgtgagtgttgaataggattcttagcaatattgatagcactagtattatcacaaaagagaggtactttctcaaaagtaagaccataatctttcaaagtagataaaagccaaagaatctgtgaacaacagctagcagcagcaacatattcagattcagcagttgattgagcaacactagattgtttactagaagaccatgcaatcaatgatgtaccaagaaaatgacatgttccactagtacttttcctatcaattctacaacctccaaaatcagcatctgaatatccacttaagcatatagaagatgaagtagaataccaaattccaaactcaagtgtatgattcaaatacctcattattcgcttgaccgcttgacgatgtgaagcacgaggagaagcttgaaagcgcgcacacaaacacacagcaaactgtatgtctggcctagaagcagttagatacaacaaagatccaatcatacttctatattccttttgatcaacagcttcaccatcttcatcaggatccaacacaactgtagaaccaattggtgttgaaatttgcttgcaattctccatcttgaaccgtcgcaaaagatcctttgtatacttcgtttgatgcacaaaggtaccttgaggtgtttgcttaatttgcaatcccaaaaagtacgataactcacccatcatgctcatctcaaattccctgcgcatagtctcagcaaaatctacaaccaaagcgtgagtcgaacaaccaaagataatatcatccacataaatctgaacgaaaagttgattatcaccatgcttaagaacaaaaagcgttttgtcaacctttcccattgtaaaacctttcgcaatcaaaaagttcttaagcctatcataccatgccctaggagcttgtttcaaaccatacaaagctttagacaatttaaaaacatggttgggaaaatcaggattttcaaaacatggtggttgtttgacataaacttcctcctgtataaaaccatttagaaaagcacttttcgcatccatttgatacaatttaaaaccttttgaagcagcaaaagccaacaaaagtctaattgcctcaattctagcaacaggagcaaaagtttcatcaaaatccaaaccctcaacttgagtaaaaccttgagcaacaagcctagctttatttctcacaatcaaaccatcctcattttgtttatttttgaaaacccacttggttccaataacattatgtccagaaggtggttcaactaaagtccaaactttgtttctctcaaaattttcaagttcttcatgcatggcgttaatccacgattcatcagttaatgcatgtgacacatctttgggttcaaaagaagcaacaaatgcagaatttgcacaaacatcatgagtcgttaccttaaaccttgtagtccgctcacctatattaccaataatttgttccggcggatgtcgtcgttgattgtgcaaaggagcagcaacttctgaagttgatccacgttctgtttcagtactggtcgaagttgaattctctagaggaccatctcgatcagcatcaacagtatccgaacccgacgaacctggccggtctgaccgctcctcatgagccggtctgaccggaggtgtgccggcggtctgaccggcctggcgcccggtctgaccggccgagccgacctcatcgtcgtggtcgtagtcgctctcgtcttcaaaaatacgaccatcctccccctgaacctgtgacagtgtacctgcaatatcgggtctagtaccaggactagcctcatcaaaagaaacttcacaagtctcaacaattttgttagtccctaaaataagtacacgatagccacgagtgtgtgcggggtaaccaagaaacaatccatcgatagagcgtgcctcaaacttatccaaatttccagatttcaagacaaagcatttgcaaccaaaaacacgcaaatgtgaaactttgggttgatgaccaaatcgaagttcataagaagtttttccaagtttagacgcaagaaaatagcgagaaatattcagcacagaatcaccacaagaatcaaaaactttacttccagttttcttaaagtgaacctcaaaattttcatcaacaatttgtgaaactgaaagcaaattatactttaaatccttaaccaaagctacattcttcaattcaaaattttcatttaccttaaccaaacctgtagcgacaacggcactggtagaagcattagcaaagacaattgattcagtcttggatgcctttttgagggaggagaagcaatttttatcaccggtcatgtgccgcgaacaaccggaatccacgatccacacgttctccttccttgccaccaaagccgggggccggtctgaccacctctgtaccgccggtctgaccggtgtctggtctgaccgaggctctgcagccggtctgaccggtcgccggtctgaccgcgagatccactgcggtctgaccggtttcctcgagggaaaacccgatttttgccactttgattttgcaaaagcaatctctctctcctttttctgtttatgagctaatctgaaacaaaaaccaacaatatgtccatcttttccacaaaaagaacaagtatatttttcacgttgtttagacacattgttagaacaagaagatttagcaacacaagcagaaacaggaggttttgcatgcacaacattggattttgaagaagatacattcatggttaacatgataccagcagatttaaacacagttttattagtatcatgtttaatcaaaatctcaccacttttagcaccaacacctaacacaacaggaggatgtctagaattatgagcataaggatcaaaacctaaaccacggttatttgtgctaacctttgattgatccaaaatcatattgaggttatttttaccatcagaaaatcttagcaaagaatttttcaaataagaaacctcttttttcaaattagcacaattttcacaatctaccatgacacctttgcttttacgacatttggggcaagaaagcacttcattgtttttcacaacatcttccatgtactcaacacgacctaaagcatcttttagtttcatcttattcaaattacatgttgagcaatccaaaacatcatgaggttgttttaactttttagcagaaatcatgttaaacatcaaactagcatgaaaagcaatttgatatttttgtaacaactttttagttaaaaacaactcatccaaagtgcgtgtgtgcaaagcaaaacaacaagcaagagaagatctatttttcaaatcatgtgcagcattaacatctctaatttttgaaatctcattcattaaaacctcacaattttcacaatcatcatcattaggaataagagattttaacctgttaatttcagatttaagagatttaatgataaactcctgttttttatatatcttctcacactttttattttttgcactcaaaatattaatagcttcttcaaaagcacacacctcattatcttcatactctgtgtcagattcaccacgcaccatgaagcacacatcggagacgttctttcccttatcatcatctccactttcaccatctacatcacttagtggctcgaaagcggcgcaaacttgttgaaaggccttcctaagattctccatcttcctcccttggttagaacccttcgacttgtagttgttgggcttgttgttgttggtcttctcaccgtctttgtcttctcttttgcctctcccaagcttaggacaatgcgaacgaagatgatcaattgaaccacattcaaagcaacgatttggaccacctcttttcctgttcctggcattattcatagctcgagcaattcggttagcaaccaaagccaaatcctcctccttgatttgttcgagttgatcatcggatgtggcattaaaagcagcaagaaaagaaggcatagatgaagaagcatcaataaccaaagaggaagaagaggaaaccaaagcactcgatttagaatcaactttgcgagaaagaatattcatcccatgtgttttcaatttagtataaagtgaatccaaagtcaaagtagacatgttaacagactcctgaatagatgtaactttcatctcccaaatagacatgtcaagaccattcaaaaagtgacgagaaatatcagattgtggataattaacatcataagaagaatcaacagatctaagatcactcaaaattttattaaatctagaaagatagtcatccaaagcctctccagatttcacctcaaatttaatgtactcctttttaaaaagatctcgacgaagctctttaatattatttgttccttgatgaaagtttttcaaagcattccaaatctcatgagcagtttcaagatgtgcaacacgatcataatcagaacgagaaatcccactcaaaagaatattacgagctttgcaattattttcaaactcagtttttaaagcatcagtattaatggcttcaggaatcacataaggaagagaaactttcctccaaatatcataattttcagccataatgtaagattgcatcctacctcgaaatcgaagaaagtcggtctgaccgagattgatctgccggtctgactgagtggatgccaccggtctgaccgccgagatcgcctgctgcgcctgttgccgccgccagtctgaccaccgtgctcccgtcggtcggaccgcctcgtgccgccgatctgaccgctggtatatcgcctgttagaccgccgaaacccggtgaaacacaaatcgaagaactcttaaagtggatgacgataagccgacttccggtccatcaccgcaaatactctcccgagacatcgagtcacgtatagtatccatctagaagccataatcatgaaacaaccacggatatccaaacaaacaacccgaaaccgaaaccgacacagcgtcggccggtcagaccgcgggctgtgccggtctgaccgcgtaatacatgcccggtctgaccggtcacataaaataatagatcctgcgattcacctcgtggtacaaaaaatttgtgtaactttgaggtaccgagggcctgtttagttcccaaaaaacttttcccaaaaacatcacatcgaatcttcctctttcactctcatctcttcctctccccttcctcttccacatctgatcgagttttcctctcttctcttcctcagatctgcgggagaagcagccgaggcagcggccgggcccgtgctgggcgggggcggcggcggccggaccggtgccgaggaggggcagcggcggcggggccat

SEQ ID NO: 18799 - DNA, 216 bp, Oryza sativa
  Clone ID: PAT_MRT4530_24322C.1
atggcgccccaggcccagcccaccgtgggcgagcgcgaccagacgttcgcgtggaggcaggaggcgacaacgatgcgttttcgccatgagagctgcgtgcctcacgtgtaccttgtcgcccattattaccacatgcgggagaaagacttgctggcagaaacaactggagatgctaggtcagacccaaatgccaacatgactgacaacactgagtag

SEQ ID NO: 18800 - DNA, 947 bp, Oryza sativa
  Clone ID: PAT_MRT4530_24323C.1
ctttctagttatcctgtaattgactaaagaagctgcgtcttgcatgacagcttcaagttacacatgctgtctggtgctataaatacccacgaactcttcactcaacattcatctcattcttcacttcagtggctccatccatcacaatgactaagctcgtggctcttagctttatcgtcctcctaagcgttggactagccaacgctacaagggtagctagatatgctagcgctggaggaggcggcggtggtggaggaggtggtggtgggtcaaacggtggttctggctggggatctggctctggctcagggtatggccaggcaagtggtgatggatcgtatgctagtggagacggaggtggtggtggtggtggaggtgggcagaatggtggatccggatatggttctggttctggatctgggtatggacaagccggtgggtatggaccttatggtggaggatatgctcaaggagggggtggtggccaaggtggcggcggcgggcagaatggtggatctggatatggttctggctctggatctggatatggtcaagccgggggatatgggccatatggtggtggttatgctcaagctggtggccaaggtggtggcggtggtggtggacaaagtggtccaggtggtagcgggtatggcagcggttctggaagtggttctggaagtgcttatggtggacacccatagtagtgttccacctacattagcagagcttctatattgaaagctgggttggacagatatattactgttatttttacgtggataataagaaataaagggcttcactgaatgtaataattagagtggtgttgtgcaccacaatgcggttgtaagctcttggtgtaattgaatgtttgatcaatatgttattccaaatgcatgataattcacgatcgaaccacactgaggaccatttcggtttgaagt

SEQ ID NO: 18801 - DNA, 3211 bp, Oryza sativa
  Clone ID: PAT_MRT4530_24324C.1
tcaaaccatcctcattttgtttatttttgaaaacccactgggttccagtaatattatgtgtagaaggtggtcaactaaagtccaaactttgtttctctcaaaattttcaagttcttcatgcatggcgttaatccacgattcatcagttaatgcatgtgacacatctttgggttcaaaagaagcaacaaatgctgaatttgcacaaacatcatgagtcgttaccttagaccttgtagtccgctcacatatattaccaataatttgttccggcagatgtcgtcgttgaatgtgcaaaggagcattgacttctgaagttgatccacgttctgtatcagtactggtcgaagtagtaatttccggaggaccatctcgatcagcatcaacagaaccctcagccgatgaccctggccggtctgaccgctcctcatgggccggtctgaccggaggtgtgctggcggtctgaccggcctggcgcttggtctgaccggctgagccgacctcgtcgttgtagtcgtcgtcgctctcgtcttcaaaaatacgaccatcctccccctgaacttgtgatagtgtacctgaaatatcgggtctagtacctggactagcctcatcaaaagaaactttggaagtctccacaattttgttagtccccaaaataagtacacgatagccacgagtatgtgcggggtaaccaagaaacaatccatcggtagaacgtgcctcaaacttatcaaaatttccagatttcaagacaaagcacttgcaaccaaaaacacgcaaatgtgaaactttgggttgatgtccaaatcgaagttcataagaagtttttccaagttttgatctcaagaaaacccgatttgaaatataacaagcagtgttaatcacctcagcccaaaattttctatgagttttatattcatccaacatcgttctagccatctcaaccaaaacacggtttttcctttcaacaacaccattttgttgagaaacacgaggagaagaaaattcatgttcaagacctctttcattgcaaaattgttcaaaagaagcatttttaaactcaccaccattatcacttcgaattcttttcaaagaaccaggaaattcaagctccaatcgaagaaacaaaccatgaaagtgttgaaaagcttcgtccaaatcaagatctttcttaagtttaggcaaaccacgaacaagatccaaaccacttaacctagtgagatgatcaaaaccaacatgtccaagtctacgatgacaaaacatcacatctttatcaaacttagcaaccaaacatgttatcacaggtgaaacaggattttcaaaatcaggtttaaacactcttccatagcgagaaatattcaacaaagaatcaccacaagaatcaaaaactttacttccagttttcttaaagtgaacctcaaaattttcatcaacaatttgtgaaactgaaagcaaattgtactttaagtcctcaacaaaagctacattcttcaattcaaatttttcatttaccttaaccaaacctgtagcgagaacgacacttgtagcagcatcaccaaagataatcgattcagtcttagatgccttctttagggaggagaaccaatttttatcaccggtcatgtgctgcgaacaaccggaatccacgatccacacgttctccttctttgtcaccaaagcctacacacaagcagaagtcgaagcctcagttggtggtcggtctgaccgaggctgttcagccggtctgataggtcgccggtccgaccgcgggacccactgcggtctgaccggtttctttgattttgtaaaggcaatctctctctcctttttctgtttatgagctaatctgaaacaaaaaccaacaatatgtccatctttgccccaaaaaagaacaagtatatttttcacgatgattagacacattggtagcactagtagatttagcaacatgagcaacaacaggagattttgcatgcacaacattggattttgaagaagatgcattcatagtagatatgataccagcagatttaaacacagttttattagtatcaggtttaaccaaaatctcaccacttctagcaccaacacctaacacaacaggtggatgtcaagaattatgagcataaggattaaaacctaaaccacggttatgtgtgctaatctttgattgatccaaaatcatgttgaggttcttcctggcattattcatagctcgagcaattctgttagcaaccaaagccaaatcctcctcctcaatttgttcgagttgatcatcggatgtggcattaaaaatagcaagaaaagaagacttagatgaagaagcatcaacatccgaagaggaagacgaagaaaccaaagcactcgacttagaatcaacttttcgagaaagaacattcatctcatgtgttttcaattttgtgtaaagtgaatccaaagtcaaagtagacatgttaacagactcctgaatagatgtaactttcatcttccaaatagacatgtcaagatcattcaaaaagtgacgagaaatctcagattatggataattagcatcataagaagaatcaacagatctaagatcactcaaaattttattaaacctagaaagatagtcatctaaagcttctccaggtttcatctcaaatttaatgtactcctttttgaaaagatctcgacgaagttctttaatgttattagttccttgatgaaaattactcaaaacattccaaatctcatgagcagtttgaagatgagcaacacgatcataatctgaacgagaaatcccactcaaaagaatattgcgagctttgcatttttgttcaaacttagtttttaaagcagcagtattaatctcttcaggaatcacataaggacgagaaacttttctccaaatatcataaccttcagccataatataagattgcatcctactacaccaatgagaaaaatccgttccatcgaaaacatgaggcttagttgaaaacctagcgggagtagccatggcaaaaactccctcaatttcgatgagatcggtctgaccggagtagattagccggtctgactgaagcgtagccgccggtctgaccggtgttgaatctccggtatgacctccaagatctgctcctgacgcctgtcaccgacgccggtctgaccgccgtgtacccgccgatctaaccaccgcgatgccgtcggtaaggtttggctaaaaatacaa

SEQ ID NO: 18802 - DNA, 3370 bp, Oryza sativa
  Clone ID: PAT_MRT4530_24325C.1
atggctactcctgctaggttttcaactaagcctcatcttttcgatggaacgaatttttctcattggtgtagtaggatgcagtcttacattatggctgaagattatgatatttggagaaaagtttctcatctttatgtgattcctgaagctattaatactgctgttgaaaaaactgcttttgaacaaaattgcaaagctcgcaacattcttttgagtggtatttctcattcagattatgatcgtgttgcacatcttcaaactgctcatgagatttgggttgctttaagtaattttcatcaaggaacaaataatattaaagagcttcatcgagatcttttcaaaaatgagtacattaaatttgagatgaaacctggagaagctttggatgactatctttctaggtttaacaaaattttgagtgatcttagatctgttgattcttcttatgatgctaattatccacaatctgagatttctcgtcactttttgaatggtcttgatatgtctatttgggagatgaaagttacatctattcaggagtctgtcaatatgtctactttgactttggattcacttcacaccaaattgaaaacacataagatgaatgttctttctcgaaaagctaattctaagtctagtgctttggtttcttcttcttcttctttgtatgtagatgcttcttcatctaagccttcttttattgctgtttttaatgccacatccgatgatcaactcgaacagatcgaggaggaggatttggctttggttgctaaccgtattgctcgagctatgaataatgccaggaacaggaaaagaggtggtccaaatcgttgctttgaatgtggttcaattgatcatcttcattcgtattgtcctaagcttgggagaggcaaaagagaagacaaagagggtgagaagaccagcaacaacaagcccaacaacaacaagccgaagggttcatcccaagagaggaagatggagaatctcaggaaggcctttcaacaagtttgcgccgccttcgagccactaagtgatgtagatggtgaaaatggagacgatgataaggggaagaacatctccgatgtttgcttcatggcgcgtggtgaatctgacacggagtttgaagataatgaggtttcctacttgaaaaattctttgcaaagattttctgatggtaaaaagaacctcaacaagatcaatcaaagattagttcataaacagaaaaaggagagagagattgcttttgcaaaatcaaagtggcaaaaatctggtgttccctcgagaaaaccggctttggtggcaaggaaggagaacgtgtggatcgtggattccggttgttcgcggcacatgaccggtgataaaaattggttctcctctctcaaaaaggcatccaagactgaatcaattatttttggtgatgcttctacaagtgccgttctcgctacaggtttggtaaaggtaaatgaaaaatttgaattgaagaatgtagctttggttgaggatttaaagtacaatttgctttcggtttcacaaattgttgatgaagagtttaaggttcactttaagaaaactggaagtaaagtttttgattctcgtggtgattctgtgatgaatatttctcgctatggaagagtgtttaaagctgattttgaaaatcctgtttcacctgtgataacatgtttggttggtaagtttgataaagatgtgatgttttggcatcgtagacttggacatgttggttttgatcatctcactagattaagtggtttggatcttgttcgtagtttgcctaaacttaagaaagatcttgatttggtttgcacaccgtgtcgtcatgctaagatggttgcttcttcacatgctcctattgtttcagtgatgacggatgcaccgggatagctattacatatggacactattggtccagctagagtgcaatctgttggaggaaagtggtatgtgtctgttatgttgacgatttttctcgatattcttaggttttctttatggcaattaaggacgaagcttttcaacactttcgtggtttatttcttcaattggatcttgaatttcctagttctttgaaaagaattcgaagtgataatggtggtgagtttaaaaatgcttcttttcaacaattttgcaacgaaagaggtcttgaacatgaattttcttctctcgtgttcctcaacaaaactcctagagaaccgtgttttggttaagatggctagaacaatgttggatgaatataaaattcctagaagattttgggctgaggcaattaacactgcatgctatatttcaaattgggttttcttaaggtcaaaacttggaaaaacttcttatgaacttcgatttggacgtcaacccaaagtttcacatttgcgtgtttttggttgcaagtgatttgtcttgaaatctggaaatttggataagtttgaggcatgttctaccaatggattgtttcttggttaccccacacacactcgtggctatcgtgtacttattttggagactaacaaaattgttgtgactagtccaggtactagacccgatattgtaggttcagtgggaggatggtcgtatttttgaagacgagagcgacgacaacgacgacgacgaggttggctcggccggtcagaccgggcgccaggccggtcagaccgccggcacacctccggaggaagtttatgtcaaacaaccaccaggttttgaaaatcctgattttcccaactatgtttttaaattgtctaaagctttgtatggtttgaaacaagctcctagggcatgggaatttgagatgagcatgatgggtgagttatcgtactttttgggattgcaaattaagcaaacacctcaaggtacttttgtgcatcaaacgaagtatacgaaggatcttttgagacggttcaagatggagaattgcaagccgatttcaacaccaattgattctacagctgtgttggatcctgatgaagatggtgaagctgttgatcaaaaggagtatagaagcatgattggatctttgttgtatctaactgcttctaggccagacatttgttgttcacagattctttggcttttatctactttgaaagattatggtcttacttttgagaaagtacctctcttttgtgataatactagtgctatcaatattactaagaatcctgttcaacactcacgcacaaagcacattgatattggttttcactttttgagggatcatgttgagaaaggagatgttgaattgcagtttttggacaccaagttgcaaattgctgatatttccactaaacctttggattctaatcgctttgcttttcttcgtggtgaattgggcgtaattcatccttttggcatggtttga

SEQ ID NO: 18803 - DNA, 2614 bp, Oryza sativa
  Clone ID: PAT_MRT4530_24326C.1
ttttaaatacctctacacattttttttgttttctcggttagtggacatcggagtaacgccggcggcgagtccgggcggaaaacgttttcgggtggtggtgcatgtcgtgctatagacttgatctacccaaagaaatgcatgcatgtatgttttataggctgcaggatgctcaccgagattctagaaaaggttggcgaagcttggtcatccgtaatagctcgcgaacaggtccggcggcggcaaactccttcgggttgacggcgacagctcaaaagactccaagatcggaggaggcggaatcgacaatggcgacggcgaccggaggtgaagaagacggtggccgatctccgtacttgctgcgccattgcctgggattattgaggggttttgaagaggacttcaaggagaagacgttggcgtgatggctcggctcggcttggtctacagcggtcggaacgacgacgatgtcggctgcggcggtgcgcagagctccgggggccacggcggcgtttccgtcgctgcaatggatgaaatgagatggtgtcaaaggatggatgaccaaattagttttgcggggcttgacattggccttgttgagtgcataggactacaagcatttgcaccaaattggtatagggatattaagtctaaaagggatatagaaaaaattattcaaagattagaagatatccaaattataggagaaattcctatgaaatattgggaaaaaaatgctattgagtgcaaaattaatataataaacccagagtatattattaagactagcccaatagaagcaactccgaaagacataaaagaatttaagatgcatatagaagaactgttgaaactaggagccataagagaaagcagaagtccacataggtctgcagcgttcatagtaagaaatcatgcagaagaagttagaggtaaatctaggatggtcataaattataaaagactaaatgataatactatagaagatgcctataatatcccaaataagcaagaatggattaatagaatacaaggtagtaaatatttctcaaaatttgacttgaaagctggattctggcaagtaaagatggcagaagaatctatagaatggactgcatttacatgtcctcaaggacattatgaatggcttgttatgccattaggattaaaaaatgcaccagcaattttccaaaggaaaatgcagaatatatttaacgaaaaccaagaattcatattagtctacatagatgacctgttagtcttctcaaggacttacaaagaacatattgctcatcttgaaatattctttagaaaggtggaacaaaatgggttaatattatccaaaaagaaaatggaaatatgcaaagaaaaaattaacttccttggacatgaaataggagagggcaaaattcatttgcaagaacatattgctaagaaaattttacaatttcctgatgctatgaatgataaaaagaaattacagcaattcttaggacttgtaaattatgccagaaattacatcaataatttagcaaagttagcaggaccgttatatgctaaattaagaaaaaatagtcagagatattttaattctgaagacattaaattagtaagactaataaaagagaaggtgaaagaattaaaacctctagaattaccattagaagaaagttactttatcattgaaactgatgcatcacaatacggttggggtgctatattaaagcaaagacctactaaattttccgctaaatcagaagaaaaaatatgtagatatgcttctggaagttataaattaaaaactgtcaataatacagatagagagatcatggcaataatcaatgcaatcaatgcctttaggttgtacttaggatttaaagaattcacggttagaaccgattgtgaagccatttgtaggtactataatcagctaaatagcaagaaaagctcaactagaagatgggttttatttgaagatattataacaggaaacggttataaagttatatttgaacatattaaggggaaagataataatttgcctgacatgctttctcgtttacctgaattgcagaagcctatatatgtcgtatttgatggaaagctcccaggggtctatatatcttttgaagaaattgtggcccaaaagatagatgctaaattaatgggaggaatatcttggaagaaatataaagacattgatgaagcattaagccaggctagaaaaatactaggaataaattattatctagagcctgctgcaaaagaatatattcaaaaatgcaaaaaagctaaaggaaagaagactccagaaatacccattaaaacgactataaaagaagaagggtattctaaaaaacccacatacaaggaatgcctaacaaaaggagtggatccattagatggggaatatattgattggaaaataatagaaaaatttgaagaagcctccccacaattaaagaaggaattaaaggaggaaatacttaaagaattaaaacaagagatggatcagaaatttgaacaaataaaaaaggcagtagatgagaaattagaagtttctttttctgatctggacactatagatcttggtggtcatgggcagccagatgaatag

SEQ ID NO: 18804 - DNA, 1217 bp, Oryza sativa
  unsure (1)..(1217): unsure at all n locations
  Clone ID: PAT_MRT4530_24327C.1
cccactcgtccgcccacgcgtccgcccactcgtccgcccacgcgtccgcggactcgtgcggcgggccttcaccctcttctactagtcttcttcctcctctcgccctttcacaccggagccatagccggcgggagaggccagcccgactgccagagcctctacctacgactatccgcggccggatggcgccccgcgtgtccctgctcgccgccggcgccgtggccgtggccgtggtcctgcttctcgccgcgccggcgcgggcgtccaacgacgagggggacgcgctgtacgcgctgcggacgaggctgtcggatcccaacggcgtgctgcagagctgggacccgaccctcgtcaacccctgcacctggttccatgtcacctgcgaccacgccagccgcgtcgtccgcctggatttaggaaactccaacatctccggctcgattggccctgagctaggccgtcttgtgaacctccaatacctggagctctacaggaacaatcttaacggtgagatcccaaaagaattgggcaatctcaagaatttgatcagcttggatttgtatgccaacaagctcactggaacaatccccaagtcgctttccaagctcggctcgctgagattcatgcggttgaacaataacaagcttgctggatcaattccaagggagctggccaaactatccaacctgaaagtcattgacttgtctaacaatgacctctgtggaactattcctgttgacggtcccttctcaaccttccctcttcgaagctttgagaacaacaacaggctcaacggcccagagctgcaaggtttggttccttatgactttggatgttaagagctccatgttggtgaagtagcacagcaatgcatgtcgtccgttgataaatggaaaagaatatagtagtacaaataggaaagctagcatgtatgttgtgagttcacatatgcagcagagctgcagagctaaagagggaaggttaatgtacccaggcagcatgaacaaagaatgtattcagagaagttttacttatattcatgatacaggtactatgtatgtaaatttcaagctgctttactgcagtcgtgtttttaggtgatgcaaatcctagcgacacgaattaacgtacaaaatgcacaatcccacagtcccaccaaacattgaaacaacaccagaaaagctaaaggacccccccctcggaacggggacaacann

SEQ ID NO: 18805 - DNA, 1245 bp, Oryza sativa
  Clone ID: PAT_MRT4530_24328C.1
cccccagcgccgctgccgccctgcccgcaaccaccccgtcctctgccttacccgcctctgcgcatggcgagaatgcgcgtctcggcggcggcggcggcggcgctgttcgtggcggtggtggtggcctcgccgctgctggcgtcatcgcagcagccggcgatggcgccggcggcggcggcggcgccgacgaacaactcgcggctggagaaggcgtacgtggcgctgcaggcgctgaagcgcgccatcaccgacgaccccaagaacctgacgcacagctggtgcgggccggaggtgtgcggctacttcggcgtgtactgcgcggcggcgcccgacgacccgtgcgcgcgcacggtggccggcgtggacctcaaccacggcgacctcgccggcaccctcccggaggagctcggcctcctcaccgacctcgccgtcttccacctcaactccaaccgcttctgcggctccctccccgactccctccgcaacctccaccgcctccacgagatcgacgtcagcaacaaccacctctccggctccttcccctcccaactcctctgcctccctgacctcaaatacgtcgacctcaggtttaacaacttgtgcggagaggtgccggcggcgatattcgagaagaagatagacgcgctgttcatcaacaacaacaacttcgacttcaagctgacggagagcttcagcaactcgacggcgtcggtgatcgtgctggcgaacctgccgaagctggggggctgcctgccgagcagcatcggcgacatggccgagacgctcaacgagctggtcctcctcaacagcggcatctcgtcgtgcatcccgccggagatcggcaagctggacaagctcaccgtgctcgacctcagcttcaacgacttcgccggcgcgctgccggagaccatcggccacatgcgggcgctggagcagctcaacgtcgcgcacaacggcctcgccggcgagatcccggactccatctgcgccctcccgcacctcaagaacttcacctactcccacaacttcttctgcggcgagccgcaccgctgcctcgaggtgccgcacgttgacgaccgccagaactgcatcgccggccgccccgaccagcgctccggcgaggagtgcatcgcgttcctgcaccgcccgccggtgcactgcgacgcgcacggctgcatcgcgccgctgtcgccgccgccgccgccgccgccggtgcactacgcgcctccgccgccggtatattga

SEQ ID NO: 18806 - DNA, 1057 bp, Oryza sativa
  Clone ID: PAT_MRT4530_24329C.1
tcttgacttagcctggcttgggtgagtaccaaaacagagatggagcagcgctccagttacagtttcatgttttttttttccataatttcctggttcattcgagaagaagacaaactgaaagggaagctggttgacagatccatggctatgcaacacatcgatccttcagccaagatctagggcaagaaacagaaccaagaacctagggctcttccaccaagaatcccccgcaacactgcaagaacctaaaccacagaccaaatctccaagaacccatcacgattcccccatccccaccccctacgcggatcggaatccccaacaaacaccagcccttggaaagccctcatttgggcggaagaagagcagcagcagcacaagaaccctagcaagcaaaaaccaaggaggcggcggtggcgtgctacagcggcaggggaggaggcggtggccaagaaccctagcaagcaacaaccctagcgccggggagagaaaggaacaaggaagacgacggtgatgcgttactggcgagaaggcggcggagagcgtggacgtcggatgggaagcgggtcgtcgtcgccgtcgcctctcgcgtcgccagccgcatgccgtcgcctcttcgcttctcctctcgcgtcgcctcgcgtccggattggaaccggaggtagtgtcacctaacccggccgggaatggatccgggccaggaacagggggaggcaggccaaaccgggcccgtttccaatccgggccggccgaaacgaacgacgcttccgggccagaccagatttggaaacgggccgcttcgttccggccggaactgaggccgttccgggccgttcctggcgctgccgaacgaggcctaagatggagatgctgccgtggttggatcgtctggccgtccaatgcagccacgattttttttatggcggttctgataactctccgcgaggagagcgccgcggcgtcggtagcgggcggcacggcgagttcccgtggcgatcgacgaaatgggccggaacgaccacaaactaccagcccagtaacgacgatctgggcctga

SEQ ID NO: 18807 - DNA, 657 bp, Oryza sativa
  Clone ID: PAT_MRT4530_2432C.1
atggcgtcgtggccggaggaggaggaggagatgtacatgatcgtcctcggccacggcgacgtcctccacggcggcggcggcggcgagacgaagcggatgtgggcgacatcgcaggacggctgggtgatcacctacgacgcggagaccctcgccaccgccctgtgcaggtgcagcagcaacggcggcggcggcggcgccgggcggcgcaagatggtcgtcgtcctgccgtcgttcgggcggacgccgccggcggacggttcgagctgcacgctctccggcgatcccaccgacggcggcgggttcacggtggtcatcatcgagccgccggagggctccgcgctgtggtactgccacgtcggctcctcatcggcggcgccggcgaagtgggacaaggtcgaggttccggcgaggccaacgcccaccccccacctccacctccacctcccccagagcgagccgccgccgcctgtggagggccagggagagatggttttcgtgtggctcaccgcgttcttcctcgtcgtggcgctcatcgtgctcgtcatctaccagctgatgtgcttggcagatctggagtttgactatatcaatccattcgattcatcctcccggataaataaagtggatgatctggactgtattattggaggaggatga

SEQ ID NO: 18808 - DNA, 261 bp, Oryza sativa
  Clone ID: PAT_MRT4530_24330C.1
atgtcgtcactgtctgacattggtaaagaaaatgttatacctgccaaggttgaagatctgtctgaagagcaaaaggcagagatggagcagaagatgcaagaactgaagaaggcatatattaattctttttctatgactcggcaagggaaagatcgtcttgatttagctgtgcaccatgctctcatcaaccaatctggaatcttggtcaccacattgtcaaatttgatcaactcagtggttgatgggtcgattgctgagtag

SEQ ID NO: 18809 - DNA, 420 bp, Oryza sativa
  Clone ID: PAT_MRT4530_24331C.1
atgtccaatgccgatgggggtttcgccgggctcgacgacgcgacgtctcgagcaacggcgacggcctcgccggagccacgcatcaaatcgatggcctccttccctctctacctctcctcgcccctcttcagtttccccccaatcacacgcactctctcccacctctgcgcctcactctacagatcaaacatctcgagccgagaagccgaggagaaattgcgcgaagaaatgagtttcttggtgaatctaacagcgagaccagaagagaagagaagagaagcggagcgagcagcagcaatggcgatggagaggcgagccagacggcccaaggctttatcgtttccactcttccaacaatgccctccattcctcgcacctattctcaattctgccacctctacgactgcacctcgaggctag

SEQ ID NO: 18810 - DNA, 705 bp, Oryza sativa
  Clone ID: PAT_MRT4530_24332C.1
tttttttttttccctctccaaagcaactgcattttccagacttaccatacaacctaagacaagaagttaatagtacaaaaccaaccaagccgggtctcagggttaaaaaaaaaaagagcaaggatgcaagtcgcataagatactagtagaacattaaaaagaaaaatcagtatccatgtctccagaaatacatcagctggtaaagtaataaaaaagaagggtggtatatgctattccttcttggcagcaatcttgcttgcagacttcaccgttgatgatgagaagagcggagtgaacttgtggtggttgatcaccatgagcataacaaagatgtttgcagccaggaacatgagacctgctgcccagagcggtatgaagacgttttggcccttgaattcaagcatgtacgcccacatcagccagtgcagttgggaccccatccacaccaatatacaggccagacccttccacttcagcttcatggtagtccaagggaggatgaggggtagcaggcaaaagaaccacacaaagtattgtgctgtcatgaccttgttaaacgcaacaaatgcaactgtttggagaaacaaacaaaaaggaagatccctaggagaagcgtagaatgaaggccagttgcacgatcagctgtggcagaaaagaagcgagcttctgtatacttgagaacccttgctgatgatgcagatatat

SEQ ID NO: 18811 - DNA, 2601 bp, Oryza sativa
  Clone ID: PAT_MRT4530_24333C.1
atggcggcgcccggcggccgagggggtgcggcggaggaggaggaggagggctgcgatctgttccaatgcttctgcaaatggcgcaagcgctgcagccctcgcatcccgcgggtctctccggggagggattacgtctgcatatcctccgatgcctccggcgacagcactcccaagtggtctgtcctcgtcggctgcacctccatctatgagcctttccataacctgcggacacatcgcttccgggtttccgattccggccgagtcatgggctgcagcgacgacatgctcgagcgcttccgcggcgtgtccccgcacgacgacgagcacactgttttctcctccgccacagctgccatggcgcccaacagccgcaacatgtgcatcatctgtgcacactctccctcgttcgaccagagaagcactgacactagcggtggtggtggtggtggaggacaggacattgggctgcttcctaaggtgtttttcatggattgtgttgacaagagtttgacggtcttgccacctataccattcccacatggctcctatcagtctgtgtcagctcatggtgaactctggactcttgctactgtggaagacccaggaccctctggcgtcaaaaggcgacttttggtgtatcgattggatggaactagtaactcttgggctaagatcagtgacattgacttcccttaccgccgcccttcggtcaacatcttctgtggcggacctctccttcaaggttatgctgtcatcagcgacaggttcatcttgatgtcctttatcgatctcagcttcttctgctttgattgtgtttcgagttcgttgacgcgagtcaccactgaagatgaaactttccagtatgttcctatcagaggtagagcggcgcatgttgctcacaatgacaacggcatctattttatcgagcgtggcacattgttcagatataactactcaccagagagcaacaagccactgaagcctcctgaggtgatcgacgctatctgtccctaccggaaggaagggtatggattcgtcattcacctcaggaatgacatactctgtgccgtttggatgaacatgaacataccttgcaagtgtgccacacggcatgtcctaatcacaactttccgaattgaatgtcagctcgataaggatgattttgaacctaaagtcctcgaggtcctacactccacctgccgtagaattggtatgcttcgaagcaaagcacccgggcatgagtcctatgacagattgtgtttcatacaggaatatctggacgattcatctgagattgatccttcgatagctttgatgatgggagcaaggtccagctactccgaagctgatgaagttgacccaaagatgctgctttgttgtagggagtttttgagcataagagaacttagttcatgtgtagttcttgaagaatgtagggtaatggtcaaatcagaattctatttcatttgtcagtcgggtcaacacacatatttatataagatctctactgcaagaggaaagttgacatgccatgaaaccattctagaagcagaacactctttagagacaattaggaatggggatgtcggaatagatgatccgcctgcatggcattttgtgaactatggagtgaagctttatgtgatcccctctgttccacagtacaatcactattatgaggtggatgtctacagaaactcctctctcatcttggaaagcaaacggcctagtatttgtttctctgcagtttgtcgagttgggcaacggattgtggcattgggtgatactttggaggccgtgtatattcttgatctccaaaatgtggagtgggtcttttgcaagacatcgtcgacgtttttagacttaagaaaggaaatcaagatttctggatttgtagaccttggtaatgattcaatgatgatttcagaagttgatgcatgtgagtgttttattctagatcttaagaagaagcaatggtttgttgtagagccgcctaatggtgacatctggcagtactgtgttggtctgttgagcggaacatgtatgttcattgagggctttatatatacctgctcagatggggaaatggttgcatatgagttgatcgagaaagatggtttataccattgggatgcacctgtcataatgaggttaccatggaagaagttctctaacaggaaatttatggcgttctgtccaatttgtaaagatgtcatacatgatgacattgcattcagtattgtggaggcgcgtccgtttggttcaagtcatacagtagctactacaatagtacaattagaagtctctcctgctgggactctcctgctcgagcatggagacgggatgctgctgacgacgacggtggacatgtctggggtgacggtacacgtgagcccatccagcttgagacgacgaggaaggggactgatgagtggtgtcacggcgccggctagagggtcgatgaagcaggcctcgtgggaggcgccgacggcgaggaggcggccgctggcgccgatcaccatggtctgcgcggggccggcggcgaggctcggcggccaggggcagtcgcgggtggtgccggagaagacgaagcgactgtga

SEQ ID NO: 18812 - DNA, 1138 bp, Oryza sativa
  Clone ID: PAT_MRT4530_24334C.1
ctaatcacgaaagacattgttaaacccgcccatcaccgcgggcacgactattcgaatagttttactctggccagaggtgtaccaccccttgtaaacaaggcatggactccccagcgacccccgtgggcttatttccgccacttcacagtctgttgctctacaatgaaccatactgccttgctggccttggaactcttcaaattcttctcctgcgaaatcggactctccgggaatgtcggaatggggaaacaacgacgacgacgtcagcggtgacgtcatcaccggcggcgactcggacggcgcacgctcgccggtgaatgacggcgcggcggcgtaaacggagggtatctacgcgtagagggcgacgcggcgaactcaccggtgacccaaacgacggtggacggcaaccggacggcgacggcgacgaggatgaagcggcggcgacgatcgggtcaacgatgacggcagtgctccggcaatcctcggcagaaacggagggcgggacgaggacggcgacgacttggcgatcccaacagcggccttcccgagcgacggtgacgaccggagcgacggcggcgcacggctggacaagcggcagcgactgcggcgcacgggttctagcggaggcagcgctacaggcggcggcgggctaaggcgatggtggcggcgggggctagagggcggcgacggaggcccatggcgaccggcgacagcgatggaaagttagggttcgggagagagagacgaatccgattcgagatcgaatccggctatttccaaacgaaattggacgacgattccaaaagagaaaagatagaggggatcccggggatcatttcccctctattatttataaatttaggatttttagggtgtgacattttcgaaccgtaccgatgccgagttgatgagatggcaccaggagggtaggaaaaatgacggtaagattcaacaccctgccgatgctcgacagtggaaaaactttgatgcactacacccggaatttgcaaagaacccgagaaacgtaaggtttgcctggagcacaaacggaaagaacccgttcagtgacctaagcagctttcacaaaaccacactatcgatggatggattcacccgtgagatgacgtggttgtttcat

SEQ ID NO: 18813 - DNA, 544 bp, Oryza sativa
  Clone ID: PAT_MRT4530_24335C.1
caaacatactgaggaaaccttctggtgctactgatgcagctcatattccatgaacataacccataggcttaaaaaaaagctgaaaagagagcaatacttggagttacatatgcagttacccattcttttaccaaggggggcgtggggaacattattccaacaaatgctataacaaatgctacatgtgcttctgaatctgctaagcaaatttttaagctcatcaaaactggcaccaaatatgtcacgaataatctcatttataaaacacacattaaaacacacaaaaatgcaagagaaaaagactgacataaatactgacctggatccctaactgaaccccttacataacctaccacatcaactaccatcaaaaagctcataaagaacctcaaactagctcatgaagctggctatcgtaacacataaaggcacacacctatacaatcacccacccataactcctacatcaaatgacacaacagaacatgcgaccaacactgtgtgagctactgaaaggactctacacacaactgcacatacaact

SEQ ID NO: 18814 - DNA, 1119 bp, Oryza sativa
  Clone ID: PAT_MRT4530_24336C.1
atggcggacgccgacgtccgcagcggggcgcttctcccggcgcgaccgacgccgcagcggcggaggcagaagtgggcggtggagttcgcgcgcttcttcaggacgccgcggcgggatccgtccaagccgccgccgcccggcctccgccttgtcgcccggggcaagctccgccaccacggcacctggctcccggccgcctcccccgccgcgctctccatttcctgccccagccagtccttcgcggtccccgtcctcaccgtctccatcggcgacgtcgtcttcgtccgtaccgatcccgccccgctacctcgaggagcattttgtgtccattctcaatttttcgtggcctcaggttacatgtgtgacacaatgcccaataagtgggagcagagtggtgtttcactaaatgcatttctatatggtttgtttacaaaggaatgctcaactgaaaccatggatatcagaccatctggaagtgactatctttgtgaagattcatcagcatctgaatatattgcttctagtggaattcaccaaagctttgaggagccagatcagcctgtccacagaacagagacaccagcattaggctaccatgcagaaccagatgagcctatccacagaacagaggcaccagcattaagccagcctgagacaccatcattacgccaccatgaggcaccagaagagcctcttcttcaacctctccttgctaccaacattgataccgtcttctctggtttcccccccagtttcactgatatgctgacacaattttcatgtaaaactgagaaagatgctgaggaaccatatccagtaactgcaacggaccatgcaccacaagaggtgtctatgttagatacttcccataatggtacacacagtctcaatctcatttcccacttatttatctggaaaagtctgtcctctttccctgaccaatcagtattttgtgcagttgcaatttccacaacttctgctaacgaaattgatgttaatagagaaacaagtgatattatgacaaggataaagacatatatatctgatggcgccttccatgatatgttgttcaagctcgagagagttattgatgaactgggtggcgacttgtcactgtag

SEQ ID NO: 18815 - DNA, 538 bp, Oryza sativa
  Clone ID: PAT_MRT4530_24337C.1
tgcaggaattcggcacgggcggtgacgtgaaaatttcgcagcttctcgtgatgggggcagaagaggggagcaatccgccgccgccgccgccgcaggcggctcccgccgcgaggccgcagccgataactccggcggagttcctctcctggaagcagcggaaggatgcagaggaagctgcaaggaaagctgaagcagcacagaagcgagaggcagatatagcttcaggagcagtacaaatgaatgggcgagagctgttcaagcatgaaccctgggtctttgacaatagtatctactaagacgaatgaactccgagaaattcacaaccatatgtgctatatcttcaattgtgaagttcaacagagtagtctgcatgcagaggtagtagatattgttagcttaagtgtatttcatattgttaagcattgcacttaagctaagcatacgatttgttgtctgtgttaccgacttgtgaattcatatgattcatatctttatgacctctatgaaggcattcggattccgtaaaaaaaaaaaaaaa

SEQ ID NO: 18816 - DNA, 177 bp, Oryza sativa
  Clone ID: PAT_MRT4530_24338C.1
atggccataaggcccgaggcccgacaacccagcccaaagtgcggccatttggcccggtccaaacacgacatggcacgattggtgtcagacccaagccagctcgggccgacagttgggaacagctctgacgagagtgttgcatcaggcccccgtcatgtcggattggacactaattag

SEQ ID NO: 18817 - DNA, 258 bp, Oryza sativa
  unsure (1)..(258): unsure at all n locations
  Clone ID: PAT_MRT4530_24339C.1
aacctagtacaactgcatttttggctttgggtattcatacatacatatcaccccaatacagagcaggattaccgtacgcaatacacggcacgatcgaacttgttgaaaccnacactaaatcaagtaagtgagacacgtacgttcgttcatagatagacggcgtctatggcaggngggccatgtttctnttttactcacacacttataaacggctcgcataacnnnagcattatggtttggttttagcaggaggggacg

SEQ ID NO: 18818 - DNA, 486 bp, Oryza sativa
  Clone ID: PAT_MRT4530_2433C.1
cccacgcgtccgaccacatgcactatttcattgatgagctattctaagacgagtgagagagcaggagatgggagtagtgcaagatgcctatccgtagcattgaagcggggagccaccacgaggtgtacacacctccttgcagtcaaggcagcatcggacgagttaatttccaccctgatattcggctttaccggccagggcttcggcatggccttgatcaagctgaccggcggcggatcgacgacccccgccggtctgatcgcggtggcggtggcccacgccttcgccatgttcgtggctgtgtacgtcagcgccataataatctgcggtcacataaacccggccgagaccttccgcgcctgtggcggcagtgatatcaacctgagcgcggggcgcctctactggataggccagctactgggctcgaccgtggcgtgcttcctccttcgacgggaactggaggaactgaacgatggggccatcatg

SEQ ID NO: 18819 - DNA, 3411 bp, Oryza sativa
  Clone ID: PAT_MRT4530_24340C.1
aaacatgccaaaaggatgaattatgcccaattcaccatgaagaaaagcaaatcgattagaatccaaaggtttagtgaaaatatcagcaagttgcaactttgtgtccaaaaactgcaattcaacatctcccttctcaacatgatctctcaaaaagtgaaagcgaatatcaatgtgccttgtgcgtgagtgttgaacagtattcttagcaatgttaatagcacttgtattatcacgaaagagaggtactttagcaaattgtatgtctggcctataagcagttagatataacaaagattcaatcatacttctatactccttttgatcaacagtttcaccatcttcatcaggatccaacacagctgtagaaccaattggtgttgaaattggcttgcaattctccattttgaaccgtctcaaaagatccttcgtgtacttcgtttgatgcacaaaaataccttgaggtgtttgcttaatttgcaatcccaaatagtatgataactcaaccatcatgctcatctcaaattccctacgcatagtctcagcaaactccacaaccaaagcgtgagtcgaacaaccaaagatgatatcatccacataaatctgaacgaaaagttgattatcaccatgcttaagaacaaaaagcgttttgtcaacttttcccattgtaaaaccttttgcaagcaaaaagttcttaagcctatcataccatgctctaggtgcttgtttcaaaccatacaaatctttagacaatttaaaaacatgattgggaaaatcaggattttcaaaacctggtggttgtttgacataaatttcctcctgtataaaaccatttagaaaagcacttttcacatccatttgatacaatttaaaactttttgaagcagcgaaagctaacaaaagtctaattgcctcaattctagcaacaggagcaaaagtttcatcacaatccaaacccttcacctgagtaaaacctggactagcctcatcaaaagaaacttcgcaagtctcaatgattttgttagtctccaaaataagtacacgatagccacgagtatgtgcggggtaaccaagaaacaatccatcggtagaacgtgcctcaaacttatccaaatttccagatttcaagacaaagcatttgcaaccaaaaacacgcaaatgtgaaactttgggttgatgtccaaatcgaagttcataagaagtttttccaagtttagatctcaagaaaacccaatttgaaatataacatgcagtgttaattgcctcagcccaaaattttctaggagttttatactcatccaacatcgttctagccatctcaaccaaaacacggtttttcctttcaacaacaccgttttgttgaggaacacgaggagaagaaaattcatgttcaagacctcttttattgcgaaattgttcaaaagaagcatttttaaactcaccaccattatcacttcgaattcttttcaaagaaccaggaaattcaagatctaatcgaagaaacaaatcatgaaagtgttgaaaagcttcatccttagttgccataaagaaaacccaagaatatcgagaaaaatcgtcaacaataaccaacacataccactttcctccaacagatttcactctagctggaccaatagtgtccatgtgtaataactgtcccagtgcatccgtcatcacagaaacaatatgagcatgtgaagaagcaaccatctcagcatgatgacacggtgtacaaaccaaatcaagatctttcataagtttaggcaaaccacgaacaagatccaaaccacttaacctagtaagatgatcaaaaccaacatgtccaagtctatgatgccaaaacatcacatctttatcaaacttagcaaccaaacatgttatcacaggtgaaacaggattatcaaaatcagctttaaacactcttgcatagcgagaaatattcaacacagaatcaccacaagaataaaaaattttacttccagttttcttaaagtgaaccttaaccaaaccggtcatgtgccgtgaacaaccggaatccacgatccacacgttctccttccttgccaccaaagccttagattgatctaaaatcatgttgaggttctttttaccatcagaacatcttagcaatgaatttttcaaataagaaacctctttttctaaattagcacaattttcacaatctactatgacacctttgcttttacgacatttggggcaagaaaacacttcattgtttttcacaacatcttccatgtactcaacacgacctaaagcatctttcaatttcatcttattcaaattacatgttgagcaatccaaaacatcacgaggttgttttaactctctaatttttgaaatctcattcattaaaacctcacaacttttgcaatcatcatcattaggaataagagattttaatctagcaatttcagaattaagagattcaatgataaattcctgttttctatacatcttctcacacttcttattttttgcactcaaaatattaatagcttcctcaaaagcacttacctcattgttttcacactctgaatctgattcaccacgtgccatgaagcaaacaccggagatgttctttcccttagcttcatctccactatcaccatctacgtcgcttagtggctcaaacgcgacgtagacttgatcaaaagccttcttgagattctccttgatcttccttcctttgaatgtaccctttggcttattgtcgttggtcttctcaccatctttgtcttctcttttgcctctcccaagcttaggacaatgcaaacgaagatgatcaattgaaccacattcaaagcaacggtttggaccacatcttttcctgttcctagcattattcatagctcgagcaattctgttagcaaccaaagccaaatcctcctcctcgatctgttcgagttgatcatcggatgtggcattaaaaatagctagaaaagaagactttgatgaagaagcatcaacatccaaagaagatgaagaagaaaccaaagcacttgacttagaatcaactttacgagaaagaacgttcatctcatgtgttttcaattttgtgtaaagtgaatctaaagtcaaagtagacatgttaacagactcctgaatagatgtaacttttatctcccaaatagacatgtcaagaccattcaaaaagtgatgagaaatctcagattgtggataattagcataataagaaaaatcaacagatctaagatcactcaaaattttattaaacctagaaagatagtcatccaaagcttctccaggttttatctcaaatttaatgtactcctttttgaaaatagcacgacgaagttctttaatgttatttgttccaaatttggactccttccaaattcgattccgcatcccatacacacacaatacctccat

SEQ ID NO: 18820 - DNA, 348 bp, Oryza sativa
  Clone ID: PAT_MRT4530_24341C.1
atgtgctgcgggccttcagctcgtgccgccaacgaccgcctcgctcttctagcctcccggccggtcacattaaccgttctacatgccgctaacctcctcctcgtgtgccacctgtcacggcctcgtgcgcaaccaacctcccttcgcgcttgccgcgccagccacccacatgtgtcattgcctaggacggcgtcctcgcatgtggacctccgtcgatgcttacacgctgccccgtcgccccgggcgttacgtgaccccaacttctccactccttgctgggccaccgtgcatcctccccatcaccaccgcttggtttcactcgctgagccaccagatctgaccatgtga

SEQ ID NO: 18821 - DNA, 4884 bp, Oryza sativa
  Clone ID: PAT_MRT4530_24342C.1
atggccgaaaaaacagcaccgccaagcccaggctccggcaaaggcaaaccgccaaagccagggctgaccgacattattgatgacaatgtcctgccggttgaccccgagaagttcacaccagagcagaagcaggacttcgaagcaatgatgcaacaagcacgggatcagtatcagagctcctacatgcagacccgcaaggggtcactcgttcagaagtacaagttgaagctagttgccgacatccctgggatcggttcatctaaagatggggatgttaagcgagacccagatggctcggctcagccgagtgtcaaaggggctaccgaaggttctgcaggaaatcaaggtgataatcttccagaggtgcatggaactccaaatcgtgtttaccaagaactaccaggaggaaatttcagtcaaggtcttcaggattcttttaacaactttcaagatcggattgattacgcggtgcaccatgctttaattaaccagtctggggtgttagccaatatgttatcgaacatggcggctccatctgtcgcgccgatagcccaaccaacagcgtcggcatcaacatctgtacctgctgcatcggctactgcggcggctcagctgatgaatcccagattactaatgagggagtacccacagcctgctgaacagatcacgaatcagccaactcaagaccaggttgctgctatgttcctgccaccacccgttgttaattcagtacaacagcagccgattcagcaggcaccgccagtccagccgacagtgcagccggttcagcaacaagttgcgccaccagttcaaccgatggtacaaccagttcaacaacaggtcgcgcagccggttcagcaagcgtcattgccgcaacagcattttcagtcgaatcaacaaacaccgccgaggcaacggcttcagctgattcagcagactccggtacggcatcagccaattcagcacctggggtcggctaatgcatcggctgggttcgcagcaccttgggggcaacttgtgcagccatttgggaaccaagctactccagaacatttagttcaccatatacaaccagatggcactgtgatacctcagatggtccccgagcacttggcacgcaatattcagtcggatctgcacgactaccaagggggtaacttaagttatcgataccagccttcagctatacaagcccaatatcagccaggaggatcggctcagcagcagttcgctccccagtttggtcagtttgaatccatgcagcagcaaccacaaggggcagctcagcagcgacaatgggccgatgtgattgccgatgtaatgaggaaacaattcgggctcaaacttaaagagactggaagcttgtatcggcagccttatccagagtggtttgaaagggttcctcttcctaatcggtttaaaattccggatttctctaaattttcaggacaagagggcgtgtcaacctatgagcacattagccgatatcttgcccagtatggagaagcatcggctgtagatgccttgagggttaggatgttccgattgtctttgtccgggtcagcttttacttggttctcatctttgccgtatggatcggtcaatagttgggccgatttggagaagcagttccatagttatttctacagcggggttcacgagatgaagttgtccgacttaacagcaatcaaacagcggtatgatgaacccgtgcatgaatatattcagaggtttagagagatgaggaacaagtgtttcagcttaagcttgaccgatgcccagttagccgatttggccttccagggtatgatccctccgatcagggaaaaattctcatccgaagacttcgatagcttatcacatctgatacaaaaggtaaccttgcatgagcataggtcggctgatgtcagaaggagctctaagaaggttaatcatgtctgccagtatatgtatgaatcggacgatgaagatgatgattctgagatagctgcagccgaatgggtgaggagcaaaaaggttataccgtgtcaatgggtgaagagtcctggaaaggagaaaaaatatgattttgatatcactaaagccgacaagatcttcgatttgctactccgagaaaagcagattcagcttcctgctggtcatacgatcccatcggctgaggaattaggcaagaagagatattgcaagtggcataattctggatctcattctaccaacgattgcaaggtctttagacagcaaatccaggtggccatcgaaggaggaaaaattaagtttgacgattccaagaagccgatgaaggtcgatgggaatccttttcctgtcaatatggtgcatacagcaagtcaagcagccgatggatctcgtgcgaagggtttccaagtacattcggctaagattattaataaatatcaaaggaggtatgataagcagcaggggagacgttatgaagagaacgacaatggttttgatcctcattgggattgcgagttcttcagattctgctggaacgaaagaatgaggttgccatccatcaaaaattgtcctgggtgtagcgacatcattgaaagctcaagccgaccacatagtagggtgggagaagaatcagctaagctagccctatcatcagagcaggcggtatttgagaagcctgagggaacggagaatcggcatcttaagccattgtatgtaaatggctacatcaatgggaagccgatgtctaaaatgatggttgatggtggggctgcggtgaatttgatgccttatgctacattcaggaagctgggtaggaacgccgaggatctcatcaagacaaatatggtgctcaaagattttggcagtaatccatcagagaccaaaggtgttttaaatgtggagttgacggtcggcaacaagactattcctaccacgttttttgtcattgatgggaagggttcatatagtttattgcttgggagagattggattcatgccaattgttgtatcccttcaactatgcatcagtgcttgattcagtggcaaggtgacaagatagaggttgtgccagccgacagccgattgaagatggagaacccaagctattactttgagggcgttgtggagggttcagaggcctgtgctaaggatacagtagatgatctcgacgataagcagggccaaggttttatgtcggccgatgatttggaagaaattgatataggtctgggtgatcggccgaggccgacatttattagcaaaggatttaggccacatcagcaacctccgaggagatgtaaagccgatatgctcgaacctgttaaggctgagattaagagattatatgacgctggatttattcgtccatgccgatatgcagagtgggtatctagcatagttccagttattaagaagaatggcaaggtcagggtgtgtattgattttcgtaatttaaataaagcaacaccaaaggacgaatatccaatgccagtagccgatcaactggttgatgccgcatcagaaaacaagattttgagttttatggatgggaatgcagatgtgatgttttggcatcgtagacttggacatgttggttttgatcatctcactaggttaagtggtttggatcttattcgtggtttgcctaaacttaagaaagatcatgatttggtctgtacacagtgtcgtcatgctaagatggtttctacttcacatgctcctattgtttctgtgatgacggatgcaccgggacagctattacatatggacactgttggtccagctagagtgcaatctattggaggaaagtggtatgtgttggttattgttgacaatttttctcgatattcttgggttttctttatggcaactaaggacgaagcttttcaacattttcgtggtttgtttctacgattggagcttgaatttcctggttctttgaaaagaattcgaagtgataatggtggtgagtttaataatgcttcatttgaacaattttgcaacgaaagaggtcttgaacatgaattttcttctcctcgtgttcctcaacaaaacggtgttgttgaaagaaaaaatcgtgttttggttgagatggctagaacgatgttggatgaatacaaaactcctagaaaattttgggctgaggctattaacactgcttgctatatttcaaatcgagttttcttgcgatctaaacttggaaaaacttcttatgaacttcgatttggacatcaacccaaagtttcacatttgcgtgtttttggttgcaagtgctttgtcttgaaatctggaaatttggataagtttgaggcacgctctaccgatggattgtttcttggttaccccgcacacactcgtggctatcgtgtacttattttagggactaacaaaattattgagacttgcgaagtttcttttgatgaggctagtcctggcactagacctgaaattgcagggacactgtcacaggttcagggggaggatggtcgtatttttgaagacgagagcgactacgacgacgacgacggcgacgaggttggctcggccggtcagaccgggcgccaggccggtcagaccgccggcacacctccggtcagactggcgcaggacgtgcggtcagaccggccagggtcgtcggctgagggttctgttgatgctgatcgagatggtcctccggagattactacttcgaccagtactggtacagaacgtggatcaacttcagaagtcactgctcctttgcacattcaacgacgacatccaccagaacaaatcattggtaatataggtgagcggactacaaggtctaagaccggcggcggcgacaggtgcggcagggattctagggcggtccaaccggaatatctataccggtcagaccggcagctacgctttggtcagaccggctaa

SEQ ID NO: 18822 - DNA, 408 bp, Oryza sativa
  Clone ID: PAT_MRT4530_24343C.1
atgtacaaccgtcctagtgtcgcgtggtctaacgatagtaaatttacaaggaaagagagaaaaaaccacgggcgccagccagcaaaatatcttcactatatctggggtaaggttacatcgccgcacggtggcttacaagaggtagccaaaattctctggttggcattacttctcaagaaaaatggggaactggttgcccttactgcacacttcgacacatgtgagagcactctttataacaaaggatgtgatggattggaaagaacaaagctggataagaacatgcatgaaactatgaaagtgcaaagctggccacacgtcggaatcacaaaaatgcctccttgccatctcacacagtgccaaatgcaagcacaagcccagatctctgacaatgtcgcttttgagtaa

SEQ ID NO: 18823 - DNA, 3846 bp, Oryza sativa
  Clone ID: PAT_MRT4530_24344C.1
ctacaattcaacatctcccttctcaacatgatccctcaaaaagtgaaaacgaatatcaatgtgctttgtgcgtgagtgttgaacaggattcttagcaatattgatagcactagtattatcacaaaatagaggtactttctcaaaagtaagaccataatcttttaaaatagataaaagccaaagaatctgtgaacaacaactagcagcagcaacatattcagattcagcagttgattgagcaacactaaattgtttcctagaagaccttgcaatcaacgatgtaccaagaaaatgacatgttccactagtactttttctatcaattctacaaccaccgaaatcagcatcggaatatccacttaagcatatagaagatgaagtagaataccaaattccaaactcaagtgtatgattcaaatacctcattattcgcttgaccgcttgacgatgtgaagcacgaggagaagcttgaaagcgtgcacacaaatacacagcaaattgtatgtctggtctagaagcagttagatacaacaaagatccaatcattcttctatattccttttgatcaacagcttcaccatcttcatcaggatccaacacagctgtagaaccaattggtgttgaaattggcttgcaattctccatcttaaaccgtctcaaaagatccttcgtatacttcgtttgatgcacaaaagtaccttgaggtgtttgcttaatttgcaatcccaaaaagtacgataactcacccatcatgctcatctcaaattccctgcacatagtctcagcaaaatctacaaccaaagcgtgagtcgaacaaccaaagatgatatcatccacataaatctgaacaaaaagttgattatcaccatgcttaagaacaaaaagtgtgttgtcaacctttcccattgtaaaaccttttgcaagcaaaaagttcttaagcctatcataccataccctaggagtttgtttcaaaccatacaaagctttagacaatttcaaaacatggttgggaaaatcaggattttcaaaacctggtggttgtttgacataaacttcctcctgtataaaaccatttagaaaagcaattttcacatccatttgatacaatttaaaaccttttgaagcagcaaaagccaacaaaagtctaattgcctcaattctagcaacaggagcaaaagtttcatcaaaatccaaaccctcattttgagtaaaaccttgagcaataagtctagctttatttctcacaatcaaaccatcctcattttgtttatttttgaaaacccacttggttccaataatattatgtccagaaggtggttcaactaaagtccaaactttgtttctctcaaaattttcaagttcttcatgcatggcgttaatccacgattcatcaattaatgcatgtgacacatctttgggttcaaaagaagcaacaaatgcagaatttgcacaaacatcatgagtcattaccttagaccttgtagtccgctcacctatattaccaatgatttgttccggtggatgtcgtcgttgaatgtgcaaaggagcagcgacttctgaagttgatccatgttctgtattagtactggtcgaagttgtaatctctggaggtccatctcgatcagcatcaacagtaccggaacccgacgaacctggccagtttgaccgctcctcatgggccggtctgtccggaggtgtgccggcggtcggaccggcctggcgcccggtctgaccagctgagccgacctcgtcgtcgtcgttgtcatcgctctcgtcaggaaattcaagctcaaatcgaagaaacaaaccacgaaagtgttgaaaagcttcgtccttagttgccataaagaaaacccaagaatatcgagaaaaatcgtcaacaataaccaacacataccactttcctccaacagattgcactccagctggaccaacagtgtccatatgtaatagctgtcccggtgcatccgtcatcacagaaacaataggagcatgtgaaaaagcaatcatcttagcatgacgacacggtgtacaaaccaaatcaagatctttcttaagtttaggcaaaccacgaacaagatccaaaccacttaacctagtgagatgatcaaaaccaacatgtccaagtctacgatgccaaaacatcacatctttatcaaacttagcaaccaaacatgttatcacaggtgaaacaggattttcaaaatcggctttaaacactcttccatagcgagaaatattcaacacagaatcaccacaagaatcaaaaactttacttccagttttcttaaagtggacctcaaaattttcatcaacaatttgtgaaaccgaaagcaaattgtactttaagttctcaaccaaagctacattcttcaattcaaatttttcctttaccttaaccaaacctatagcgagaacgacacttgtagaagcatcaccaaagataatagattcagtcttggatgccttcttgagtgaggagaaccaatttttatcaccggtcatgtgccgcgaacaaccggaatccatgatccacacattctccttccttgccacaaaagccacttctagcaccagcacctttgattgatccaaaatcatgttgaggttctttttaccatcataaaatcttagcaaagaacttttcaaataagaaatctctttttccaaattagcacaattttcactatctaccatgacacctttgcttttacgacatttagggcaagaaagcacttcattgtttttcacaacatcttccatgtactcaacacgacctaaagcatccctcaatttcaacttattcaaattacatgttgagcaatccaaaacatcatgaggttgttttaactcattatcttcatactctgtgtcagattcaccacgcgccatgaagcaaacatcggagatgttctttcccttatcatcatctccactttcaccatctctatcacttagtggctcgaaggcggcgcaaacttgttgaaaagccttcctgagattctccagcttcctcccttgggatgaacccttcggcttgttgttgttggtcttctcaccatctttgtcttctcttttgcctctcccaagcttaggacaatacgaacgaagatgatcaattgaaccacattcaaagcaacgatttggaccacctcttttcctgttcctggcattattcatagctcgagcaattctgttagcaaccaaagccaaatcctcctcctcgatttgttcgagttgatcatcggatgtggcattaaaaacagcaagaaaagaagacttagatgaagaagcatcagcatccaaagaggaagaagaagaaaccaaagcactcgacttagaatcaacttttcgagaaagaacattcatctcatgtgttttcaattttatataaagtgaatccaaagtcaaagtagacatgtcaacagactcctgaatagatataactaaaagatagtcatccaacgcttctccaggtttcatctcaaatttaatatactcctttttgaaaatatcacgacgaagttctttaatgttatttgttccttgataaaagttactcaaagcattccaaatttcatgagcagttcgaaagtgcgcaacacgatcataatccgaacgagaaataccactcaaaagaatgttgcgagctttgcaattttgctcaaaagcagttttttcagcggcagtattaatagcttcaggaatcacataaggataagaaacttttctccaaatatcataatcttcagtcataatataagattgcatcctactacaccaatgagaaaaatccgttccgtcgaaaacatgaggcttagttgaaaacctagcaggagtagccat

SEQ ID NO: 18824 - DNA, 3968 bp, Oryza sativa
  Clone ID: PAT_MRT4530_24345C.1
atggctactcctgctaggttttcaactaagcctcatgtttttgatggaacggatttttctcattggtgtagtaggatgtaatcttatattatggctgaagattatgatatttggagaaaagtttctcatccttatgtgattcttgaagctattaatactgctgctgaaaaaactgcttttgaacaaaattgcaaagctcgcaatattcttttgagtggtatttctcgttcagattatgatcgtgttgctcatcttcaaactgctcaggagatttggagtgctttgagtaattttcatcaaggaacaaataatattaaagaacttcgtcgtgatcttttcaaaaaggagtatattaaatttgagatgaaacctggagaagctttggatgactatctttctcggtttaataaaattttgagtgatcgtagatctgttgattcttcttatgatgctaattatccacaatctgagatttctcgccactttttgaatggtcttgacatatctatttgggagatgaaagttacatctattcacgaatctattaacacgtctactttgactttggattcactttatacaaaattgaaaacacatgagatgaatgttctttctcgaaaagttgattctaagtcgagtgctttagtttcctctttggatgttgatgcttcttcatctaagtcttcttttcttgctgtttttaatgccacatccgatgatcaactcgaacaaatcgaggaggaggatttggctttggtttcttatttgaaaaattctttgctaagattttctgatggtaaaaagaacctcaacatgattttggatcaatcagagattagcacacataaccgtggtttaggttttaatccttatgctcacaattttagacatcctcctgttgtgttaggtgttggtgctagaagtggcaagattttggttaaacttgatactaacaaaactgtgcttaaatctgttggtgtcatattagttcataaacagaaaaaggagagagagagattgcctttgcaaaatcaaagtggcaaaaatctggttttcccttgaggaaaccggtctgaccgcagtgggtcccgcggtcggaccggcgaccggtcagaccggctgaacagcctcggtcagaccgaccaccggtcagaccggctgctttggtggcaaggaaggagaatgtgtggatcgtggattccggttgttcgcgacacatcaccggtgataaaaattggttctcctccctaaagaaggcagctaagattgaatcgattatctttggtgatgctgctacaagtgccgttctcgctacaggtttggttaaggtaaatgaaaaatttgaattgaagaatgtagctttggttcaggacttaaagtacaatttgctttcagtttcacaaattattgatgaaaatttttgaggttcactttaagaaaactggaagtaaagtttttgattcttgtggtgattctgtgttgattatttctcgctatggaagagtgtttaaagctgattttgaaaatcctatttcacctatgataacatgtttggttgctaagtttgataaagatgtgatgttttggcatcgtagacttggacttgttggttttgatcatcttactaggttaagtggtttggatcttgttcgtggtttgcctaaacttaagaaagatcttgatttggtttgtacaccgtgtcgtcatgctaagatggtttctacttcacatgctcctattgtttctgtgatgacggatgcaccgagacagctattacatatggacactgttggtccagctagagtgcaatctgttggaggaaagtggtatgtgttggttattgttgacgatttttctagatattcttggcttttctttatggcaactaaggacgaagcttttcaacactttcgtgaaaaaccgtgttttggttgagatggctagaacgatgttggatgaatataaaactcctagaaaattttgggctgaggcgattaacactgcttgttatatttcaaatcgggttttcttgagatcaaaacttggaaaaacttcttatgaacttcgatttggacatcaacccaaagtttcacatttgcgtgtttttggttgcaagtgctttgtcttgaaatctggaaatttggatgagtttgaggcacgttctaccgatggattgtttcttggttaacccgcacatactcgtggctatcgtgtacttgttttggagaccaacaaagtttcttttgatgaggctagttcaggtactagacccgatattgcaggtacactctcacaggtttagggggaggatggtcatatttttgaagacgagagcgacgacaacgaccacgacgaggtcagctcggccggtcagactgggtgccaggccggtcggactgccggcacacctccggtcagaccgacccatgaggagcggtcagactggccagggtcgtcgggttcgggtactgttgatgctgttcgagatggtcctccagagattacaacttcgaccagtactgatacagaacgtggatcaacttcagaagtcgctgctcctttgcacatttagcgacgacatccgccggaacaaatcattggtaatataggtgagcggactacaaggtctaaggtaacggctcatgatgtttgtgcaaattctgcttttgttgcttcttttgaacccaaagatgtgtcacatgcattaactgatgaatcgtggattaatgccatgcatgaagaacttgaaaattttgagagaaacaaagtttggactttagttgaaccaccttctggacataatattattggaaccaagtgggttttcaaaaataaacaaaatgatgatggtttgattgtgagaaataaagctagacttgttgctcaaggtttggattttgatgaaacttttgctcctgttgctagaattgaggcaattacacttttgttggcttttgctacttcaaaagctttgtatggcttgaaacaagctcctagagcatggtatgataggcttaacaactttttgcttgcgaaaggttttacaatgggaaaggttgaaaaaacgctttttgttcttaagcatggtgataatcaactttttgttcagatttatgtggatgatatcatctttggttgttcgactcacgctttggttgtagattttgctgagattatgcgcagggaatttgagatgagcatgatgggtgagttatcgtactttttgggattgcaaattaagcaaacacctcaagctgtgttggatcctgatgaagatggtgaagctgttgatcaaaaggaatatagaaatatgattggatctttgttgtatctaactgcttctaggtcagacatataatttgctgtgtgtttgtgtgcacgctttcaagcttctcctcgtgtttcacatcgtcaagcggtcaagcgaataatgaggtatttgaatcatacacatgagtttggaatttggtattctacttcatcttctatatgcttaagtggatattctgatactgattttggaggttgtagaattgataggaaaagtactagtggaacatgtcattttcttgttacatcattgattgcatggtcttctaggaaacaatctagtgttgctcagtcaactgctgaatctgaatatgttgctgctgctagttgttgttcacagattttttggcttttatctactttggaagattatggtcttacttttgagaaagtacctctcttttgtgataatactagtgctatcaatattgctaagaatcttgttcaacactcacgcacaaagcacattgatattcgttttcactttttgacggatcatgttgagaagggagatgttgaattgcagtttttggacacaaagttgcaacttgctgatattttcactaaaccctttggattctaatcgttttgcttttcttcgtggtgagttgggaataattcatccttttggcatggtt

SEQ ID NO: 18825 - DNA, 4936 bp, Oryza sativa
  Clone ID: PAT_MRT4530_24346C.1
atggctgaagattatgatatttggagaaaagtttctcatgcttatgtgattcctgaggttattaatactgctgctgaaaaaactgcttttgaacaaaattgcaaagctcgcaacattcttttgagtggtatttctcgttctgattatgatcgtgttgcacatcttgaaactgctcaagagatttggaatgctttgaaaaactttcatcaaggaacaaataatattaaagagcttcgtcgagatctttttaaaaaggagtacaataaatttgagatgaaatctggaaaggctttggatgactatctttctagatttaataaaattttgagtgatcttagatctgttgattcttcttatgatgctaattatccacaatctgagatttctcgtcactttttgaatggtctcgacatgtctatttgggagatgaaagctacatctattcaggagtctgttaacatgtctactttgactttggattcgctttatactaaattgaaaacacatgagatgaatattctttctcgcaaagttgattctaaatcgagtgctttggtttcttcttcttcctctttggttgttgatgcttcttcatctatgccttcttttcttgctgcttttaatgccacatccgatgatcaactcgaacaaatcgaggaggaggatttggctttggttgctaacagaattgctcgagctatgaataatgccaggaataggaaaagaggtggtccaaatcgttgctttgaatgtggttcaattgatcatcttcgttcgcattgtcctaagcttgggagaggcaaaagagaagacaaagatggtgagaagaccaacaacaacaagcccaacaactacaacaagtcaaagggttctaaccaagggaggaagatggagaatcttaggaaggcttttcaacaagtttgcgccgctttcgagccactaagtgatgtagatggtgaaagtggagatgatgataagggaaagaacgtctccgatgtttgcttcatggcgcgtggtgaatctgacatagagtatgaagataatgaggtgagtgcttttgaggaagctattaatattttgagtgctaaaaataaaaagtgtgagaagatgtataaaaaacaggaatttatcattgaatctcttaagtctgaaattgataggttaaaatctcttattcctaatgatgattgtgaaaattgtgaggttttaatgaatgagatttcaaaaattagagatgttaatgctgcacatgatttgaaaaatagatcttctcttgcttgttgttttgctttgcacacacgcactttggatgagttgtttttaacaaaaaagttgttgcaaaaatatcaaattgcttttcatgctagtttgatgtttaacatgatttctgctaaaatgttaaaacaacatgatgttttggattgctcaacatgtaatttgaataagatgaaactaaaagatgctttaggtcgtgttgagtatatggaagatgttgtgaaaaaaaatgaagtgctttcttgccataaatgtcgtaaaagcaaaggtgtcatggtagattgtgaaaattgtgctaatttggaaaaagaggtttcttatttgaaaaattccttgctaaaattttctgatggtaaaaagaacctcaatatgattttggatcaatcaaaggttagcacaaataaccgtggtttagattttgatccttatgctcataactctagtcatcctcctgtcgtgttaggtgttagtgctagaagtggtgagattttgattaaacctgatacaaataaaactgtgtttaaatctgctggtatcatgtctactatgagtgcatcttcttcaaaatccaatgttgtgcatgcaaaacctcctgtttctgcctgtgttgctaaaagttctagttctaacaatgcgtctaaacaacgtgaaaaatatacttgttctttttgtgtcaaagatggacatattgttgatttttgtttcagattagctcataaacagaaaaaggagagagagattgcttttgcaaaatcaaagtggcaaaagtcgggttttccctcgaggaaaccggtcagaccgcagtgggttccgcggtcagaccggcgaccggtcagaccggctgcagagcctcggtcagaccggacaccagtcaaactggcagtacagaggcggtcagaccggcccccggctttggtggcaaggaaggagaacgtgtggatcgtggattccggttgttcgcggcacatgaccggtgataaaaattggttctccctccctcgaataggcatccaagactgaatcaattgtctttgctgatgcttctactagtgccgttgtcgctacaggtttggttaaggtaaatgaaaaatttgaattgaagaatgtagctttggttaaggatttaaagtacaatttgctttcggtttcacaaattgttgatgaagagtttgaagttcactttaagaaaactgaaagtaaagtttttgattctcgtggtgattctgtgttgaatatttctcgctatggaagagtgtttaaagctgattttgaaaattctgtttcacctgtgataacatgtttagttgctaagtttgataaagatgtgatgttttggcatcgtagacatggacatgttggttttgatcatctcactaggctaagtggtttggatcttgttcgtggtttgcgtaaacttaagaaagatcttgatttggtttgtacaccgtgtcgtcatgctaagatggattctacttcacatgctcctattgtttttgtgatgacggatgcaccgggacagctattacatatggacacggttggtccagctagagtgcaatctgttggaggaaagtggtatgtgctggttattgttgacgatttttctcgatattcttgggttttctttatggcaactaaggacgaagcttttcaacactttcgtggttcgtttcttcgattggatcttgaatttcctggttctttgaaaagaattcgaagtgataatggtggagagtttaaaaatgctttatttgaacaattttgcaacggaagaggtcttgaacatgaattttcttctcctcatgttcctcaacaaaacggtgttgttgaaaggaaaaatcgtgttttggttgagatggctagaacgatgttggacgaatataaaactcctagaaaatttggggctgaggcaattaatactgcttgttatatttcaaatcgagttttcatgagatctaaacttggaaaaacttcatatgaacttcgatttggacatcaacccaaagtttcacatttgtgtgtttttggttgcaagtgctttgtcttgaaatctggaaatttagataagtttgaggcacgttctaccgatggattgtttcttggttaccctgcacacactcgtgactatcgtgtacttattttggggactatcaaaatcgtggagacttgcgaagtttcttttgatgaggctagtcctggtactagacccgaaattgcaggtgagcggactataaggtctaaggtaacgactcatgttgtctgtgcaaattccgcatttgttgcttcttttgaacccaaagatatgttacatgcattaactgatgaatcgtggattaacgccatgcatgaagaacttgaaaattttgagagaaacaaagtttggactttagttgaaccaccttctagacataatattattggaaccaagtgggttttcaaaaatagactaaatgaggatggtttgattgtgagaaataaaactagacttgttgctcaaggttttactcaagttgagagtttggattttgatgaaacttttgctcctgttgctagaattgaggcaattagacttttgttggcttttgctgcttcaaaaggttttaaattgtatcaaatggatgttaaaagtgcttttctaaatggttttatacaggaggaagtttatgtcaaacaaccaccaggttttgaaaatcctgattttcccaaccatgtttttaaattgtctaaagctttgtatggtttgaaacaagctcctagggcatggtatgataggcttaagaactttttgcttgcaaaaggttttacaatgggaaaggttgacaaaacgctttttgttcttaagcatggtgataatcaacttttcgttcagatttatgtggatgatatcatctttggttgttcgactcatgctttggttgtagattttgctgagactatgcgcagggaatttgagatgagcatgatgggtgagttatcgtactttttgagattgcaaattaagcaaacacctcaaggtacttttgtgcatcaaacgaagtatacgaaggatcttttgagacggttgaagatggagaattgcaagccaatttcaacaccaattggttctacagctgtgttggatcctgatgaagatggtgaagttgttgatcaaaaagagtatagaagtatgattggatctttgttgtatctaactgcttctaggccagacatacaatttgctgtgtgtttgtgtgcacgctttcaagcttctcctcgtacttcacatcgtcaagcggtcaagcgaataatgaggaaacaatctagtgttggtcaatcaactgctgaatctgaatatgttgctgctgctagttgttgttcacaaattctttggcttttatctactttgaaagattatggtcttacttttgagaaagtacctctcttttgtgataatactagtgctattaatattgctaagaatcctgttcaatactcacgcacaaagcacattgatattcgttttcactttttgagggatcatgttgagaaaggagatgttgaattgcagtttttggacaccaagttgcaaattgctgatattttcactgagcctttggattctaatcgctttgcttttcttcgtggtgaattgggaataattcatccttttggcatggtttga

SEQ ID NO: 18826 - DNA, 743 bp, Oryza sativa
  Clone ID: PAT_MRT4530_24347C.1
cccacgcgtccgcacgcatatgtttaatctggaaggcctcataccaaaactttgccaaattagtcaagaactaagggaagatgacaaagggttccgcctccgatgtgctgcacttcaggctcttgcttctatggtccaatacatgggtgaccactcacacatttccatggaacttgatgaagttgtgtccgtgatcgtaagttgttatgaggttaatcaaactctctcaataaaagaggttgtcaggcttcaagatgatgatgatttggtaatcaatggaagtctgactgggttgccagtatctgggcaaaatagtgccaaagtggcatctgatacaatgtctgcatctgaaaatccagcacattgggcaagggtttgcttacgtaatatggccagtatcgccaaggaggcaacaacagtgtggcgtgttcttgatcctcttttccgcctttttgatagccacaactattggtctcctgaaaatgggattgcattttctattctacaagaaatgcaggcactgatggacaaatcagggcaaaatggccatttgctgttatctttcaccataaaacacatagatcataagagtgttgccaagaagcctgccaagcaaacaagcattttaaaagttgcttcgcttcttgcaaaacatgcaaagttgaaggcgtcggtgacaatagcaagtgcaacaagcgacttaataaagcacttgcgcaaatgcatgcattgtgctgttgaat

SEQ ID NO: 18827 - DNA, 3290 bp, Oryza sativa
  Clone ID: PAT_MRT4530_24348C.1
tcaaaccatgccaaaaggatgaattatgcccaattcaccacgaagaaaagcaaagtgattagaatccaaaggcttagtaaaaatatcagcaatttgcaactttgtgtccaaaaactgcaattcaacatctcccttctcaacatgatcccgcagaaagtgaaagcgaatatcaatgtgctttgtgcgtgagtgttgaacatgattcttagcaatattaatagcacttgtattatcacaaaagagaggtactttttcaaaagtaagaccataatctttcaaagtagataaaagccaaaaaatctgtgaacaagaactagcagcagcaacatattcagattcagtagttgattgagcaacactagattgtttccttgaagaccatgcaattaatgatgtaccaagaaaatgacatgttccactagtacttttcctatcaattctcattattcgcttgactgcttgacgatatgaagcacgaggagaagttctatattccttttgatcaacagtttcaccatcttcatcaggatccaacacagctgtagaaccaattggtgttgaaattggcttgcaattctccatcttgaaccgtctcaaaagatccttcgtatacttcgtttgatgcacaaaagtaccttgaggtgtttgcttaatttgcaatcccaaaaagtacgataactcacccatcatgctcatctcaaattccctgcgcatagtctcagcaaaatctacaaccaaagcgtgagttgaacaaccaaagatgatatcatccacataaatctgaacgaacagttgattatcaccatgcttaagaacaaaaagcgttttgtcaacctttcccattgtaaaacctttcgcaagaaaaaagttcttaagcctatcataccatgccctaggagcttgtttcaaaccatacaaagctttagacaatttaaaaacatggttgggaaaatcaggattttcaaaacctggtggttgtttgacataaacttcctcctgtataaaaccatttagaaaagcacttttaacatccatttgatacaatttaaaaccttttgaagcagcaaaagccaacaaaagtctaattgcctcaattctagcaacaggagcaaaagtttcatcaaaatccaaaccctcaacttgagtaaaaccttgagcaacaagcctagctttatttctcacaattaaaccatcctcattttgtttatttttgaaaacccacttgattccaataatattatgtccagaaggtggttcaactaaagtccaaactttgtttctctcaaaattttcaagttcttcatgcatggcgttaatccacgattcatcagttaatgcatgtgaaacatctttgggttcaaaagaagcaacaaatgcagaatttgcacaaacatcatgagccgttaccttagaccttgtagtccgctcacctatattaccaatgatttgttccggcggatgtcgtcgttgaatgtgcaaaggagcagtgacttctgaagttgagtcacgttctgtatcagtactggtcgaagtagtaatctctggaggaccatctcgatcagcatcaacagtacccgaacccgacgatcctggccggtttgaccgtacgtcctgcgccggtctaaccggaggtgtgccggcggtctgaccggcctggcgcccagtctgaccggccgagccgacctcgtcgtcgtcgtcgtagtcgctctcatcttgaaaaatacgaccatcctccccctgaacctgtgacagtgtacctgtaatttcgggtcttgtacctggactagcctcatcaaaagaaacttcgcaagtctcaacaattttgttagtccctaaaataagtacacgatagccacgagtatgtgcggggtaaccaagaaacaatccatcggtagagcgtgcctcaaacttgtccaaatttctagatttcaagacaaagcatttgcaaccaaaaacacgcaaatgtgaaactttgggttgatgaccaaatcgaagttcataagaagtttttccaagtttagatcgcaagaaaactcgattcgaaatataacaagcagtgttaatagccttagcccaaaattttatagagttttgtattcatccaacatcgttctagccatctcaaccaaaacacgatttttcctttcaacaacaccgttttgttgaggaacacgaggagaagaaaattcatgttcaagacccctttcgttgcaaaattgttcaaatgaagcatttttaaactctccaccattatcacttcgaattcttttcaaagaactaggaaattcaagctccaatcgaagaaacaaaccacgaaagtgttgaaaagcttcatccttagttgccataaagaaaacccaagaatatcgagaaaaatcgttaactataaccaacacataccactttcctccaacagattgcactctatttggaccaacagtgtccatatgtaatagctgtcccggtgcatccgtcatcacagaaacaataggagcatgtgaagtagaaaccatcttaaccaaatctgtagcaacaacgacactagtagaaacatcagcaaagacaattgactcagtcttggatgcctttttgagggaggagaaccaatctttatcaccggtcatgtgccgcgaacaaccggaatccacgatccacacgttctccttccttgccatcaaagccggtttcctcgagggaaaaccagatttttgccactttgattttgcaaaagcaatctctatctcctttttctgtttatgagctaatctgatggaccgtgggccggtgggggcccggatacggtgaaggggcggtgaagggctgagggacaccaatgtgtgaaggggggattgttgaatagtcccacattggttgtggaagggcaaatgacctaagatataagtgggggagcccctcacctcaatggctagcttttggggtggaaaaggccctttacgatcaccaagtcgagcaagttcatgcgcaacattattataagaccgtggcgcaaaatagaaatcaaaactagaaaactgaaattggagaaccgtttttatctcagtgaagattgtagcaccagtagctaagtcatgcgaagaggacttgattgccgacaccaacaattccgaatcagactcaatatcaaccaccgaaacaccttgcgccagaatggctaataaagctgccaaacacgcctttgcttcagctgagatagcatcactgacaaactccaaacgcccagcgcccgcacacaaagcatgccccacctcatcgcgcaggcaaatccccat

SEQ ID NO: 18828 - DNA, 360 bp, Oryza sativa
  Clone ID: PAT_MRT4530_24349C.1
atggtgcttactgccgatttagtgccggggtttgagaggagagaaaggagcagaactggagaggttcagaccttgtctatgcatgaggtacggccgccaccgaagccctaccttatccttgtcgggatggggaagatcaaggcaccggtgtttctaatgaggaggcgctttgatgacatgggagaggagatgcctgtggtgaggaagaggaaggaggggaggctgcgacttgggagaaatggtggagcaggcggaggcactgaattcggcaacgacagctacactgagaaggagaagggggtgacactgagcagatgcggcgtgaagcagcaaacacacgagaatgcttttcttttctaa

SEQ ID NO: 18829 - DNA, 409 bp, Oryza sativa
  Clone ID: PAT_MRT4530_2434C.1
ccggaattcccgggtcgacccacgcgtccgttttcctcctttttttttttggaggagggggactttagcaggacaggatagcatatacggggcaaatttgtaagtacgtacacgcatggtcaatacagaggtcgacacatcataaaccgtaaacggctctcctaccaatgtccgacatatgtgcagttagacaacacgacgttcacatgatgaatcgaataagtctttacggcatcgaaggctacaatgtacagttttgttcttcttcactccactacaacacgttctccagatttttgggccagtggttctgtccctgcgcgaactattcaggacttgggcccagatttgatgctgctgctgtgtgggttgggctggggggcttgccccgtggtggttggggggggtg

SEQ ID NO: 18830 - DNA, 1574 bp, Oryza sativa
  unsure (1)..(1574): unsure at all n locations
  Clone ID: PAT_MRT4530_24350C.1
atggctactcctgctaggttttcaactaagaatcatgttttcgatggaacggatttttctcattggtgtagtaggatgcaatcttacattatggctgaagattatgatatttggagaaaagtttctcatccttatgtgattcctgaagctattaatactgctgctgaaaaaactgcttttgaacaaaattgcaaagctcgcaacattcttttgagtggtatttctcgttcggattatgatcgtgttacgcactttcgaactgctcatgaaatttggaatgttttgagtaactttcatcaaggaacaaataacattaaagaacttcgtcgtgatattttcaaaaaggagtacattaaatttgagatgaaacctggagaagctttgaatgactatctttctaggtttattaaaattttgagttatcttagatctgttgatttttcttatgatactaattatccacaatctgagatttctcgtcactttttgaatggtcttgacatgtctatttgggagatgaaagttacatctattcaaaagtctgttaacatgtctactttgactttggattcactttatagaaaattgaaaacacatgagatgaatgttctttctaggaaagttgattctaagtcaagcgctttggtttcttcttcttcttattctttggatgttgatgctttttcatctaagccttcttttcttgctgtttttaatgtcacatccgatgatcaactcgaacaaatcgaggaggaggatttggcttttgttgctaatagaattctcgagctacgaataatgccaggaacaggaaaagaggtggtccaaatcgttgctttgaatgtggttcaattgatcatcttcatttgcattgtcctaagcttgggagaggcaaaagagaagacaaagatgatgagaagaacaacaacaacaagccgaagggttcataccaagagaggaagctggagaatctcaggaaggcttttcaacaagtttgcgccgccttcgagccactaagtgatgtagatggtgaaagtggagatgatgataagggaatgaatatctccgatgtttgcttcatggcgcgtggtgaatctgacacagagtatgaagataatgagttaaaacaacctcatgatgttttggtttgctcaacatgtgatttgaataagatgaaattgaaagatgctttaggtcgtgttgagtacatggaagatgttgtgaaaaacaatgaagtgctttcttgccctaaatgtcgtaaaagcaaaggtgtcatggtagattgtgaaaattgtgctaatttggaaaaagaggtttcttatttgaaaaattctttgctaagattttctaatggtaaaaagaacctcaacatgattttggatcaatcaaagctcataaacagaaaaaggagagagagattggttctgcaaaatcaaagtggcaanaatcgggttttccctcgaggaaaccggtcagaccgcagtgggtcccgcgatcagaccggcgaccggtcagaccggctgctgagcaccggtcagaccggtggtacaaaggcggtcagaccggtttggtaa

SEQ ID NO: 18831 - DNA, 198 bp, Oryza sativa
  Clone ID: PAT_MRT4530_24351C.1
atgcaagcgaccgaggcgaagaggttgggaggcgggtgcttgggggcgcgggaaggcagctgcggcacaggggtgcgacatcgcggggagaaggggaagtggcgactacagcgccggagccacgggaggcgatgcggccgtgaggcggggtccacctgtggcgttggtcgctccgagggcgctacggagatgcaatga

SEQ ID NO: 18832 - DNA, 219 bp, Oryza sativa
  Clone ID: PAT_MRT4530_24352C.1
gcgtgattttcgaggaaaatcatgctctgagatgcgggaggcttattgggcttggtaagcgcttggctagactgctagagaaaccttgctgatttgaggaggctgtaaaaggatgcttgaagactattgtaatgatggactggcatctttgctagcttggataatatgtaaattttattgataccaatcgacactgagctactatttaggaattgaact

SEQ ID NO: 18833 - DNA, 1077 bp, Oryza sativa
  Clone ID: PAT_MRT4530_24353C.1
atggtgctgctcgggatggccgatacagagccgatggagcctgacctctacgagaagattatggaggaggcccggcgccggtttgtgagtggtttggagttcaccaccttcggagtgaaggaagaactaccccgagtgattgaggcttggcaactcaccggcggtcagaccggcggcaagcggcggtcagaccggcggcggcttcaggcgcggcaggcgacatcggcgatcgaggaggaggatttggctttggttgctaacagaattgctcgagctatgaataatgccaggaacaggaaaagaggtggtccaaatcgttactttgaatgtggttcaattgatcatcttcgttcacattgttctaagcttagaagaggcaaaagagaagacaaagatggtgagaagaccaacaataacaagccaaagggttcatcccaaggaaggaagctagacaatctcaggaaggcttttcaacaagtttgcgccgccttcgagccactaagtgatgtagatggtgaaagtggagatgatgataagggaaagaacatcaccgatgtttgcttcatggcgcgtggtgaatctgacatagagtatgaagataatgaggctttggtggcaaggaaggagaatgtgtggatcgtggattccggttgttcgcggcacatgaccggtgataaaaattggttctcctcactcaaaaaggcatccaagactgaatcgattatctttggtgatgcttctacaagtgccgttctcgctacaggtttggttaaggtaaatgagaaatttgaattgaagaatgtagctttgggtgaagacttaaagtacaatttgttttcggtttcacaaattgttgatgaaaattttgagtttcactttaagaaaactggaagtaaagtttttgattcttgtggtgattcagtgttgaatatttcttgctatggaagagtgtttaaagctgattttgaaaatctggtttcacctgtgatggttgtttcttcacatgctcctattgtttctgtgaaggcgggaaggcccgggaaaggttatacacaagggccaaggtggcccaagtaa

SEQ ID NO: 18834 - DNA, 3405 bp, Oryza sativa
  Clone ID: PAT_MRT4530_24354C.1
ttaaacgggatcaacatgctcaaagggttgtttgggatctgtgtgacttgccttgctggccttggaactcttcaaattcttctcctgcaaaaacggactctccggaaacgtcggaatcgggccacggggaatgacgacaatgacgtcagcggtgacgtcaccaccggcgacggctcgggcggcgcatgctcgccggcgaacgacggtgcgaggacgcgaacggagggcaccaaaacgatgcgggcgacgaggcgaactcaccggtgaccaaaacggcggcggaagagcaacggacggcgccggcgatgaggaagaagcggcggcggtcttcgggtcaacggtgacggcggtgctccggcggtcttcggcggcggcgaagcggtggacggggatggcgacgcaacggcgaccacgacggggcaaggaggcggcggcgaaggcccacggcaaccggcggcgagaaggaaagatttcaccggatcgagaaaggatcgaccggattggaaagcggcggcggcgaagcggctcggctagggtttcgagcggcggccggcgcgaggagaacgacgaccccgacaaagaggagcaacaaaaagaccccatctacaacaagcattgcccagacttctgcgtcatctcgaccaagcagatttttagggcctataagggagccacggatccccccgtggaaagattcaacgccttgtgcgatgagggttgtagtaaggaatttaaggaggatcctgccatcagcaagaagtgtgtagacacctgcatcgtcatgtctaaggaagccaaggaatactttgcgaaaggtggcactattggtgctcccgcgggcggtctgacgcacgcctcgccccatcccgtcaggacgagagcctccaagcactcgtccctagccggagccggcgtgttagctcctggagatggcacgttggtcccgtcagccatgttcccacgtcgcgcctgcttccggcggaagtggagcaccctagcctgctgctgccttgcgccccgcgccaccgcgcgccgtctagtcgccatcgccatcgccctgccgcgccgttcgccgtcgccatcgccctgcgcgcgccgctgccacgcctcctcgcgtcctatcccgccgcgcaccgtcgccgtcgccgcaccgtctccaacccgtcgcgtcgcccgtcgccgccgcgtcgccgtcccatcgccgcgcgccgccgcgtcgccgtcccatcgccgcgcgccgccgcccgtcccgtcgccgcgcgcgtgtcgccatcaccgcctgccaccgcacgccgagccccgcgccgccccgaagccccgcacgccacccgtcgaatcgccgctccgagccctgtgcgctgccgtcgcgtcgccattaagttgccgcccctttccctttccttctcccccttttccctataaaaaccttccccccttctccaccccaccccattccctcctcctctccctcttccccttctccacgcaccatcgtcgtcgtgccgccgcgccgccgccgcaccgtgccgcgactgcgccgccgtcgccgtcgtcgccgccaccgccgccgccggccgcactcggcctggcccgtcattgccgcgccgccttccgcctgggctccaggcccatcaacctgggcctgggccggcgtttgccgcctcccgcacggcctcgtcagcccgcgtcgggagcgagccgatccgagccgtccatctcatcggacggccgggatcgctcccgcgcgggacaaaaccggcgcgcggccgccccccgcgaaaaccctagccccattctctcctcccctctttctctcacgcccgcggcgacggtgagcgagacgacggcgaagcggcgcacgacggggtggagatggcgccgccgagccttgctcgccggggctgcgtgccgccatagctggcgcgcatccccgtcgagcgttgctcgacggtgccctaagcacccgccggtcgctcgcgcgaggaagatccgcggcggcgacggcgagacgaggcggcgacggctacctcagcgaagcggcgtcagcgagacgagcacgcaaagaggaggagccgggccagcacggcgggtcgcgaggccgctcggggaccaagtcctcgggcgcgcgctcgcctcttattgcgtcggtggcgacacggaggtcgccgccggccaccatgcccttaaacgctgcagcttcggaagatccgctcttcgtggaggttgaagccgacgtttgggaaagcgagcaaggctttggtggcaaggaaggagaacgtgtggatcgtggattccggttgttcgcggcacatgaccggtgataaaaattggttctcctccctaaagaaggcatctaatactgaatcaattatctttggtgatgcttctacaagtgccgttctcactacaggtttggtaaaggtaaatgaaaattttgaattgaagaatgtagctttggttgaggatttaaagtccaatttgctttcggtttcgcaaattgttgataaagagtttgaggttcactttaagaaaactgaaagtaaagtttttgattctcatggtgattctgtgctgaatatttctcgatatggaagagtgtttaaagcagattttgaaaatcctgtttcacctgtgataacatgtttggttgctaagtttgataaagatgtgatgttttggcatcgtagacttggacatgttggttttgatcatctcactaggctaagtggtttggatcttattcgtggtttgcttaaacttaagaaagatcgtgatttggtttgtaccccgtgtcgtcatgctaagatggtttctacttcacatgctcctattgtttctgtgatgacggatgcaccgggacagcttttacatatggacactgttggtccagctagagtgcaatctgttcgaggaaagtggtatgtgttggttattgttgacgatttttctcgatattcttgggttttctttatggcaactaaggacgaagcttttcaacactttcgtggtttgtttcttcgattggagcttgaattttctggttctttgaaaagaattcgaagtgataatggtggagagtttaaaaatgcttcatttgaacaattttgcagcgaaagaggtcttgaacatgaattttcttctcctcgtgttcctcaacaaaatggtgttgttgaaaggaaaaatcgtgttttggttgagatggctagaacgatgttggatgaatacaaaactcctacaaaattttggcatgaggcgattaacactgcatgttatatttcaaatcgagttttcttgcaatctaaacttggaaaaacttcttatgaacttcgtgtggagattatgggtaccccatacccacacggcatggttatccgactagtcataggggatagcttatatctatga

SEQ ID NO: 18835 - DNA, 4857 bp, Oryza sativa
  Clone ID: PAT_MRT4530_24355C.1
atggacaggttgcaacttacatcttgtatcagctgcaccttagagtccacacaatcattgaagaagttgatggtagctcgcaatattcttttgagtggtatttctcgttcggattatgattgtgttgctcatcttcaaactgctcatgagatttggactgctttgagtaattttcatcaaggaacaaataatattaaagaacttcgttgtgatctcttcaaaaaggagtatattaaatttgagatgaaacctggagaagctttggatgactatctttctcggtttaataaaattttgagtgatcttagatctattgattcttcttatgatgctaattatccacaatctaagatttctcgccactttttgaatggtcttgacatgtctatttgggagatgaaagttacatctattcaggaatctgttaacatgtctactttgactttggattcactttatacaaaattgaaaacacatgagatgaatgttctttctcgaaaagttgattctaagtcgattgctttggtttcctctttggatgttgatgcttcttcatctaagtcttattttcttgctgtttttaatgccacatccgatgatcaactcgaacaaatcgaggaggaggatttggctttggttgctaacagaattgctcgagctatgaataatgctaggaacaggaaaagaggtggtccaaatcgttgctttgaatgtggttcaattgatcatcttcgttcgcattgtcctaagcttgggagaggcaaaagagaagacaaagatggtgagaagatcaacaacaacaagcccaacaaaaacaagtcgaagggttcataccaagggaggaagatggagaatcttaggaaggcttttcaacaagtttgcgccgccttcgagccactaagtgatgtagatggtgaaagtggagatgatgataagggaaagaacatctccgatgtttgcttcctggcgcgtgctgaatctgacacagagtatgaagataatgaggtgagtgcttttgaggaagctattaatattttgagtgcaaaaaataagaagtgtgagaagatgtatagaaaacaagaatttatcattgaatctcttaaatctgaaattgatagattaaaatctcttattcataatgatgatgattgtgaaaattgtgagttaaaacaacctcatgatgttttggattgctcaacatgtaatttgaataagttgaaattgaaagatgctttaggtcgtattgagtacatgaaagatgttgtgaaaaacaatgaagtgctttcttgccctaaatgtcgtaaaagcaaaggtgtcatggtagattgtgaaaattgtgctaattttgaaaaagaggtctcttatttgaaaaattctttgctaagattttctgatggtaaaaagaacctcaacatgattttggatcaatcaaaggtgttggtgctagaagtgctcataaacagaaaaaggagagagagattgcttttgcaaaatcaaagtggcaaaaatcgggttttccctcgaggaaaccggtcagaccgcagtgggtcccgtggtcagaccggcgaccggtcagaccagctactgagcggcggtcagaccggtggtacagagacggctttggtggcaaggaaggagaacgtgtggattgtggattccggttgttcgcggcacatgaccggtgataaaaattggttctcctccctaaagaaggcatctaagactgaatcgattatttttggtgatgttgctacaagtgccgttctcgctacaggtatggttaaggtaaatgaaaaatttgaattgaagaatgtagctttggttgagaacttaaagtactatttgctttcagtttcacaaattgttgatgaaaattttgaggttcactttaagaaaactggaagtaaagtttttgattcttgtggtgattctgtgttgaatatttctcacaatgaaagagtgtttaaagctgattttgaaaatcctgtttcacctgtgataacatgtttggttgctaagtttgataaagatgtgatgttttggcattgtagacttggacatgttggttttgatcatctcattaggttaagtggtttggatcttgttcgtggtttgcctaaacttaagaaagatcttgatttgatttgtacaccgtgtcgtcatgctaagatggttgcttcttcacatgctcctattgtttctgtgatgacggatgcaccgggacagctattacatatggatactgttggtccagctagagtgcaatctgttggaggaaagtggtatgtgttggttattgttgacgatttttctcgatattcttgggttttctttatggcaactaaggatgaagcttttcaacacttccgtggtttgtttcttcgattggagcttgaatttcctggttctttgaaaagaattcgaagtgataatggtggtgagtttaaaaatgcttcatttgaacaattttgcaatgaaagagatcttgaacatgaattttcttctcctcgtgttccacaacaaaaaggtgttgttgaaaggaaaaatcgtgttttggttgagatggctagaacgatgttggatgaatataaaactcgtagaaaattttgggctgaggcaattaacacagcttgttatatttcaaatcgggttttcttgaggtctaaacttggaaaaacttcttatgaacttcgatttggacatcaacccaaagtttcacatttgcgtgtttttggttgcaagtgctttgtcttgaaatctggaaatttggataagtttgaggcacgttctaccgatggattgtttcttggttaccccgcacatactcgtggctatcgtgtacttattttggggactaacaaaatcgtggagacttgcgaagtttcttttgatgaggctagtccaagtactagacccgatatttcaggtacactgtcacaggttcaggggaaggatggtcgtatttttgaagatgagagcaacgacaacgacgacgacgaggtcagctcggccggtcagaccgggcgccaggccggtcagaccgccggcacacctccggtcagaccggctcatgaggagcggtcagaccggccaggttcgtcgggttccggtactgttgatgctgatcgagatggtcctccggaaattactacttcgaccagtactgatacagaacgtggatcaacttcagaagttgttgctcctttgcacattcaacgacgacatccgctggaacaaattattggtaatataggtgagcggactacaaggtctaaggtaacgactcatgatgtttgtgcaaattctgcgtttgttgcttcttttgaacccaaagatgtgtcacatgcattaactgatgaatcgtggattaacgccatgcatgaagaacttgaaaaatttgagagaaacaaagtttggactttagttgaaccaccttctggacataatattattggaaccaagtgggttttcaaaaataaacaaaatgaggattgtttgattgtgagaaataaagctagacttgttgctcaaggttttacccaggttgagggtttggattttgatgaaacttttgctcctgttgctagaattgaggcaattagacttttgttggcttttgctgcttcaaaaggttttaaattgtatcaaatggatgtgaaaagtgcttttctaaatggttttatacaggaggaagtttatgtcaaacaaccaccaggttttgaaaatcctgattttcccaaccatgtttttaaattgtctaaagctttgtatggtttgaaacaagctcctagggcatggtatgataggcttaagaactttttgcttgcgaaaggttttacaatgggaaaggttgacaaaacgctttttgttcttaagcatggtgataatcaacttttcgttcagatttatgtggatgatatcatctttggttgttcgactcacgctttggttgtagattttgctgagactatgcgcagggaatttgagatgagcatgatgggtgagttatcatactttttgggattgcaaattaagcaaacacctcaaggtacttttgtgcatcaaacgaagtatacgaaggatcttttgagacggttcaagatggagaattgcaagctaatttcaacaccaattggttttacagctgtgttggatcctgatgaagatggtgaagctgttgatcaaaaggagtatagaagtatgattggatctttgttgtatctaactgcttctaggccagacatacaatttgctgtgtgtttgtgtgcacgctttcaagcttctcctcgtgcttcacatcgtcaagcggtcaagcgaataatgaggtatttgaatcatacacttgagtttggaatttggtattctacttcatcttttatatgcttgagtggatattccgatgctgattttggaggttgtagaattgataggaagagtactagtggaacatgtcattttcttggtacatcattgattgcatggttttctaggaaacaatctagtgttgctcaatcaactgctgaatctgaatatgttgctgctgctagttgttgttcacagattctttgacttttatctactttgaaagattatggtcttacttttgagaaagtacctctcttttgtgataatactagtgctattaacattgataagaatcttgttcaacactcacgcacgaagcacattgatattcgtttttactttctaagggatcatgttgagaagggagatgttgagttccagtttttggacacaaagttgcaaattgctgatattttcactaaacctttggattctaatcactttgcttttcttcgtggtgaattgggcataattcatccttttggcatggtt

SEQ ID NO: 18836 - DNA, 191 bp, Oryza sativa
  Clone ID: PAT_MRT4530_24356C.1
attacagacgtcagatgaaagtgaggtcacctgtagttgttggatcaatttcagagattcctgcagtgctgccgtggtcgacccgattaaacatcgcggttggcgccgcgaagggtttggcgttcctccacgacgcagagaagccggtcatctaccgtgacttcaaggcctccaacatcctgctcgattcg

SEQ ID NO: 18837 - DNA, 1220 bp, Oryza sativa
  Clone ID: PAT_MRT4530_24357C.1
agacagccacacggcatcgcaactttgcgagaccgcgagccggcggcgaagcattgcgctccgcccaccgctagcgcccaccgctggtccgccgtcctcggctcctcgcgacctcgcccctaccgttcgtgctgcccaagagcccgccggcggcggcgcctgcgccgccgccgccgtcgtccggcggcatgcagagcgtgcgcatggcgtacacggcggacggcacgcccatcttcgctccggtgaactccgccccggccccggccccggcggcgacgtacccgcccgcaggaggcaatggcgcggcggctctcgacgccggcgagccggtggtcaagaagaagcgtggccggccaaggaagtacggccccgacggctccatgtcgctggcattggtgcccgtgtccaccgcggcggtggcggcctccgggcctttctcgccggcggctgccgcgaagtcgccggacgccgtgtcgtcggcgccgccgccgggggcgaagaagagggggcggccaaagggctccacgaacaagaagcacgtgccctctttcgggtcagcaggagctggattcacacctcatgttatttttgttaaagctggagaggatgtatctgcaaagatcatgtcattctcccagcatggaactcgtggagtatgcgttctgtcagcaaacggcgccatatcaaatgtgacacttcggcaagctgctacttccggtggaacagtaacatacgagggacgatttgagatactgtcgctgtccggttcattccttctatcagagaatggaggccatcgtagtcgaactggtgggctcagtgtttctctagcaggccctgatggtcgcgtcttgggtggtggagttgctggacttctgacagctgcttcaccagtgcagattgtggtgggaagcttcaacaccgaagggaaaaaggggccaaagctgcatgctccttcagacccaatgtctgcaccgctaaagatggtgccgatgagcgggacggggccaagcagcccgccatcaaggggcacattgagtgaatcatcgggcggcccggggagcccgctgaaccaaggtgtcacggccagcaaccatggccgggagatgcagagctacatccaggagcgggagcgcgaggtcgccgagcgggaggccgcctggaaggccgagctctcccgccgcgaggtcggtgatgatctgatgttgatgatccccttc

SEQ ID NO: 18838 - DNA, 470 bp, Oryza sativa
  Clone ID: PAT_MRT4530_24358C.1
gaaacccaaaggggaatttttttaaaaaaaacttccccttaaaaaaaatttccccagaatttttaataaaaaaaaaaaaaagggaccaaattaaaaaaacccaaggggatttgaaaaaaattttttggttggggggaaatttttccaaaaaaatttttgggccccccaatttaaaaaaaaaccaaattggaaaaaaaaaaagggggaaaaaacttgggggaaaaaacttttttttttttttttttttttaaacaaatttaaaaaaaattccccttttttttcttttttggaaaaaccctttgggtggttctcccccaacttttaatgggaatttttggaaaaaaagtttgggcaaaaaatttgttgggccatatttttttccaaaaccttttttggggaccaatggggggaaaccccttttagttgggcgcttgttttcaaaaaacaattttttgaaaaaatttgaggaa

SEQ ID NO: 18839 - DNA, 315 bp, Oryza sativa
  Clone ID: PAT_MRT4530_24359C.1
atggagcgagccgagcactggctgttaccagcgaccttaattgactctgggacgtcacgtcgctgccagggacagatcaatggacagctggcgagatttgtgtcatctgtggttctgttccgtgaacacggagcggtgtgggaatgggacaaaggtgaaaaatcggagggagcgcgcatcaagccggcgacgtcagattcaaggaccatgcgtgaccttgaggctctcctccaatggatcttcttctgcttgaactcggccctaaacctcatccttgtggcatgggcgtgcaagctcctggcgttctcatgctag

SEQ ID NO: 18840 - DNA, 681 bp, Oryza sativa
  Clone ID: PAT_MRT4530_2435C.1
agcatatcatccttgaacgaatgacaaatctaatccatcagtttatacacgacttaattcataataatataagaatccaatcgcaatatacagggggcacacatcttcttctcagttctcactcgattcgattcgtgggcaccgacccagaccaattctttcacggttaaaacagcgacaaggaaacgaaagaaaagggggggaaaaagaaaaagaaaaagtagaagacgaggcaaacgaactttgaataatcccggtttgagcagagcagcgggtggtggcggaggtgggttagccgcggcagcgggtgatggcggagcagccgcgggagtaggggttggcctggccgccagggcggcagttgtagtaggaggcgccgcggacggagcacggcgtggtgtcgcgccgcagcgcgccgtagctgatgtacccctgcccctgcagcacccgcctcaccaccgcggcgccgtcggccgccgcatcctcggaggagaacccgaagctgtcctcctcgccgccgccgccgccgccgccgaccccgagctcccaggcgagcggcacctcccccgccgccgccgctcccccggccaccgccaggagcagcgccagcagcagcgcggacgccgccagtagggatttcgccattggctccttcggattcggtcgcctcccacgcgtccg

SEQ ID NO: 18841 - DNA, 961 bp, Oryza sativa
  Clone ID: PAT_MRT4530_24360C.1
ttttttttttttggggtcttccaatgcatagcaaaggttttaacttcaaaccaggctaaccagcggcaagcaaatggttcagatgcggcttaactacagcataatttcctaatttcctcacctaaatatgtagagagaaagagagattctctcctaggaaactagaaaaactcttctgggagtaattactgcttactactactagtaagtatgcatacaggtgagacacaggagaatatacagaacaaatttgatagtgttgagatgatgaggtcttgggaatggccaccactcattccgggcagatgcttctgaaaatgggcagcctgcgtccattgctttgaccataaagagtttgaattatcaactcttcatcctcctcaattggctctgcctgcgcagatgctggctgagctgaaggtgttgttgcttcatcaggttttggtgttgaaagctctgccctggctgcttggatgacagtatcttcccgtgatcgaatgtcagcaggtggcttgttggggatgcctcgagctgtggcagtaggatgatcggcacttggctgccatggggagaagagagaactgatgtcgttgaagtcttgataacctggagcacctgtctgcccgcccgcctgtcgcttggagtcataccgacaacctccagcaaccaccacgtcgccggccggcggcggcgggtacaccggcgcggactgcggcgagtagacgaggaggcggtggtccaggtcggtggtggccgcggaggagaagcaggcgcggcggtagcggaggagcgagtcgtcgagcccgaggtccatcccgcccgacgacgacgcggagccggagtacggggagacgccgtccacgccggcggcgacggcgtcgaaggccggcgtgaggtaggccctcagcgacggcgacgagaagcggcgctgctgccgccgccgcgccgccgactcggccat

SEQ ID NO: 18842 - DNA, 827 bp, Oryza sativa
  Clone ID: PAT_MRT4530_24361C.1
tcggcgcaagggtgcgatccaagcagaccgagtcgacgaagcagcgaagcaaagcagcagcagcagcgagcgagcgcgcgcggccgccgccggtgaggcgaagatgtcgtggcaggcgtacgtcgacgaccacctgatgtgcgagattgacggcaaccacctcaccgccgccgccatcgtcggccacgacggcagcgtctgggcgcagtcccccaacttcccgcagtacaagcctgaggagattactggcatcatgaaggactttgatgaacccggcagtctcgcaccaactggtcttttccttgggggcacaaaatacatggtgatccaaggtgaaccaggggttgtcatccgaggaaagaagggcactggaggcatatgtgtcaagaagactggcctgtcgttgattcttggaatctatgatgagccgatgaccccaggccagtgcaacatgattgtggagaggcttggcgattatctgatcgagcagggttgctaagtcctcaatatgctattttggtcatttgggactaagtttactccctatttggttcagtaatgtgagcttgcatctgcttgcgtatcacatgatatggagtgaataatttagctccggtttgttggttggtgaacgtgttgaaaaatatttacctgtggtttatgtttggcatcgtgtcgtatcaaactcagctgtccattcactgagttctgtacatttacctggtcatggtacctgtgggttctgctttatgaagatgattgcattttattgaaaaaaaaaaaaaaaaaaaaaaaaaaaaaaaaaaaaagggtccgtaccggtaaat

SEQ ID NO: 18843 - DNA, 480 bp, Oryza sativa
  Clone ID: PAT_MRT4530_24362C.1
atggccgccatgctcgctcgcctcgccggcaagcagcagcagctgctgctgcagtacgcgctccgccgctcgccggcgccgcccggccgacgcctccccggcgtggttcgggccctacccctactttggtctgcaccattcctcggcggcagccgccgcctcaagtcgtacaacgcggcggctggggttgccgtgggcggtgacaaggccgccgccgaccaccaccaccgccacgccgtcggagctgatctcgacgtcggcgagctcgcctccgaggagcactactccgccgccgggacgtcgtcgtcgtcatcccgcgagtaccacagcgttgctcaaacggtggcggcggctgatggcgacttcgacggcggcgagaagatggcaacaaggccggcggcgagaggtggcggcgccaaagcaagtgtactactggggtggggagagccggagccaggaggtggcccacactacaattga

SEQ ID NO: 18844 - DNA, 558 bp, Oryza sativa
  Clone ID: PAT_MRT4530_24363C.1
ttacgaaactttcttcggtggtttgagctcatgatcacgcttaatctcgtggttaattttgcggaagacaaaagcgtatcttcctcctatgatcccatccagcctgagcagcctagtggttgcagtgacctgagtagcatcccaggatcctaagttcaaatctttcattggatcatggatgccgttttcggcctccctcgccatcagcgcgcacgccggcttcaccttcttcttcgtcgatcgatgaggaggacgcgccggggatcccgcggaggcagggctagggttggtggccgccgccactaccctcgtcgtgtgcctgcaactccggttgtggccccccccccatccctgtcgcacctcctccgcctccggttgccgaagcacctcgctggatccttgtgcaaggggtacagtattgtgcctaccatggatggacggcggtgatgacaatgcccggcgagccgtgtgaactcccactggagatggagtcgctgttggccccgttcgtcgccactccatcaccaccaaccgctccttccccacctccatcaacat

SEQ ID NO: 18845 - DNA, 785 bp, Oryza sativa
  unsure (1)..(785): unsure at all n locations
  Clone ID: PAT_MRT4530_24364C.1
ccacgcgtccggaagaacaagagctgggcttttctgaagttgacaaatccaaatatggagctaaaaaaatgctgactagtctatagaatgctgcctcgtcatatcatttgaaagtatcaactggcatgcatatcctaaaatattatcatttgctactaagtacatcccaattcagtctgcatctctgttctgcaaattttcaaaatcgactaccagtagatgtttactccctgtttacaagtcaatcataatactcgtgtgagcaatgtaactgcaaactagagaaagatgtacagaaaatcaaagattatcttagctttgtacagtgcctgaaaatcaaaacatgttcatatttcaccgagcctggtcttgttagccaccttagtctcaatgatcactatcactagcagtctgtttgttatgaatcacatgcgcagctaatatctgttttgctaaaaagatttttattgtaaatttatctatgtacagatgttctaatgcatcctaatacccatggaagctggggtgttacgcatgatgatagaggtgtaccacattctgaagctatcatacacgaaactccaaacagaaaggtaacacctgtcaccctgtcttgccactagagtacaaattcaatattggaacccagaattacgaanattaaaaacaaaataataaaaatgaaatggaaaaacagaatgtacacaagacagagagaagacatgccgaggcctataaatacttcacgagttcacatccncttctgcactcanaccatcccaatg

SEQ ID NO: 18846 - DNA, 607 bp, Oryza sativa
  unsure (1)..(607): unsure at all n locations
  Clone ID: PAT_MRT4530_24365C.1
agatatggtgtctgaatatgcttgtctctctcgaatgtcgtcagtagacggcttatgtattgaagtacatcagcatgtcagcataaattttcttaggtcacaaagcttcttttaagatagattataccacacctactctctagattgctctccagctgaaaatacacccagtaggtttngggttatgtgataggaagacagacaaaaatgcaattcacgtaatattgattacaaaatgtatatcctctcacaactctctgttngttcaaacaacttagaaaaaatctttctattccatctgttagtgaatgggacacatcctgaattggtcttcccgtctttcactacgctaagttcctcatggtgcaggtaatcaatcaattggtttgcaaaataacgcctgatagattgcagctacacatcactttgctgagaggaataataaacctagaatggaaaatggtagatattttttaaatgaacagaaaaaaagaaagtttcgttggcaatttttttggcaaatatatcaaaagactagaatatacagccacgaagaaatggggttcatttcttgaagaaaaaatatttcatcatagccattaaccac

SEQ ID NO: 18847 - DNA, 648 bp, Oryza sativa
  Clone ID: PAT_MRT4530_24366C.1
atgccggccagctttaggccgacaatcctgactcctcatcggagtcggagaccggccggacccgaataccgtccccccatgccatttggtatcgtgcggctccgggagccatggggaacggcgatgaacgtatggcggaggccgggacgacgtgcagcggcggctccaacgtggcgatgtgttggagacggtgtaaagagaggcggctcccccgtgcacgccgccatggttccggtagggccgaatcctgttggcgcgggagtagtggagcgtcgaaagcttggcgtcggctgcgacattgatggaggtggggaaggagcggttggtggtgatggagtggcgacgaacggggccggcagcgactccatctccagtgggagatcacacggctcgccgggcagtgtcaccaccgccgtccatccatgtcacacggcggcgagggtagtggcggcggccaccaaccctagccctgcctccgcgggatccccggcgcgtcctcctcatcgatcgacaaataagatggcgaagccggcaggcgcgctgatggcgagggaggccgagaacggcatccatgatccaatgaaagggacattgcaggggcaagcagacaggcagaagagggacaggcggatgaaagagcaagggtag

SEQ ID NO: 18848 - DNA, 2565 bp, Oryza sativa
  Clone ID: PAT_MRT4530_24367C.1
ttgatttttttttttttttgtcatttttttttttaatgtagtcgcctatgacctgaattgctcgggctcttttattttgatcgaagaataatctgggtagattctgcaaataacatccaaatcagtatgacaactttgccctacggtaaatgcatttatgtctgcaaacaggctacagcttcaccatggacaatatatgatggaagaacgcgagattgtatactgatcaagatacaaaataagctggagttactactgtcagtaggtacaaataatgtccacatcagttgccagccaacgacataattgtacaccggtcgtattattgtgagctgctgcgcacaaacaggactggaagcctgatggatggagaacgtgttggtggtaatggtatacatcaaagccacatcgtgccggactgctacatgggccacaactctttcacaatagttttctaaacagattgtctccaatgttatctttgtcaacaaattgtgttaccaggctcatcatgcatgtaacttaatattgtcaattattttttctcttcgccttcagaatccgactctgcaaatacaggtttcggctgagtttgggaatatgctggtgcaatgaactttggatctttctctgcagcatctgcatacttcaaaattgcctctcttggatcctcgtccatccatgtctccttaatcaaaccaccctccttcaagaggtactgtgtcaacaagctgccttttgtagtaccgactcttccaccaaagccaggaccattgactggagcttcaggtttatgtgatttgagcgggtctttcagtatcttctctctttggcgtttccgacttggttgatctctaaatagtggcagtgcatgtggattatgtattacaggttgcacctcaaaatcgtcaacagattttttcctaggtgctcgtccaacacatacaagtgctcctctctgactaatagaaggatcatataagatatgagtaccaccttccttcttatccccaactgttgcgaatacttgattaatccttggatgccatagacaccttatcacactataatgtggtgaaatccccacccttgatacaagctcaagtttccttctatcaaagaagcaaagtaggcctccattttcaccgtctttctcaatagaagttcctgtgaaaataagttgctcatcggggctgaaagccacatttgtctcagcatagtgatttggtaaatcttcaaaaactttcaaaggagttttcattttcctcaaatcccatatcttcagagtactatccatacttcttgacaggagtatttgtccatctgtggagaacttgacccctgtaatatcctccgtatgtgttttctcaacatgtatatctggcctgcttccccatccagtcttgacagtccagagctgaattgaaccatcgcctatcccaccaacaattcgcttgccttcatgatcccaggcacatgaggtaactggaattcgcattggtcttgcaagcttaggttttatgacctgcttttgacttttaaagtctgatacatcccacagacgaatagatccatcttctgatgacgtcagtatggtttcttttgacttgggattccattcaccaccggtaagcccagaaatgtgcccttttgtattcttcagatctcggatatacatgtcacccttaataaactcacctagtgtgagcccgtcccgatcatatatcttggcctgagctgaaccagtaacacataagaaccgatccgatgttgggctccaacttaagctgcgaacttggtgcccctcaaagggttctaactgcctgaatgattgcagctttgagttcataccttggaagtcatacatacatacagtgtagtcatagcttccagagagcactcgggatcctgtatggtcaacagcgagggctgagacaaccttggtgtgcccccgcagaacaacttcgttgctgagaggaatccgattgtaacgctcgccgtcatcctccatctcgtcgtcgctgtcatccccatcgtcgtcgtcgtcatcctcgtcctcctcgtcatcatccttcaccggtggcggccgaggcggcccaatcatgccgccatccgcgtcctccccctcaccgcgagaggacgaccgcggcggcggccgaggtggcccaatcatcaccccgccgccctcctcgtcgtcctccccctcgccgccgccagcgggctggggcgggggccgagggggcccgaccatgggcccgtcgtcgtcgtcgtcgtcgtcgtcgccgcccgcggcggcggcggcggcagcggaggaggtggagggcttggcgctagggttttggggcggcttgcggagggtggaggcgtgcgcggaggcggcggcgccggcgcgcgtgggcgccttgccgaaggacatcgggaagaaggcccgcatggcctcctcgtccatctccccgccgtccgccatcggccgctcgccgctcgccgccgccgcgccgacgtcctgtgcgctgtgcgcgagacgcgcgctctgtttttcttttctttttttcccacgcgtccggg

SEQ ID NO: 18849 - DNA, 741 bp, Oryza sativa
  Clone ID: PAT_MRT4530_24368C.1
gttggttgtggcaaatcatctttgctgaactctatcatcggagaaattcatgttaccagtggttccattacctcctatggttcaattgcatatgtaccacaggtgccttggatactgtctggttcattgcgagataatattttgcttggagaagaatttgatccaaggaggtacgaagaagtgatacatgcttgtacccttgatgttgatatctcagcaatggttgggggagatatgtcacatattggagagaaaggtcttaacttatctggtggacaaagagcccgtttagccttagcaagggctttgtatcatgactctgatgtttacttgtttgacgatgtacttagttcagttgactcacaagttgcttcgtatatcttggaaaaagccattatggggcccaaaatgaagagaaaaacacgaatattaagcacccacaatcttcaggcaatttccgcagcagatatgatagtggtcatggctaatgggcttgttaagtggtttgggacgttggactctttcttagcaactccatactcgacactgtctaagccagagagttcaagggttatctcatcaacattttctgagaaaaacaaaggagtgagcgtcgcccatgaatccgagactaatggcctgattgacaatgactcagtagttgatcacgaggaacaaagagagcagaattctgtagaggccaggaaagaaggcatggtagagcttagtgtgtacaagtga

SEQ ID NO: 18850 - DNA, 305 bp, Oryza sativa
  Clone ID: PAT_MRT4530_24369C.1
tgtgtttttttttatgtatgttgaataagaaatcctggcaacaattggtattttaaattgttaccacaacgttttacgaaacacacttttaattcttacacaagcttcaagggagccttttgcaccagaattaaggaatgggcactcctccaagcatgcaaccgattgcagcgcatttctatacccttagctaatgccaggagatcaacgtatgggcaaaccaaggctactactactaactactaagaaagtgcctaccaacacatgtagcatttccttagctcatggtgagcctatgagcaaaa

SEQ ID NO: 18851 - DNA, 201 bp, Oryza sativa
  Clone ID: PAT_MRT4530_2436C.1
atgatgactgtggaaaaatcaaactctgatagcaataagaatgagaatgtatcacatagaaaatgttgtgcgacaaaagaaaatccaaggaatgatctgaccttcatgaacactggatgcaaattgactgggacgacgaatctgaaacgtctgtcacggcgcctcctctgcttcggaaaaggacatggctacacagcctaa

SEQ ID NO: 18852 - DNA, 324 bp, Oryza sativa
  Clone ID: PAT_MRT4530_24370C.1
ggaattcgcggccgtagcgcgtacgcggcggctcgctcatgcagaagctccgtgacgtgctcgtcgagccaccacaccgacggagtagcgacccgaggcctccgtgttctccaagtatcaccaagttcgaggaggagctccgtctgcgttcgggcccagctatcgaggcgccgcgtcgcgcgcaacgcaccgcccgtcgcaaccggattcgtcgagagccggtcgttccgctctacgttcgtcggagagctcggctgcgtattctcacggcgagagctcagtccgtcgtagagtgcacagtgtctcgatagcagcagtatgaca

SEQ ID NO: 18853 - DNA, 438 bp, Oryza sativa
  Clone ID: PAT_MRT4530_24371C.1
gaactggaaactggactatattatatatatagagagagagagagaggggcaaacaagaagaaaagatgaagaagatggtggtgatggtgaggcagcggcagcaaaggcagccggtgatggtggtggtgatggtgtgctgggcgctgctggcgacggtggcgcgcggaaactgccgcgactagtgcctttcctggtgccaaggttgggccattatctgtcacctgttctggtggagctcctgcctcggctaattctgcatctccaccatgagcacaagcagaccacattccattactgatcatgatcagcactttccatgacattagttatagtaaggtccacattcggtctccgtgcttaaggttctcgactctgccatgacttgatccctattgaccccttgcttccattcatttctaaatcccattatacataccc

SEQ ID NO: 18854 - DNA, 5327 bp, Oryza sativa
  Clone ID: PAT_MRT4530_24372C.1
atgggttttgatccactggaatggtactgccagccggtcaatggcggggtgtggtcagatgtagagaatgcttttggtgcatacacaccatgtggcactgaaaccttggtggtgtgcatctcatactttgcactcttcggtgtttgcttctatcggatatggaggacgacgagggactacacggtgcagcgctacaaattgcggtcgccatactacaactatatgctcggcctgcttgtggtgttgtgcatagctgaatcactgtatcggatcgctactggcacctccataatgaacttggatggggagactagccttgctccatttgaggttacctcatctatcattgagattgctgcttggtgttgtatgcttgtaatgattgcacttgagacaagaatttacatctatgagtttagatggtacatccggtttgtggtcatttacatcttggttggggaagctgctatgttcaatcttgtgctttcagtaaggcagtattatagttcgagttcaatattttacttgtactgcagtgagataatattcaagctcttgtttggaattctcatggtggtttatctgcctagcttggattcctatccgggttatactccagtcaggcatgaggcacttgttgataatactgattacgaacctctgcctggtggggagcagatttgccctgagaggcatgctaatatattttccaggatattcttttcatggatgactcctctaatgcaacaaggatttaaaaggcccatcaccgataaggatatttggaaattagacagttgggatgagactgaaacattgtacaaccggttccaaaaatgctggaacaatgagcttcaaaaaccaaagccttggctgttacgggctctgcatagcagccttggtggaaggttttggctaggaggattttttaagattggcaatgatgcttctcagtttgttggcccactcatattgaacctcttgttggagtctatgcaaaaaggtgatccatcttggagcggttacatctatgctttctcaatcttcgctggagtgtcactgggtgttctttctgaagcacagtactttcagaatgtcatgcgaacgggtttcaggttgaggtcaacattgatcgcagctgttttccgtaagtctttgcgactaactaatgatagtcgaaagaagtttgcctctgggaggataaccaatttgatttcaactgacgcagaatctcttcagcaagtgtgccagcaacttcacagtctatggtctgctcctttccgcattgttattgccatggtccttctatacgcacaactaggccctgctgcattggtcggtgcagccatgttggttcttttgttcccaattcagactgttatcataagcaaaatgcaaaaacttaccaaggaagggttgcaaaggactgacaggagaatcagtctaatgaatgaaatattagctgcaatggatacggtcaaatgttatgcttgggagcaaagtttccagtcaaaagtgcaggacatccgtgatgatgaaatttcatggttccgcagcgctcaattgcttgctgcgctgaatagcttcatcctaaacagtatccccgttattgtcactgtggtttcatttggtgtatactctctgctgggaggtgacttgacaccagcaaaggcgttcacatcactttcactgtttgctgtcttaagatttccactttttatgctgccaaatctgataactcaggtggttaattgtaaagtgtcattgaaacgtctggaagatctcctcttggctgaagagagattacttctgcccaatccacctcttgatcctgagcttccagcaatttctattaagaatggatatttttcatgggaatcgcaggctgagagaccaacattatcaaacgtcaatctggatgtacctatgggcagtttggttgcaatagtaggaagcactggggaggggaagacttctcttatttctgcaatgcttggtgaaataccaccagtgtcaggatcgaatacatcggtggtccttcgtggaacagtggcttatgttcctcaagtttcatggatcttcaatgcaactgtccgggacaatatattgtttgggtctcccttccaacctccacgctacgagaaagcaatagatgtcacttcattacggcatgaccttgacttactcccaggtggtgacctaacagagattggagaaagaggagttaacattagtgggggacaaaaacagagagtctcaatggcaagagctgtttattctgattcagatgtctacatatttgatgatccactgagtgcattagatgcccatgttggtcgacagataggcacactttctggttgttatagagtaattgcgtcgataagatatggtacaccatttgtcacggtatttgacaaatgtattaaagaagagctacagcacaaaactagggttcttgttaccaatcagctgcattttctaccatatgtggataaaatactggtagtccatgatggtgtaattaaagaagaaggtacctttgatgaacttagcaactctggggaactctttaagaagctcatggaaaatgctggaaagatggaagaacagatggaagagaaacaggacgaaagccaaagacaggatgacataaaacaccctgaaaatgggggcagtgtaatagctgatggtgatatgcagaagagtcaggacacttctaataaaacaaaacaggggaaatctgttctgattaaacaagaagaaagggaaactggagttataagtgcaaaggtcctttcacgctacaaaaatgcattgggagggatctgggtggtatctgttctctttttttgctatgcactcactgaagttcttcgcatttcaagtagcacatggttgagcgtttggacagatcaaggttctacgaaaatccatggccctggttactacaatttaatctacggccttctttcttttgggcaggttctagtcactctaacgaattcttattggctgatcacatcaagtcttcgagcagccaagaggttgcatgatgccatgctccggtctatattaagagctcccatggtattttttcacaccaatccacttggacgaatcatcaacagattttcaaaggatttgggtgacattgacaggaatgtagccatctttgtgaatatgtttatggcacaaatatctcagttgctctcaacatttgttctcattggcattgttagcactatgtctctgtgggctatcatgccacttctgattttattttatgcagcttacctctattaccagactacgtctcgtgaggtaaagcgcctggattccattacaaggtctcctgtgtatgctcaattttcagaggcattgaatggtctgtctacaatccgtgcctacaaagcctatgatagaatggcaaacatcaatgggaaatcaatggacaacaacatcagattcactcttgtgaacatgagttcaaacagatggctagccatccgtctggaaacattgggtggcatcatgatatggttcacagcaacatttgctgtcatgcaaaaccaacgagcagaaaatcaaaaggcttttgcctccacaatgggtcttcttcttacttacaccctcaatatcaccaatttgctcacggctgttcttcgtcttgctagtctggctgaaaacagtttaaatgctgttgagcgggtaggaacatacattgagttgccttctgaggctcctcctgtcattgaggatagcaggccacctcctggttggccatcatctggtgttgtcaagtttgaagacgtcgtgcttcggtaccgaccagaacttcctcctgttcttcatggcatatctttcatcattaatggcagcgaaaaggtaggaatagttggcagaacaggagctggtaaatctagcatgctgaatgctctgttccgtattgtggaactggaacgagggagaatattggttgatgattgtgacacttctaaatttggaatttgggacctacgaaaagtactaggaataataccacaggcacctgtcctattttcaggttctgttcgatttaatctggatccttttaatgagcacaatgatgcggatctctgggaagcgcttgaaagggctcatctaaaagatgtcataaggaggaatgctctgggactagatgctgaggtctctgaggctggtgaaaattttagcgttggacagcggcagctactgagtttagctcgtgcattgctgcggagggcaaagatacttgttcttgatgaggcaacagcagctgttgatgttcgaacagatgctcttatacagaagacaatcagggaagaattcaagagttgtacaatgcttataattgctcaccgcctgaacactgttattgactgtgacaggttgcttattctaagtgctgggaaggttttggagttcgactctcctgagaatcttttgagcaatgagcacagtgctttctccaagatggttcagagtacaggacctagcaatgcagagtacctgaagactcttgtatttggggatggtgaggagaggttgcgaaaggaagaaagcaagatgcaagatatccagaggaagtgggtagcatctaaccgatgggctgttgctgcgcagtttgcgcttgccgctagccttgcctcttcacacagtgaccttcttgcactggaggctgctgagggaaacaacatcctcaggaaaacaaaggatgcagtaatcactctacagaatgtcctcgaagggaagcacaacaccgaaattgatgatacactcgctcagtatgaggttccatctgataggtggtggtcatcgctatacaaagtcatggaaggacttgccatgatgagccgattgggtcgcaaccgtctacagcaaccaagttataattttgaaaacaacagttctattgactgggaccaaatgtagatgtgcaagcatgactgatccctgaagccctgttgcagagtagatttggagctgtaggcttttccagcaggtgttaattcctggagacatgtaaattgtcaccagcacattggcgtgcatgtcgtaagtagatttaccgtcctgactccctccctaaaggtgaataacaggggagtttttctgttcttttttgcaacagcatgaccatattcttgttgtactgccgtcctcaaggacatcgtctgttgtgcaaaatcttattagcattgtacctgaaaattgaaattttgatggtcttgtgccaatgctagtgttctcttcaaaaatccagtgaatgtgtcaattaattaattaaaattatattaatttataat

SEQ ID NO: 18855 - DNA, 553 bp, Oryza sativa
  Clone ID: PAT_MRT4530_24373C.1
cggcgaaggaagacggcgaagaagtcagcgcgtcaagggctgtgcctgcaagctcggtgcaacttcgacccacctcatggcccacccgcttacaccctgcgacgtgcgacctgacaaggaggtcgcacgcggggcacacagacgcagctgcagccacacagggacaagaaggtgcgccgcactgcaaagtgcacgcacaaaggcgcgcctgcgaggaccgcttgcaagacccggcaaagaacacggtgggttgcttgcaccaacgctgccgcttgctggagctgctgctgcctgcggcgagcggcaggcaggcgatggggatgggtactgggtcgcaccggccatgctgcatgcctgtttttgctgctgtgtttgctaaaagctgtgttgcgctgttgctggagtgaccaaggccaaatgaatgggtttggattttctaaagtaatcctcatcaccctgatgtaatggtactactgcctgcttgtgtggttggattttagtagtagggatctactcaagaacatatttgggagaaaaaaaaaaaaaaaaaaaa

SEQ ID NO: 18856 - DNA, 210 bp, Oryza sativa
  unsure (1)..(210): unsure at all n locations
  Clone ID: PAT_MRT4530_24374C.1
cttttcttggcttgtgctctgttttaatttctttgcaatnatggggnggcagagctcgtcggcggcgaggagggtngtggtggtggtgtgcgcggcgatggtggtggcggcggcggcgncgcagangtacaatncggnttacaacttcggngactcaatcacggacaccngcaacctntgtaccaatggnacgccntcgcanatcacctt

SEQ ID NO: 18857 - DNA, 548 bp, Oryza sativa
  Clone ID: PAT_MRT4530_24375C.1
atgtcttttgccagccacgccggcgccggcgccggcgaccagcagcacaggtgctgctccaggacggtgcacttcgtgctggtcccgatgatggcgcaggggcacaccatccccatgaccgacatggcccgcctgctggccgagcacggcgctcagatcagcctcgtcaccactccggtcaacgccggcaggatggcggggttcgtcgccgccgtggaggaggctggcctgccagtgcagctgctggagctccccttcccggctgctgatttcggcctgccagacgggtgcgagaacattgacatgctccagtgcaaagacgacatgaggaaattcctcgaggcctgtggcgcgctccgggagccactcatggcgaggctccggcagcacgacctgccgccgagctgcatcgtatccgacatgatgcactggtggaccagtgacatcgccagggagctcggtctggaggaaatccgtgagaagatctatgatgaggagatgcgaagcgacggcaaggtcatgaacagcttcgacgagctggagacttt

SEQ ID NO: 18858 - DNA, 1306 bp, Oryza sativa
  Clone ID: PAT_MRT4530_24376C.1
aaaaaagctagtaacttttcacattatgtgcatggtggttattcacatgaaagggaaaaaaaaagactagaagtgctttctcttctttctttttttttcttttttcttaatctgatctgaaagcaaaatttagacccgatccagaatcccttggtcctcctcatttgccatggccttgtcccctttcttgtactccccatagacgtaggacgagaaggcccagaggcagagcagcatggccaccgccttctccggcccgaactcgtcgccgaacaccaccacgccgccggccacgttcaccgccaacagcgccgtcatgcagatgccgccgtgcagggacgtcgtcaggaacaccgttccggcggtgccaagaaagcacagctgccagctaagcaccgccgccccgaccaccgcgtagtaggccgccggcgacagatcccacgtggcctccacgccgtcccacggccacttgccccccgcggacgacaccatgccggccgcgccgacggccgtcgccaccgcctccataatcacctgcgcctccaccaccatccggaagcccgtcaccccgccgtgccggtacacgagctcggccgccggcaggtagagcgcgaagagcaacgccgcgccgagggtcgccgcgacgccgacgaggtagtccgggctggtggcgtccgcgccgccgccgccgccgcccgcgccgtggcggagcgcgaggagcagggacgagagcgtgaggagcacgacggcgttgaagttggcgaaggagagcggcacgcggacgagcgccgcggcgagcgccagcgtgaaagccagctgcatggagaggagtagcgccgtggtggacaccggcaggtacgaggtgccgcacgagtagagcaggttgttgagccccatcaccagcccgagcaggacgcagtacatcaccaggcgcggcgtgaacccggcgaacggccgtgacgccggccgccgcgcgcacatcagcggcagcaggagcgccgggaatcccgccgactggacgagcgtggccagccaccggtcggcgccgccgtgcgcgaagtagaaccgagagagcaggctggacgagagcgacccgacaaacaacgccgcgtagttcgccgccagcagcagcgcgccccgcgccgccctgctcttgagcacagggaactccacggccgccggcggggagcagagtaagaggcggtcgtcatggtgggcgtgggcgaggaggggagtggtgggagagtggagcttggcggctgtgtccatcaagagtggaaggtaagggagggggagagcctcgtgc

SEQ ID NO: 18859 - DNA, 5335 bp, Oryza sativa
  unsure (1)..(5335): unsure at all n locations
  Clone ID: PAT_MRT4530_24377C.1
atggacgacgacaccgccggccacgcctccggcggctacacgacgacggcggcggcgcacttcgtgctggtcccgatgatggcgcagggccacgccatccccatgaccgacatggcgcgcctgctggccgagcacggcgcggcgcgggtcagcctcgtcgtcacgccggtcaacgccgccaggatggccgggttcgccgccggcgtggaggaggccggcctgccggtgcagctggtggagctccccttcccggccgccgagttcggcctgccggacggctgcgagaacgtcgacatgctcccgtccaaagacctcttcagcaacttcctcttggcctgcggcgcgctccgggagccgttcgcggcgaggctccggcagcaacggccgccggcgagctgcatcatctccgacatgatacactcgtgggccggtgacatcgccagggagctcggcgtcccatggctcacgttcaacggctcctgcaccttctcctcctttgccagggacatcatttatcgcaaaaatctattggagaacctcacggatgatgagatcgtcaaagtctcagggttccctacgccgctagagttgccaaaagctagatgccctggaacactgtgcgttccaggtctgaagcaaataagtgacaagatttacgaggctgagacgcgaagcgatggcaggatcatgaatagcttccaggagatggaatctctgtacatcgagtcgtttgagcgaaccataggtaagaagatctggacgatcggcccaatgtgcctttgtcacagagacagcaacgccatggctgctagaggaaacaaggcgtcaatggatgatgcgaaatgtttgcaatggcttgattcaaagaagcctggttcagtgatctttgtcagctttggcagcctctccagcaccgaccctcagcagcttgttgagctggggctgggacttgaagcttccaagaaaccattcatctgggtgatcaaagcaggaaaaaagtttccagaagtcgaggaatggcttgcagatgggttcgaggagcgcgtcaaagacagaggcatgatcataaggggctgggcgccacagatgatgatcctgtggcaccaggccattggagggttcatgacgcactgcgggtggaactcgacactagagggcatctccgcgggtgtgccgatgatcacatggccacactgttcagagcagtttgtgaatgagaaattggtggtggatcacctgaaaattggggtggaggttggagtgaaaggagtgacacagtggggaactgaacaaaaagaggttaaggtgacaaggactgctgtggagacagcggtatccatgttgatggatgaaggggaagttgcacaggagattaggatgagagcaaaagattttggcatgaaggcaagaagggctttggaagagggagaggccagggagtatctttcgattttaagtacgtactgtattgatagcaactgtggcctctgtggttgcataaagaatggaagaagcttcatgcaagcagcacacgacttctcggttaatgcatacctccaaggctccaactgttcttgtcacactctcactgtccacgcttgtcttggccgcttgactagatacaaccacacagccatgtcttttgccagccacgccggcgccggcgccggcgaccagcagcacaggtgctgctccaggacggtgcacttcgtgctggtcccgatgatggcgcaggggcacaccatccccatgaccgacatggcccgcctgctggccgagcacggcgctcagatcagcctcgtcaccactccggtcaacgccggcaggatggcggggttcgtcgccgccgtggaggaggctggcctgccagtgcagctgctggagctccccttcccggctgctgatttcggcctgccagacgggtgcgagaacattgacatgctccagtgcaaagacgacatgaggaaattcctcgaggcctgtggcgcgctccgggagccactcatggcgaggctccggcagcacgacctgccgccgagctgcatcgtatccgacatgatgcactggtggaccagtgacatcgccagggagctcggtatcccctggcttacctttagtggcttctgtacctttgcctccctcgccagggacattgtttaccgtaacaatctattgcgggacctcactgatgaggaggaggtcgttaagctctcagggttccctacgccgctagagttgccaaaagctagattgcctggaagcttgtgcgttccaggtctggaggaaatccgtgagaagatctatgatgaggagatgcgaagcgacggcaaggtcatgaacagcttcgacgagctggagactttgtacatggagtcctataagcaggtgacagataaggtctggacgatcggcccaatgtgcctgtgtcacagagacagaaacacaatggctgctagaggaaacaaggcgtcattggatgaagtaaaatgtttgcaatggctcgattcaaagaagccaggttccgtgatctttgtcagttttggcacccttgtcagcaccgcgcctcagcagcttgttgagctgggactggggcttgaagcttccaacaaaccgttcatatgggtgatcaaagcaggaaataagtttccagtagtcgagaaatggcttgcagatggattcgaggaacgtgtcatagacagagggatgatcataagaggttgggcaccacagatgatgatcctgtggcaccaggccattggagggttcatgacacattgtgggtggaactcgacaatagagggcatctgcgcgggtgtgcctatgatcacatggccacactttgcagagcaattcttgaatgaaaaactggtagtggatcacctgaaaattgggatggaggttggagtgaaaggagtgacacagtggggaagtgaacaaaaagaggctcaggtgacaaggaattctgtggagacagcagtgtccacattgatgaatgagggggaggctgcacaggggatgagaatgagagcaaaagattttggcataaaggcaaggagggctttggaagagggaggttcttcatataacaacataagcctggcagtccaccagctcctataggagcaaaatgcatctggttgatacataaatatgggaataagctttttttattaaaattctagatttgaaagaatgaattggaggatactatcgtacctatatacttgtaaggatgggaggagtccatatttggccctttaactatggtcttgcccggattttcatccctaagaattgtgctccatttgcagcctggcagtccaccagctcctgtagtggaggggatttccaggatccctccgcttgactagatacaaccacagccatgtcctccgccggccacgccgtcgaccagcagcgcaaatccaccacgatgaaggcgcacttcgtgctggtcccgatgatggcgcagggacacatgatccccatgaccggcatggcccgcctgctggccgagcatggcgcgcaggtcagctttgtcaccactccggtgaacgccgccaggatggcaggattcgtcaccgctgtggaggcggctggcctggcagtgcagctggtgaagctccccttcccggccaccgagtttgggttgccggacgggtgcgaaaacctggatatgatccagtccagggatctcagccgaaacttcatggaggcctgcggagcgctccgggagccgctcacggcgaggctccgtcagctatgcccacctccaagctgcatcatatctgacatggtgcagtggtggaccggtgaaattgcaagggagctcggtatcccaaggctaacatttgatggcttctgtaccttcgcctcccttgccaggtatatcattttccgcgacaaactgttggacaatgtcgcagatgaggagatcgtcactttctcagggttccctatgctgcttgagttgccaaaggctagatgccctggaagcttgtgtgttccaggtatggaacaaattcgtgataagatgtatgaggaggagctgcaaagcgatggcaatgtaatgaacagcttccaggagctggagactctgtacatcgagtcctttgaacagataacaggtaagaaggtctggacaatcggcccaatgtgcctctgtgacagagacagcaacatgatggctgctagaggaaacaaggcatcagtggatgaggcaaagtgcttgcaatggcttgattcaaagaagcctggttcagtgatctttgtcagctttggcagcctcgccagcaccgcacctcagcagcttgttgagctgggactggggcttgaagcttccaaggagcctttcatctgggtgatcaaagcaggaaataagtttccagaagttgaggaatggcttgcagatgggttcgaggaacgcgttaaagacagaggcatgataataaggggctgggcaccacaggtgatgatcctatggcaccaggccattggagggttcatgacacactgtgggtggaactcaacaatagagggcatttgcgcgggcgtgcccatgatcacatggccacatttcgcagagcagtttttgaatgagaaatttgtggtgaatctgctgaaaattgggctggagattggagtgaaaggagtggcacaatggggaagtgaacataaagaagttagggtgacaaggaatgctgtggagacagcagtgtccacattgatgaatgatggagaagctgcacaggagatgaggatgagagcaaaagacttgggtgtaaaggcaaggagggctttggaagagggaggttcttcctatgataacataagcctattgattcaagaaatgggaaacaagcaaaatgcatctggttgatacagatgggaataagcattttttttaatcatgatgagcatgaagtggaggacctatcatacttatatcttcataaagtatggaagatgtccacatttggttattcaactatggatttggcctgaatttcatccctctaactataaaggattgtgttttacaaatgaccagtatgttgtgtggtatgattctatggtttaaaataaacctggtntaaattgcatcagttgctcagtttctcagcagagttgatacnttttagagaaggagtaaaaattaaataaaatagcgtttgtgcaacnccctaggccaaaatgctctcaaagtctaatctccaagtaatttgggtgtacgactggtacnttcttacgagcatagaggactggtgtaaatttatgaaaacaatactttgccaattatatacttctttaacttttctgaaaaaaaaaaaaaaaa

SEQ ID NO: 18860 - DNA, 318 bp, Oryza sativa
  Clone ID: PAT_MRT4530_24378C.1
atgtccgattactcggttactctatgtcatctcgagggatgtagagtagtatttaataatgtggacatggtgtctagattattaagtagcattatctgggcatatatgctacgggtcagtcgaggtgggccgctgatagtgacagctcagtacgggtattcctctatgatagtatatattcctaagaaactttcctagggagggtactcctccatatttagcccccggttggacggccatgacaggttttcgtaagaaactcggtaacccggagtggtctctcgaagcaccaggagggcattgttacggggtattggt

SEQ ID NO: 18861 - DNA, 237 bp, Oryza sativa
  Clone ID: PAT_MRT4530_24379C.1
aattcgattaagcttatcgctcattgcttcagtcaatcagctaggttgtgaaagtacctaactatctatatgaaatattagtcttatcagcatgggtgtaagatgggtatgtacccccacaaagatttccaatctattagtcaaaaacagcaacgtttttttttataaaacattggtgtacaggtgtcaccttttatgaaggatcattagcatgagctcagcaaaaaaaaaaagctt

SEQ ID NO: 18862 - DNA, 963 bp, Oryza sativa
  Clone ID: PAT_MRT4530_2437C.1
atggccatggagaggttcttgacatcgctggtcttctgcgagtgcgaggcgcctggcatggacgtcttcgcctacgccgccggcacgtcgctgacagccgccgtgaacaaggtctccaccgccagccccggcggccgtgtcgtcgggctgcgaggcgcctggcatggacgtcttcgcctacgccgccggcacgtcgctgacagccgccgtgaacaaggtctccaccgccagccccggcggccgtgtcgtcgggccggcggtctcggcggcggcgccatcatcggaggctaagaaggacgccgccggcaaggcgccgcggcggctgctgcaggcggcgtactctccggcgttcgatggcctcaacagcttcgagaccatcgtgcctcacgccgcaacccaagcacgcacaaatcaaaccaaactggtcagcaaaggcaaaagtgaagcacaactgcactagtttcttgatcatggacaagatcctggccttctccatcctgagctcgtcgccggcggagatcgccgcgccggggtactacacgcgattctcctggaggacgaccagcgccgggaagcagcagaaggcggcggcggagaaggcgacgacgaggcagcaggaaggggagaagcagcaggccgggcggagctcgccggcggcggcggcggagaggaagccggtggcgaggccgcggttcgcgccggagttcgacggcatcaattgcttcgagaccatcgttcccttctgactctatctcgatgcttcaattcttctcttagtttttttttttgtttaaagaggcgtaatttgtacagagctgtggcatacagcgatcaaatgaaactgatgaatgaccatacgtttatttgatttaataaaatcaaagtttattctcttcttcctggtaaaaaaaaaaagaaaacaaaaaaaaaaaaaaaaaaaaaaaaaaaaactcgagggggggc

SEQ ID NO: 18863 - DNA, 1053 bp, Oryza sativa
  Clone ID: PAT_MRT4530_24380C.1
gcacgaggtgccgcgcggcttctgcttgcctgtgctgtgctgtgtgtgtggccttcgctaccatccatggcggcgcgaggtctcgctgctctctcctccccggcgcgcgtcggcgcgagcgctacgccgtgctctgggaggcctgtccgtgtatcggctacgccggcagcgggcggctggcggcggcggcggcggtccatggtcgtgcgggccggcgggccgccgagcacgaacgcgctcatcctggcgttcgtcctgccgctctccctcttcgtcggcacgctcatcaccgccgcccgcgtcgccgacgacctcgacgagcgcttcctacgcgagatggagtccaacaaagcgataatggaagagaatgaggacttcgagcaagacggcggaggcgaagaagaggaggaggacgccgagcagccggcgccagtggagaaggagggagttcttgttgctgctgctccgcgcactagaaacaggccaaagagggaggtacagtagagtggaagagcagaaaaaggatctaagacggctcagctcagctgtgcagagagatcatacatgcacatcaagctagcgcgttcattctacgccaagagcccaatgcaagatcatggatctgcttatctgctagttgcgattctgagcgattccgtaggagctagcaagcttgaccagaattacaccctttttgtcgcagccgtacgcccgtacatacactggcgcaattcctattgcacccaaacctccaggcgtaaagccgtgaaggatcgttattcagagttcagacggcaggaaggcgaggggacagcgtatcgcggaggccggactgctgcatgtgcattttctccgacggacggggtgggagcgggggataacggggtcgacgatggcccatcaggcgcggcgacggcatcgaagcgggtgactacctgccagcttggcgccgcctctgcatttcctccacatggcgaggatggaggcgataggagacaaggcgggagcgagggatggcgggggcggccggtcctccgccgcgcaaaagcatag

SEQ ID NO: 18864 - DNA, 251 bp, Oryza sativa
  Clone ID: PAT_MRT4530_24381C.1
tgtgcgggggcggtgacgaccacgacggtgaggatgcatgcctgcatcgagccgcaggagggcgaggtcgggggcggaggtgcgatgatgggcgttgtgggccgcagacgccagtacgtgctccgatcgattcgtgacccaaactacaccgtatgctatcgtgaccgcatggagagcgagtgcattgacataacaaggtcgaggagatctaggttggagtgagcgctgaggaagggccagcttgcaggacg

SEQ ID NO: 18865 - DNA, 2978 bp, Oryza sativa
  Clone ID: PAT_MRT4530_24382C.1
ctgtagcagtatatattaatctgtcgcaactcgcaacacatacaaaatttacaattcatcacaagctgaaaaggagaaagaacaaaggaaaaaaaaactgaaacaaacaacaccctcatcaatttacaatctaatgatgactacttgggcttgacctcaaaatagggcatgtaatccgacgcgccatcgccggcgtacgatccccggctgatctccacgtcgctgtaggggtgcgccggcgggccgccaccgccgcggtggcggtcgaactcgttggcggacgggtcggcggagctgtccccctccccggcgccggcgtcgtcgggctcgttctgcagcatggcctcgatctccttcaccacggcgcccatggccgggcgcgccgccgccgactcgtcgacgcaccgcatcgccagctgcacgaaccgccggaacaccggggtgcgcgcggcgtcgcggatggccgggtggacgatcccgcggaggccgtagtggtgatcgtggccggccgggtcgatggcgagccgcacgtcccgccgcacgtacggacccttctcgaccggaaccctccggctaaccggctccggcatcaccaccgcgtggctgtgcacgtgactcctcggagacagttgcggtgtcctgtagtggtcgggtccaaggtagcccagtgttcccttgctttggatggacacatggccattgtcagcgtcggccacgcgcgcggagggatcaaaatccgcaaccttggccttgaggttgttctcgaggaggatgttggtggacttgatgtcgcggtggatgatcggtgggtcagcgagctcgtgcaggtaggcaagccctctggcagagcccactgcgattgggagcctcctcggcccgtcccagtatatcccacttgccttgaggttccctctgagtgtgcctttggatagatactcttagacgggcatctgttcaccttgctcgtagcagaagccaatgaggctgaccaggttgcggtggtgcaccctggacagcagctcgatctcgttcttgaactccacagcgccctgcattgagttgcggtctgcacgcttgatggcgacacgggttccgtcaccgagaatccctctgtacaccttcccgtagcctcctgacccgatctcgtggttgtcagagaagttgttggtgcagatcttgagctcgtcaaaggagaagaaccttgctcccttcagctgtggagcccctccactgtccttctggccagcagcccatgaagcaaaagggtctgctctttccttgagttccttagcccttctcttctgtcggagagcaaacaatgacatgaaaatgagggcgataacaaggaccccaccggctactgcaattccagctatggcacctgtgctcatcttggattttttgccaccaagagcaactgccaagggggcatatgggtctgcaatgaagaaataaggtccaaaatttgctggtggtttgtaaatctggttactgagagaagaaccaatccttgtcaattctgacaggttgaaggtcaccccggatgttgggaacagcttcacttgaacttggaggtagttgtcactgttgaagtggatgtctgagagagcgaccgagccagggagcaggttcagctttgccgccatggtcgactccagcagctggaacggcgtactgctcaccaagtcgacgaagaagggtgccctgaaaaccatcttgccgttgtatgagaaagcacagccgcagcttgcagggttcacgttctgaccatcactgcactgagctgagccgcatttttccatactggtactgtatgggctcgcgttctgtagctgcctgctgcagaaggctctgttgttgggatcttgctcggcgcaaaacggattacctgccaggagtagagttttcttgtagcttgcagtatcggtagaaactattcggttgtccatgagatttactgtctgcagtgagctgctgatgttgcctgtaatttcaagtgtcccgttgaattggttgttgctcagcacaacagaagcaagagatgttaaagatgtgaaccagctgggggccactgaaggatcaaatgtgttgttgctcaaatccacaacattcaagttggtcatgttgctgagatctggcactgatccagttagcttgttgtttgctaagttcagctcattcagtttgaccaaactgccaattgtagcaggtattgctcccgtaaaaccattcctatccaatcggagaacttcgagtgtactaacagtcccaacctcagctgggattgagcctgagaatttgttgctatcaaacaaaatgtgtatgagagtcatattggagttgaaaagtccagtaagcgttccagttaactggttcttgttgaaatggaagtgctgcgttttgacaagttggtccaggcctggtgatgttgatgttgagatggggacagatccagtgagttgattatcagccaggtctagccataagaggtttgtgagtacgccaatcgaagacggtattccaccactaaacttgtttgaattcaaggccaagaacccaagtttccgcaggttgcctattgctattggaatgtttccagtgaagctgcaaccagctaagatcagtgtcgtaagctccccaaggttcccaatctcagctggcagcggaccaccgagattgatgttgaaggaaagatccaggtacgtgagctggccgagctggccgatgctgctgctcagtgttccctgcaggctgacgcttgacagcctcagcgtcgtcaccctgccgttggtgcacatgatgccgtcccatccgccgccgcaggggtcgccggagttccagctcaacgggtagttcgtccattggctcttcagcccctcgagcgccgcagcgtcctgggcgttggtctggcacaacaccgccggaacgcccgccgccaccaccaccagcgcaagagccatcaacacccgcggctccat

SEQ ID NO: 18866 - DNA, 336 bp, Oryza sativa
  Clone ID: PAT_MRT4530_24383C.1
gagtggattgacataatgaattcgtgccattctctatagggccttgaattcaaacaagtttagtggtggaataccgtcttcgattggcgtactcacaaacctcttatggctagacctggctgataatcaactcactggatctgtccccatctcaacatcaacatcaccaggcctggaccaaaattgattgttttgctccaaacttcaaattgatgaacagccatttcaacaagaaccagttaactggaacgcttactggacttttcaactccaatatgactctcatacacatgtaagggatcgacaaattttcatgtctaatatgaatactgaata

SEQ ID NO: 18867 - DNA, 511 bp, Oryza sativa
  Clone ID: PAT_MRT4530_24384C.1
ctttgtatctccacctcctcctgcacgatctgcggtcaagcagagcacaagcgtgtgctagctctcccggtggcttgcctcgccggcgacggcgcggcgcaggatggagccgcgggtgttgatggctcttgcgctggtggtggtggcggcgggcgtgccggcggtgttgtgccagaccaacgcccaggacggtgagtgatcttgcctcgccgccggcgatcacctccgtttcttccatagatgattctaaagtcaggcaggatcttcttgcccggagaagaatcgcttggtttttgttgctggtgttgatgatcttcttcttgggcatgcatgcgtgcagctgcggcgctcgaggggctgaagagccaatggacgaactacccgttgagctggaactccggcgacccctgcggcggcggatgggacggcatcatgtgcaccaacggcagggtgacgacgctgtaagttacagccatctccttctcctcctaccaccaatatcatgtgatgg

SEQ ID NO: 18868 - DNA, 740 bp, Oryza sativa
  unsure (1)..(740): unsure at all n locations
  Clone ID: PAT_MRT4530_24385C.1
ccggccgggcaaaaaaaaaaaaaaaaaaaaaaaaaaaaaaaaactcactcaccatcgctttaatccagtcactctttaatctaatacaccaactcaccaagtcactcttttaacttgcttaattttcaaaacaccttcaccatgaagttcagcctcttctccgtcattgctctggcctctgccgccatggctgctcccgccgtccaggtccaggccaaggccgctggtgccgctgccgatgtccacgcccgacaggttcccgccgttcctgctgctgtccctgccgttccccaggttgtcagcaccaccgtcagcaagaccgttatcaagaagatcacctccaccaaggtcaccaacaccggaggcgttgtcaaggttctgaccgttgccgtcgacgaggtcaccgtccaggttggcaccatcaaggagaccatcaccaaggtcaagtccggcgctcttggcaaggccgctgccatcacccacatccaccagaacgtcgccatcatcaaccagctnncctcaccgttgtcgttgaccagctcaaggatgttgtcaaggtcgacatctctctccctgacgtcaagatcattgttggccttgtcatcaagcttgtcaaacgagctcgttgctgtcgccaaggacatcctgagcactctcggcctcgacacattcctcggcgctgtccttaacctcgtcttccgtcttctcggtactctgatcaacctcgttgccacctcatc

SEQ ID NO: 18869 - DNA, 2397 bp, Oryza sativa
  Clone ID: PAT_MRT4530_24386C.1
atgccgccgcctccctctaccgattgcctaccgtcgccgctgcgcaagatcgccgtccccgagcccggggccgctcaagatccggcctccccgacggccaccgcctccctccacgccgtccccgagcctggcgcctccctccacgctgtccgtgagcccgacgccgcccaagacctccgttcccgagcccggtgccgcccaagaccaccgtccccaagcccggggccgctcaagatccggcctcccaaacggccaccgcctccctccacgccgtccccgatcccgggcctccctccacgccgtccccgagcccggcaccacccaagaccgtcgtccccgagccggcgcctccctccacgccgtccccgagcccagcgctgcccaagaccgccatccccaagcccggcgccacccaagaccgccgtccccgagcccgcgtcgacctcctcaccgagcccgccaccgtccgaggagtttgctgacgataacgttaggggtctagtgcaattgtatggtaacaaggataggaagggttttggttgctttgacattgatagcaagttcgagtgggatactgatgtcgaggttgagttcccggctgctccggctttattgagcatggatgctatggttccgtcgacgaggcgaacgcagataggagatagaggtatatcaaaccatcagagaatgacccagaataagattccaaaggaagtctacaccataacagaggtggacgatgttggatatccgacggctccgacgaaagctgtcaaaaagttccctacgatatgcggagtcctagggaggcggaacttcactattttgaaggaccacatcgatctggtccctcaagaagaaaaagaagaggcctggaggcagttcaaggaaagcttccaataccctacagaggccgacgcaggactcaagcggcaggctatccgcaagatgggaaattgttggaaaaatttcaagacaacgctggtcacggagtacgtcctcaaccccgcccagccagaaccatttgggaaatacccattcatcacccaagccgtgtgggatgagttccatgccgccaaatcaacgaaagagtctcgggcaaaaagccaggccaatcgtgatctacaggcaaggaaccttcacccgcaccgacttggcaccggaggctacgcggggaaacaggcagaatgggacaaggaggatgaagctgcagcggaatctaacaccccgcaagtgcttgctgatatcccggtccagcgggcaaggaactgggcaagggccgcacctccccctcctgccaaaaggagcaagagggcaaaatcttctccaccaaagcttgacacatgcagaaaagctactagaatagggagtggaaaagtaaaggtgccattagccccaaagaagcttgatcttggcaaggcgctagtagctcctccaaagcctccagccgaattcacattgggcatgccattggtcggagacgatgccttattcaagatgggccctgaatgcaaggagttacacgagtactacatggaaaagtccaacgcaaggaggaagaatagagagacctccatgttgggccagcacgatggtcagccgttcctcgggcctactgccttcatcgccgtagacttcaaagatctatgggaccactacagggtgcgagcgatcgacaccaacctccttaagtgctactccttgttaacctggaagcatgttcattgtaaagcaccccatgttgccttacgcgatccagttgtcgtcaacgagacaacgctgaaaaatgatcgagcaaacatggtgggctatatcaaggactgcttatttgcctgtcaagacaaggacttcattatgtgtgcctacaatcagcagcaacattggattcttctggtaaaaacgccgaagtggaatttggtacactaccttaactccaatatcaagcgagaaatatacgattggtcagccatcgaatctgccttgaacgaggcatgggacaaatacgtggcaagaggcgggaggcataaggatgggcatcccaaactcggtcacaagaaagacttcccaatacgtcaacaagttggcgaccagtgcgggttccatgtctgccataacatgaggagcttcgcagacaaggtgacattgctcgaccctgagattctcaaaaaaaaaaccgccgccgcgccggccggccctccacgccccgccgccctcgcgccggctgccgcctcaccgcaccccgcgccgccgccgcgccggccgggcctccgcgcccagccgccatcgcgctggcctggcctccgcgccccgtggccctcgcatcggtcgccgcttcaccgcgcgccgcgctgccgacgcatggcagccagccgccgccgcgccggcctggcgtcttag

SEQ ID NO: 18870 - DNA, 384 bp, Oryza sativa
  Clone ID: PAT_MRT4530_24387C.1
gccgctcctcccctcccctctatcttccgttccgccatgttgatcgcaccccagagacgactacgacgaggacaaggcttgccgcgtctacatgacggggatcgcttgctgagtgtgccttcctctcttcaagcccctcgggaggtactagtcggcctgcgatttagaggagacacaaaggactcttgtgggtggtgggctatttgagcccttagcaagcctagtggtcatcgactcgctcagaagcctgataagaagcttgtccttatcaagcattgtacagatgcttgattgtttttataaacggacccgggcgttcttgagcttggacactgccttctcatgggaactttttccagagtcagcagggtgcagccattggtc

SEQ ID NO: 18871 - DNA, 2247 bp, Oryza sativa
  Clone ID: PAT_MRT4530_24388C.1
atgtggggacgcggagtgggggcgcggcgtggagcggagaaggcggcggcgcggacggtttcggcggcggttgccgtcgttgggcgggtggctggaggaaggggacgacctgacagtgacattgatagcaagttcgagtgggatattgatgtcgaggtcgagttcccggctgctccggccgtaatgaacatggatgctatggttctgtcgacgaggcaaacgcagaagaaaaagaagaggcctggaggcagttcaaggaaagcttctgataccctacagaggccgaggcagggctcaagcggcaagctatccgcaagatggagaattgttggaaaaatttcaagacaacgctggtcacggagtacgtcctcaaccccgcctagccagaaccatttgggaaatacccattcatcacctgacccgtgtgggatgagttccatgcctccaaatcaacgaaagagtctcagaaaaaaaagccaggcctaccgtgatctgcaggcaaggaaccttcacccgcaccggcttggcacaagaggctacgcggggaaacaagcagaatgggacaaggaggatgaagctgcagcagaatctaacaccccacaagtgcttgctgatatcccggtccagagggcaaggaactgggcaagggcaagggtgaaaaagaatagtgacggaactctttcgttcccaattcccgaagatcaagcggtgtaccagaaaatcgtcgaactgaatgctgagagacaggcctcccaagaggtctgctcacaaaaacgggaggatgacatcctcatgaaagcgttgggaaacgaagaacaccgtggacgaacaaggggcattggctccaatgttccatggaagtttgggtttccccaatatgcgtggcagtacaagaagcacaagctttccaaggcgcagaaagctgcacgcattaaggcccaactttgggaggagcttaaagaagagctcactgccgagctgttaggtatggaggctcggatggaggcacgcatcagggataggtcgaccgatgccactcccggtcccatagtacaagaacgcacatcgtgtaccctagtcgttagggtgacaccaggatttgcaattcctgtcgcagagggtcaagcattcaagcctaccccggagacccaagtgcatggggcgcagctgctagtcggcaatgccaaagttcaagtggacttagtgaagcccgattgtgttggctacactatcccacacccacctaatgacgagattctgacccttggggctgcacatgggacctttattcaatggcccaagcacatcattgagatcaatataactccaaggccagcgccaagttctcgtccgccgccgacgcgtccccatccaactgtttatgatactgattttggggacgacggtatgaaggtcgacagtaggccgcacctctcccctcttgccaaaagtagcaagagggcgaaatcttctccacccaagcttgacacacgcagaaaagctgctggaacggggagaggaaaagtaaaggtgccattagccccaaagaagcttgatcttggcaaggcgccagtagctcctccaaagcttccagccgaattcacattcggcatgccattggtcggagacgatgccttattcaagatgggccctgcatgcaaggagttgcacgggtactacatggagaagtccaatgcaaggaggaagaatagagagacctacatgttgggccagcatgatggtcagccgtttctcgggcctactgccttcatcgccatagacttcaaagatctatgggacctctacagggtgcgagcgatcgacaccaacctccttaagtgctactccttgcaacattggattcttttggtaataacactgaagtggagttcagtacactaccttaactccaatatcaagccagaaatatacgattggtcggccatcgaatctgccttgaacgaggcatgggaccaatacgtggcaagaggcgggaggcataaggatgggcatcccaaactcggtcacaagaaagacttcccaatacgtcaacaagttggcgaccagtgcaggttccatgtctgtcataacatgaggagcttcgcagacaaggtgacattgctcgaccttgaggaatttatttcaaggattccggaaatcaacttcgaaatcattagagaggagatagcacaattcatactagatgatatcttgtcaccgaaagggatgtttagagtgaagtcctag

SEQ ID NO: 18872 - DNA, 2370 bp, Oryza sativa
  Clone ID: PAT_MRT4530_24389C.1
atgtcgcagcaaggcgaaccgatgtcgatgaccactactgggactacatcgagccagaatcctaggacccataataagattactaaggaagtctacaccataacagaggtggacgatgttggatatccgacggctccgacgaaagctgtcaaaaagttccctacgatatgcggagtcctagggaggcggaacttcactattctgaaggaccacatcgatctggtccctcaagaagaaaaagaagaggcctggagaggccgaggcaggactgaagcggcaggctatccgcaagatggggaattgttggaaaaatttcaagacaacgctggacacggagcaaggaaccttcacccgcaccggcttggcaccggaggctacacggggaaacaggcagaatgggacaacgaggatgaagctgcagcggaatctaacaccccgcaagtgcttgctgatatcccggtccagcgggcaaggaactgggcaagggcaagggtgaagaagaatagtgacggaactctttcgtttccaaatcccgaagatcaagcggtgtaccagaaaatcgtcgaactgaatgctgagagacaggcctcccaagaggtatgctcacaaaaacgcgaggatgacatccgcacgaaagcgttgggaaatgaagaacaccgtggacaaactaagggcattggctccaatgttccatggaagtttgggtttttccaatacgcgtggcagtacaagaagcacaagctttccaaggcacagaaagctgcacgcattaaggcccaacttcgggaggagcttaaagaagagcttagagaagagctcactgccgagctgttagatatggaggctcggatggaggcacgcatcagggataggtcgaccgatgccactcccggtcccatagtacaagtgagccccacgcagaggcgtagcagctgcgcatcaactgaggctccgacagaacagcctgaaggccccgccgcggtggaccacataacggaacccacatcgtgtaccctagtcgttagggtgacaccaggatttgcaattcctgccgcagagggtcaagctttcaagcctaccccggagacccgagtgcatggggcgcagcagcaagccggcaatgccaaagttcaggtggacttagtgaagcccgattgggttggctacactatcccacacccacctaatgacgagattctgacccttggggctgcacgtgggacctttattcaatggcccaagcacaacattgagatcaatataactccaaggccagcgccaagttctcgtccgccgccgacgcatccccatcaaactgttgtatctctccctcctgccgttgaacaaagagatgaagatctccaattacagtatgatactgatttttgggacgacggtatggaggttgacagcaggccgcacctccccccttctgcgaaaaggagcaagagggcgaaatcttctccacccaagcttgacacacgcagaaaagctgctggaacggggagaggaaaaataaaggtgccattagccccaaagaagcttgatcttggcaaggcaccagtagctcctccaaagcctccagcagaattcacattgggcatgccattggtcggagacgatgccttattcaagatgggccctgcatgcaaggagttgcacaggtactacagggagaagtccaatgcaaggaggaagaatagagagacctccatgttgggccagcacgatggtcagccgttcctcgggcctactgccttcatcgccgtagacttcaaagatctatgggacctctatagggtgcgagcgatcgacaccaacctccttaagtgctactccttgttaacctggaagcatgtccatcgtaaagcaccccatattgccttactcgatccagctgtcgtcaacgtgacaacgctgaaaaatgatcgagcaaacatggtgacctatatcaaggactgcttatttgcccgtcaagacaaggacttcattatgtgcgcctacaatcaacagcgacattggattcttctggtaataacgccgaagtggagtttggtacactaccttaactccaatatcaagccagaaatatacgattggtcggccatcgaatcttccttgaacgaggcatgggaccaatacgtggcaagaggcgggaggcataaggatgggcatcccaaactcggtcacaagaaagacttcccaatatgtcaacaagttagcaaccagtgtgggttccatgtctgccataacatgaggagcttcgcagacaaggtgacattgctcgaccctaaggttttgatgcatgtcggcggtttggagagaaaaatggatgtgaatgacatatatgtgaatgggttgtggatgtga

SEQ ID NO: 18873 - DNA, 747 bp, Oryza sativa
  Clone ID: PAT_MRT4530_2438C.1
atggccatggagaggttcttgacatcgctggtcttctgcgagtgcgaggcgcctggcatggacgtcttcgcctacgccgccggcacgtcgctgacagccgccgtgaacaaggtctccaccgccagccccggcggccgtgtcgtcgggccggcggtctcggcggcggcgccatcatcggaggctaagaaggacgccgccggcaaggcgccgcggcggctgctgcaggcggcgtactctccggcgttcgatggcctcaacagcttcgagaccatcgcgcaggcgcaggagcagcatatcacgtcgcccgccaggtgcggtgcggtgcggtgcgggggtgtctgccaagtgcccaaccaaacaccaatcaccaccgccgcgagaagcctcaagtctcaacccaagcacacacaaatcaaaccacactggtcagcaaaggcaaaagtgaagcacaactgcactagtttcttgatcatggacaagatcctggccttctccatcctgagctcgtcgccggcggagatcgccgcgccggggtactacacgcgattctcctggaggacgaccagcgccgggaagcagcagaaggcggcggcggagaaggcgccgacgaggcagcaggaaggggagaagcagcaggccgggcggagctcgccggcggcggcggcggagaggaagccggtggcgaggccgcggttcgcgccggagttcgacggcatcaattgcttcgagaccatcgttcccttctga

SEQ ID NO: 18874 - DNA, 1089 bp, Oryza sativa
  Clone ID: PAT_MRT4530_24390C.1
atgctggtcacggagtacgttctcaaccccgcccagccagaaccatttgggaaatatccattcatcacccaacccatgtgggatgagttccatgccgccaaatcaacgaaagagtctcgggcaaaaagccaggcctaccgtgatctgcaggcaaggaaccttcacccgcaccggcttggcaccggaggctacgcggggaaacaggcagaatgggacaaggaggatgaagctgcagcggaatctaacaccccgcaagtgcttgctgatatcccggtccagcaggcaaggaattgggcaagggcaagggtgaagaagaatagtgacggaattctttcgttcctaaatcccgaagatcaagtggtgtaccagaaaattgtcgaactgaatgctgagagacaggcctcccaagaggtcggctcacaaaaacgcgaggatgacatcctcacgaaagcgttgggaaacgaagaacaccgtggacaaacaaggggcattggctccaatgttccatggaagtttgggtttccccaatacgcatggcagtacaagaagcacaagctttccaaggcggtgacaccaggatttgcaattcctgccgcagagggtcaagtattcaagcctacctcggagactcgagtgcatggggcgcagctgcaagccggcaatgccaaagttcaggtggacttagtgaagcccgattgggttggctacactatcccacacccacctaatgatgagattttgacccttggggctgcatgtgggacctttattcgatggcccaagcacagcattgagatcaatataactccaaggctagcgccaagttctcgtccgccgccgacgcatccccatcaaactgttgtatctctccctcctgccgttgaacaaagagatgaagatctccaattacagtatgatactaattttggggacgacggtatggaggttgacagcaagccgcacctcccccctcctgccaaaaggagcaagagggcgaaatcttctccacccaagcttgacacacgcagaaaagcctgctggaacggggagaggaaaaataaatgtgccattagccccaaagaagcttga

SEQ ID NO: 18875 - DNA, 2232 bp, Oryza sativa
  Clone ID: PAT_MRT4530_24391C.1
atggcgcgcggcagcgcggccaccggcgacgacggccggcgacggcgcggggagcggcggcgcacgcgggcagcggcgacgcacgccagggagtggtggcgcaacgcggcaaggggaggtggcaaccggctgcccagcacaaccggcagcggcgcgggcgcggagcgcggcggcgatgaaccggccagacggccaccggcggcgacagggagcggggaggagaggagggatgctcaccaagggcggcgacggcgagacgacaacagggaagccggtggcgggctcctcggggaggcaacggtggtccggcggcataccacaggcgcgaggcggcggacggtgaccgggacgaccggggcgcggagagggcgatttcagcggttcccggtggcgaggaagtggtggccgggcgaaaatcgaggcgttacaatcacccgaactatgtgggatgagttccatgccgccaaatcaacgaaagagtctcgggcaaaaagccaggcctaccgtgaactgcaggcaaggaaacttcacccgcaccggcttggcaccggaggctacgcggggaaacaggcagaatgggacaaggaggatgaagctgcagcggaatctaacaccccgcaagtgcttgctgatatcccggtctgctcacaaaaacgcgaggatgacatcctcacgaaagcgttgggaaatgaaaaacaccgtggacgaacaaggggcattggctccaatgctccatggaagtttgggtttccccaatacgcgtggcagtacaagaagcacaagctttccaaggtgcagaaagctgtacgcattaaggcccaacttcgggtggagcttaaagaagagcttagagaagagctcactgccgagctgttaggtatggaggctcggatggaggcacgcatcagggataggtcgaccaatgccactcccggtcccatagtacaagtaagccccacgcagaggagtagcaactgtgcatcaactgaggctctagcagaacagcctgaaggccccgctgcggtggaccacataacggtggacttaatgaagcccgattgggttggctacactattccacacccacctaatgacgagattctgacccttggggctgcatgtgggacctttattcaatggcccaagcacaacattgagatcaatataactccaaggctagcgccaagttctcgtccgccgccgacgcgtccccattcaactgttgtatctctccctcctgccattgaacaaagagatgaagatctccaattacagtatgatactgattttggggacgacggtatggaggtcgacagcaggccgcacctcccctctcctgccaaaaggagcaagagggcgaaatcttctccacccaagcttgacacacgcagaaaagctgctggaatggggagagcaaaagtaaaggtgccattagccccaacgaagcttgatcttggcaaggcgccagtagctcctccaaagcctccagccgaattcacattgggcataccattggtcggagacgacgccttattcaagatgggccctgcatgcaaggagttgcacgggtactacatggagaagtccaacgcaaggaggaagaatagagagacctccatgttgggccagcacgatggtcagtcgttcctcgggcctactgccttcatcgtcgtagacttcaaagatctatgggacctctacagggtacgagcgatcgacaccaacctccttaagtgctactcctcgttaacctggaagcatgtccatcgtaaagcaccccatgttgccttactcgatccagttgtcgtcaatgagacaacactgaaaaacgatcgagcaaacatgcaacattggattcttctagtaataacgccgaagtggagtttggtacactaccttaactccaatatcaagccagaaatatacgattggtcggccatcgaatctgccttgaacgaggcatgggaccaatacgtggcaagaggcgggaggcataaggatgggcatcccaaactcggtcacaagaaagacttcccaatacgtcaacaagttggcgaccagtgcgggttccatgtctgccataacataaggagcttcgcagacaaggtgacattgctcgacccagaggaatttatttcaaggattccggaaatcaactttgaaatcattagagaggagatagcacaattcatactagatgatatcttgtcaccgaaagggatgttagagtga

SEQ ID NO: 18876 - DNA, 375 bp, Oryza sativa
  Clone ID: PAT_MRT4530_24392C.1
atgatggtggtggtgcccaagtttagtgaggctctgtctctcgcggcgtgcatggcgagatggcgacgcgatggtgccacggcaatgagggcatgcgcgcctgaatctggcctagggagcggcaactttgggtcgatggtgcctggcttggcaacggggcggggtgggggccgggttggacaagaacgtccctgcccccgaccaacgaactcttcccctggccctgaccctgcaatggagagcggggcgtatctccccgcccccgaacgtgtggagccccgtagggagtcgatactccagaaaaatcaaactcacatggctcagatctgtccggcggcaatgatgtcaactgcagcagtgtcttctcagagctga

SEQ ID NO: 18877 - DNA, 1950 bp, Oryza sativa
  Clone ID: PAT_MRT4530_24393C.1
atgtcgacgaccactactgggactacttcgagccggaatcctaggacccagaataagattcctagggaagtctacaccataaaagaggtggacgatgttggatatccgacggctccgatgaaagatgtcaaaaagttccctacgatatgcggagtcttagggaggcggaacttcactattctgaaggaccacattgatctggcaaggaaccttcacccgcaccggcttggcacaagaggctacgcggggaaacaagcagaatgggacaaggaggatgaagctgcagcagaatctaacaccccacaagtgcttgctgatatcccggtccagagggcaaggaactgggcaagggcaagggtgaaaaagaatagtgacggaactctttcgttcccaattcccgaagatcaagcggtgtaccagaaaatcgtcgaactgaatgctgagagacaggcctcccaagaggtctgctcacaaaaacgggaggatgacatcctcatgaaagcgttgggaaacgaagaacaccgtggacgaacaaggggcattggctccaatgttccatggaagtttgggtttccccaatatgcgtggcagtacaagaagcacaagctttccaaggcgcagaaagctgcacgcattaaggcccaactttgggaggagcttaaagaagagctcactgccgagctgttaggtatggaggctcggatggaggcacgcatcagggataggtcgaccgatgccactcccggtcccatagtacaagaacgcacatcgtgtaccctagtcgttagggtgacaccaggatttgcaattcctgtcgcagagggtcaagcattcaagcctaccccggagacccaagtgcatggggcgcagctgctagtcggcaatgccaaagttcaagtggacttagtgaagcccgattgtgttggctacactatcccacacccacctaatgacgagattctgacccttggggctgcacatgggacctttattcaatggcccaagcacatcattgagatcaatataactccaaggccagcgccaagttctcgtccgccgccgacgcgtccccatccaactgtttatgatactgattttggggacgacggtatgaaggtcgacagtaggccgcacctctcccctcttgccaaaagtagcaagagggcgaaatcttctccacccaagcttgacacacgcagaaaagctgctggaacggggagaggaaaagtaaaggtgccattagccccaaagaagcttgatcttggcaaggcgccagtagctcctccaaagcttccagccgaattcacattcggcatgccattggtcggagacgatgccttattcaagatgggccctgcatgcaaggagttgcacgggtactacatggagaagtccaatgcaaggaggaagaatagagagacctacatgttgggccagcatgatggtcagccgtttctcgggcctactgccttcatcgccatagacttcaaagatctatgggacctctacagggtgcgagcgatcgacaccaacctccttaagtgctactccttgcaacattggattcttttggtaataacactgaagtggagttcagtacactaccttaactccaatatcaagccagaaatatacgattggtcggccatcgaatctgccttgaacgaggcatgggaccaatacgtggcaagaggcgggaggcataaggatgggcatcccaaactcggtcacaagaaagacttcccaatacgtcaacaagttggcgaccagtgcaggttccatgtctgtcataacatgaggagcttcgcagacaaggtgacattgctcgaccttgaggaatttatttcaaggattccggaaatcaacttcgaaatcattagagaggagatagcacaattcatactagatgatatcttgtcaccgaaagggatgtttagagtgaagtcctag

SEQ ID NO: 18878 - DNA, 1632 bp, Oryza sativa
  Clone ID: PAT_MRT4530_24394C.1
atggtcgccggcggcggccataggcacggcggagcggcggccgagagaggggaagggaagggggaaaagaggcggcggtccacggttcaccctaggtcgacggcgacgacgaaaaaggcggccggagcggaggaaggcggtggcgcggctcgggtcgacggggtcgacggcgttccggcggtcggcgaccgaaacagagaggtggacgaggtcggcgaggatgcggcgaagccgaaggaggcggcgccgagagtcctagggaggcggaacttcactattctgaaggaccacatctatctggtccctcaagaagaaaaagaagaggcctggaggcagttcaaggaaagcttccaataccctttagaggccgaggcaggactcaagcggcaggctatccgcaagatggggaattgttggaaaaatttcaagacaacgctggtcacggagtacgtcctcaacccagcccaaccagaaccatttgggaaatacccattcatcacccgaaccgtgtgggatgagttccatgccgccaaatcaacgaaagagtctcgggcaaaaagccaggcctaccgggatctgcaggcaaggaaccttcacccgcaccggcttggcaccggagcctacacggggaaacaggaagaatgggacaaggaggatgaagctgcagcggaatctaacaccccgcaagtgcttactgatatcccggtccagcgggcatggaactgcgcaagggcaagggtgaagaagaatagtgatggaactcttttgttcccaaatcccaaagatcaagcggtgtaccagaaaatcgaacccacatcgtgtaccctagtcgttagggtgacaccaggatttgcaattcctgctgcagagggtcaagcgttcaagcctaccccggacacccaagtgcatggagcgcagctgctagccggcaatgccaaagttcagtatgatacagattttggggtcgacggtatggaggtcgacagcaggccgcacctcccccctcctgccaaaaggagcaagagggcaaaatcttctccacccaagcttgacacacgcagaaaagctgctggaatggggagaggaaaaggaaaggtgccatttgccccaaagaagcttgatcttggcaaggcgccaatagctcaaaagcctccggccgaattcacattgggcatgccattggtcggagacgatgccttattcaagaagggccctgcatgcaatgagttgcacaggcgtcattggattcttctggtaataatgccgaagtggagtttggtacactaccttaactccaatatcaatccaaaaatatacgattggtcggccatcaaatctgccttgaacgaggcatgggaccaatacgtggcaagtggcgggaggcataaggatgggcatccgaaactcggtcacacaaaagacttcccaatacgtcaacaagttggcgaccagtgcgggttccatgtctgccataacatgaggagcttcgcagacaaggtgacattgctcgaccctgaggaaaaaatttcaacgattccggaaatcaacttcgatatcattagagaggagatagcacaattcatactagatgatctcttgtcaccgaaagggatgtttagagtgaagttctag

SEQ ID NO: 18879 - DNA, 2028 bp, Oryza sativa
  Clone ID: PAT_MRT4530_24395C.1
atgtcgcagcaaggcgaaccaatgtcgacgacgactactgggactacttcgagccataatcctaggacccagaataagatttctaaggaagtctacaccataacagaggtggacgatgttggatatccgatggctccgacgaaagctgtcaaaaagttccctacattatgcggagtcctagggaggcggaacttcactattctgaaggaccacatcgatctggtccctcaagaagaaaaagaagaggcctggaggcagttcaaggaaagcttccaataccctacagaggccgaggcaggactcaagcagcaggctatccgcaagatggggaattgttggaaaaatttcaagacaacactggtcacggagtacgtcctcaaccccgcccagccagaaccatttgggaaatacccattcatcacccgaaccatgtgggatgagttccatgccgccaaatcaacgaaagagtctcgggcaaaaagccaggcctaccgtgatctgcaggcaaggaaccttcacccgcaccggcttggcaccggaggctacgcggggaaacaggcaaaatgggacaagaaggatgaagctgcagcagaatctaacaccccgctagtgcttgctgatatcccgttccagcgggcaaggaactgggcaagggtaagggggaagaagaatagtgacggaactctttcgttctcaaatcccgaagatcaagcggtgtaccagaaaatcgtcgaactgaatgctgagagacaggtctcccaagagtacaagaaacacaagctttccaaggcgcagaaagctgcacgccttaaggcccaacttcgggtggagcttaaagaagagcttagagaagagctcactgccgagctgttaggtatggaggctcggatggaggtatgcatcagggataggtcgaccgatgccactcccggtcccatagtacaagtgagccccacgcagaggcatagcagctgcgcatcaactgaggctccagcagaacaacctgaaggcctcgccgcggtggaccacataatggaacccacatcgtgtaccctagtcgttagggtgacaccaggatttgcaattcctgccgcagagggtcaagcgttcaagcctaccccggagacccgagtgcatggggcgcagctactagccggcaatgccaaagttcagattttggggacgacggtatggaggtcgacagcaggccgcacctccccccctcctgccaaaaggagcaagagggcgaaatcttctccacccaagcttgatacaagtagaaaagctgctagaacggggagaggaaaaataaaggtgccattagccccaaagaagcttgatcttggcaaggcgccaatagctcctccaaatcatccagccgaattcacattgggcatggcattggtcggagacgatgccttattcaagatgggccctgcatgcaatgagttgcacgggtactacatggagaagtccaacgcaaggaggaagaacagagagacctccatgttgggccagcacgatggtcagccgttcctcgggtctactgccttcatcaccatagacttcaaagatcaatgggacctctacagggtgcgagcgatcgacaccaacctccttaagttaacctggaagcatgtccatcgtaaagcaccccatgttgccttactcgatccagctgtcgtcaacgagacaacactgaaaaatgatcgagcaaacatgatgggctatatcaaggactgcttatttgcccgtcaagacaaggacttcattatttgtgcctacaatcaacagcaacattggattcttctggtaataacgccgaactggagtttggtacactaccttaactccaatatcaagccagaaatatacgattggtcggccatcgaatatgccttgaacaaggcatgggaccaatatgtgacaagaggcgggaggcataaggatgggcatcccaaactcggtcacaagaaagacttcccaatacatcaacaagttggcgatcagtgcgggttccatgtgtaa

SEQ ID NO: 18880 - DNA, 1220 bp, Oryza sativa
  unsure (1)..(1220): unsure at all n locations
  Clone ID: PAT_MRT4530_24396C.1
ccggccgggaacgtaaagacaagttcccgtgctctctaatttcctcctcttctgatctcgcaaacaagaaatccccgggaaaagagaagcggcgggacaagatcgccagagattccacggacggacccaagtaggacaatggaggggagtttgagattggggtttctgttggttctatgtatcttggccttcttgcgccctgctgcagctattcgcttcgtgatcgatagggaagagtgcttctctcataatgttgattatgaaggagatacagttcatgtatcctttgttgtgatcaaggcagagacgccatggcattataccgaggatggcgtggatcttgtggttagagatcccaatggtaatcaaatccatgattcccgtgacaagatcagcgataagtttgaattcatagttcataggagaggcgttcaccgcttctgcttcaccaataaatccccataccatgaaactgtagattttgatgtacttgttagtcacttttcgtattatgaccagcatgccaaagatgaacatttcagcgccttgtttgagcaaattgcaaagttggatgaagccctctacaacattcagtttgaacagcactggttggaggcccaaacagaccggcaagcaatattgaacgaaaacatgagcaggagggctgtccacaaggctctattggagtcagcagcgctgattgcagctagcgtcattcaagtctatctattgcgccgcctctttgagcgcaagttggggacatccagggtctaaatactccaaaagtagcagctcctcctaatttacactctcgtcatcccaactaaagctgtaattccgaactgtattggttgctagatctgctgtttacatgctgtgggttgctgtcacatagacctttaattattatgattccattagatgttttccttgaaactatactatcaggaccacatactcgcatcagcttcactatgcagcttccatctacagctgcaacggtcccatgaatgttctcttcgattggaatagtttcttggtacagctgagaattgctattggtagtgacaggtatctatctggcctttcacaaaacagcacaagtgaggcgggtctatttaagcattgccagccaaacctgtgatgatctttatatctgtctctttagaggatctttatatctggntgatgttaaaaaaaaaaaaaaaaaatttgcggcc

SEQ ID NO: 18881 - DNA, 1581 bp, Oryza sativa
  Clone ID: PAT_MRT4530_24397C.1
atggggaattgttggaaaaacttcaagataatgctggtcacggagtacgtcctcaaccccgcccagctagaaccatttgggaaatacccattcatcacccgaaccatgtgggatgagttccatgccgccaaatcaacgaaagagtctcaagcaaaaagccaggcctaccgggatctacaggcaaggaaccttcacccgcaccggcttggcaccggaggctacacggggaaacaggaagaatgggacaaggaggatgaagctgcagcggaatctaacaccccgcaagtgcttgctgatatccttgtccagcgggcaaggaactgggcaagggcaagggtgaagaagaatagtgacggaactctttcgttcccaaatcccgaagatcaagcggtgtaccagaaaatcgaacccacatcgtgtaccctagtcgttagggtgacaccaggatttgcaattcctgccgcagagggtcaagcgttcaagcataccacggagacccgagtgcatgtggcgcagctgctagctggcaatgccaaagttcagtatgatatagatttagaggacgacggtatgaaggtcgacagcaggccgcacctcccccctcctgccaaaaggagcaagagggcgaaatcttctccacctaaacttgacacacgcagaaaagctgctggaacagggagaggagtaggaaaggtgccattagccccaaagaagcttgatcttgtcaaggcgctagtagctcctccaaagcctccggccgaattcacattaggcatgccattggtcggagacgatgcattattcaagatgggccctgcatgcaaggagttgcatgggtactacatggagaagtccaacacaagaacgaaaaatagagagacctccatgttgggccatcacaatagtcagccgttcctcgggccttctaccttcatcgctgtagacttcaaagatctatgggacctctatagggtgcgagcgatcgacaccaacctccttaagtgctactcctcgttaacctggaagcatgtccatcgtaaagtaccccatgttgccttactcgatccagctgtcgtcaacgagacaacgctgaaaaacgatcaagccaacatggtggactatatcaaggactgcttgtttgcttgtcaagacaaggacttcattatgtgtgcctacaatcaacagcgtcattggattgttctagtaataacgccgaagtggagtttggtatactaccttaactccaatatcaatccaaaaatatacgattggtcggccatcgaatctgccttgaacgaggcacgggaccaatacgtggcaaaaggcgagaggcataacgatgggcattccaaactcggctacaagaaagacttcccaatacgtcaacaagttggcgaccagtgcgggttccatgtctgccataacatgaggagcttcgcagataatgtgacattgctcgaccctaagggaaaaatttcaaggattttggaaatcaacttcgatatcattagagaggagatagcaaaattcatactagatgatctcttgtcaccgaaagggatgtttagagtgaagtcctag

SEQ ID NO: 18882 - DNA, 396 bp, Oryza sativa
  Clone ID: PAT_MRT4530_24398C.1
cacctagcggaatcggcagaggggagggcgccgccacaacccgtcgcccgccgcctgccgccttccctcccgccagatccggtggaggggagggtgctgccgccgcccgtcgcccgccacctcccctcttgcaccgccacctgccgcctcccctcctgctggaatcggcggacgggagggtgccgccgcaacccgttgcccaccgcctaccgcctcccctctcgccagattcagcagaggggagggggccgccgccgtccatcgaccggcacctcccacttgcgccaccgcctgtcgctacccctcccgccggattcggcggatgagagggtgccgccaccacccgttgcccggctgccagtctcccctccagccaccgccgtgcgtgagagagaa

SEQ ID NO: 18883 - DNA, 134 bp, Oryza sativa
  Clone ID: PAT_MRT4530_24399C.1
atgtcaggttccactccttgcttgtcttgtagaccataccttcacatgtatacagatgtagtgagtaaatgcatggttgttagtctttcctatttaagtggtctaacttcaaccatctgtgatttactatttct

SEQ ID NO: 18884 - DNA, 878 bp, Oryza sativa
  Clone ID: PAT_MRT4530_2439C.1
accggcagccccgcgaccccggccgcagcggtggtccggttgctggccggtcgagccaaacaaagcctggggaagaacaggccttggccaggaatgcaagggcagtacagtgacaaaacgtgaagcatgatctacacctggtacaggcgtaggtggatgtcctgcaggtgccaggtacagtacagtggtacatatctcttgtgtaccacatgggcagtgtaggtaggaaaaggggattcgaccctggccatttaacttcctggccggccaggcagggggccttcccttggccttccttccttggccggcccagggccataaggggttggggttctttccccggggccggaggatccggaacaccaaggtcccggaaccaccaaggaaggccgtgttcccttctggaaacccggaaccggaacccaaggttttgtgcccgcccgggccttggggggttcccattccaacccttggccacaaccggccccttaaccccccaaagttccccggaaccggtttctggttccaaattccggaaggaacccccaaccaaagggagggacggaacccttccaattcctaatccaaaattccaaaaccaaagcctccccaattaattttattaaatcttcttccggattcccaattcttcccattggccgtttcctttcgaagttttaatccaaattaaagaatataatgttccgttcgtccccttatgcttaatccaaccaaaattataacgtacggtatattttgagcgagataccaaacaccaggcgtgcccgaggttaatttttttgtttaattaaatgtacttttgctgcacctgcttaatcatatccatatcacattttgtgtcatatatccaaaaaaaa

SEQ ID NO: 18885 - DNA, 449 bp, Oryza sativa
  Clone ID: PAT_MRT4530_243C.1
cccttgcgtccgcaaggaactcttttgatgctgtaattataactgaagagtcatggatctgctcagcgtcctcctaattatagcatctctgctcccattttcagcatctgaccgtcaaggtgatgcactatatgatatgaagctgaagctgaatgctactggtaaccagctttctgactggaaccaaaatcaagttaacccatgcacttggaattctgttatttgtgacaacaactacaatgttgtgcaagtaacattggcatctatgggattcactggagttctatcaccacgaattggagagcttcagtttttgaatgttttgtccttgcctggtaataagattactggtggcatacctgagcagatcggcaacctatctagtttgacaagtttggatttggaagacaatttgttggttggaccaataccggcttctcttggccagc

SEQ ID NO: 18886 - DNA, 463 bp, Oryza sativa
  Clone ID: PAT_MRT4530_24400C.1
caacattcacgcgtgaggatttatgactgtatttttaacatactaactattatattgtacaattcaataccaaacaccaccaacagtggcaatgctcctgggagcactatagtagttaaggtacataccacatatggatggcaagatgaaggtcaacagagtttgagcttgagcttgactctgatcaaattagacatcactaaattgctgcaggtgtaacttttgcacaatcacttgaacaatactaatggccttgtaaaaagattgatatgctaccaacctgagcttttggcaacactgatgctgcatgacttggctgtttatcaattgaaacgtaacttgttgccaaaagggggttgccactatactatactgttgccttacaaactcactggatgagcttaacacttcttcctgcactatgagatgcgacatgaattcatattgcctataactttgacta

SEQ ID NO: 18887 - DNA, 617 bp, Oryza sativa
  Clone ID: PAT_MRT4530_24401C.1
aaaaaacccccaaaacggaacctttttgggggaaacattttttatgggtaaaaaaaacagacctttacaggcccggaaaccccaggcaattttgggggcgccccccaaaaaatttactacaaaaaaatttcaaaaaaaaaaaccccctataaaattaaaaatttatccaacaaatccccggaaataacccggccccgaccaaatttaaaagcccccccccccccgaattaataaattaataaaaacccggcccctggaaataaaggggttaaataaattttggctttcccaaataccccaccctccccattaattttttttttttcgggaaactggaaaacggtaatagtttttgaaaaacctaaacgtgggggttttgggggtttcctcctcctccgggcccggccccggaaacttggggggcgggaacgtacctgcccaaaaaccagggccggttccaaacggggttaatttcctggaggggccccccctttgtttccggaagaaaaagcccaacaaagggggtcataaccagcttccccccgggaaaaaagaaaaaaaggccaaccttgagggggcccagcagggggaggaacccctgcccgatgacaaacgta

SEQ ID NO: 18888 - DNA, 546 bp, Oryza sativa
  Clone ID: PAT_MRT4530_24402C.1
atggccaccgcgcggactgcaaagttaaagccacacgttaaccacacattgaccatttttcagtgcgaggagctggttgaggttgagcgagtactggctgtcggtggtgtagttgctggccaccgccgtcgagcagtacaacggcggctgccgagcttgaacgtggcgacgacggcgtctacctgccgccgcagccccttcctctcctgcagcacgcctgcccaccgcccgccggcgacggcgcgggctgctccgccggtcggtcgctccggcccgcgccgtcgccagctctgccccctgcttgcccggtcctccggcacgccggtgcggcaggcgcagctgccgccgccgctccgcccgtcgccttcccgctccgccgaccggcctgctcctgcgtggtcgtcgccgctgctgcatcgaagatcgctggccaccgccgccgaacctcctcttctcccggctcgccccgtcgacttcctccccaaccgccggctagcctgcctaccagatgaggagaaaactgatagaagaggaagggatagatga

SEQ ID NO: 18889 - DNA, 401 bp, Oryza sativa
  Clone ID: PAT_MRT4530_24403C.1
catcattatctactgatggccattttaatcaatcattttggggcattactctagtatagttgagtaattaacaattttttcaaaaaagtagacactttaattactcacagccactaatcacacaagtttgcgtcatctcccccatctacgggtctccggggccggacagagatcgacccagggaagaagctagccctcgccgacgccgccgacgccatcgacgtcgaggactcaatcaatcaaccaaccaaccaatcaatcaatcaagatgatggcggcggcggctggtgaaggggaggcggaggtgacacgtgaggtgattatctgcgacgcggagaaggacttccgaggggaatgcgctgtcggcgtggtccgagcagatcacggtgaggtccctggtg

SEQ ID NO: 18890 - DNA, 1176 bp, Oryza sativa
  Clone ID: PAT_MRT4530_24404C.1
atgccgaccgaaaatggcgacgatgggttctcctccctctcctgcaactgtgtcagcggcattcttacaggcggctgtgtcaggcaagtgctgctcaagacggaaccgggggagtggtcgtggtctgatcccactggcggcgccaaggatagcaaccttgtagttgccggcctgcgcgacgacccggtttccggcgcgctgccatggccgccgcctcggtctcagcttgaccgctcgctaataatacagatcgcgccgtgtgacggcgtctgcaaccgccaggccatcaacagcctccgtgccatgcgccggggcgactgctgcctgttctaccactccggcgccggcgccgcctcccgtcacatcgtcggcgtcgtggaggtcgccagggagtgggccaggttgaaccagcagccggcggcgacgcggccgttcagcgtggcggtgcgggcggggctgaaggacacgctcttccccgatgacccgttccgcggctcggcgggatgccgcccgcgcagcgcgcgtggtgggtggcgagatttgtgcttcgtgccgccgctggtgtacgcggtgatggggagctcgaggaacctcggggtggggccggtggccacgtcgtcgctgctggtggcgtccatcgtcggcggcaaggatcctgatggatttcatgtcgcggtcagcaatcaccgggttcatgggtggcacggcggtcgtgatcgtgctgcagcagctcaagggcttcctcggcatgacgcacttcaccaccaggaagtctccacgttcgtctccgcgttcgtcgtcggggccgtcgcgctcatcgccgcggcgttcgccatccctcctgcaacgtcgggcacgccattgccgagcgcgcggagcgtgacggcggccatagacggggagaggcggaggcggcccgcgaggcgggaaatcgctgggggagaagtgggacccgcggcggcggctaggacgcggaagtggaggaggagcgcgagcaccgggagggaggcgcggcgcagcgtggagagaggagaaaagcgtgcgagagagaggggaggggaaagagaggatgatgatgtggccacgctaacatgtggggcccacgtgggtctcacgttgactcagctgacacgtaggataaaaccggggtcaaaaccaccaaagaacctaaattga

SEQ ID NO: 18891 - DNA, 804 bp, Oryza sativa
  Clone ID: PAT_MRT4530_24405C.1
atgggtatcttattgggtcaaaagctatgcccgatgggtaaatgggcatggtgcggtcggcggcgcggacgagaagtcggcggtgaccgcggccgccatcgcctatcagagggagggcgtcggctggtgctgtcgctgctactgccgccgccgaagaaagcaacacccaacgctgctgtcgtcgcatccggcaactgcaagtactggctgctcaagacggagtcgggggagtggtcgtggtccgatcccaccggtggcgccaaggatggcaaccttgtagctgccggcctgcgcgacgacccggtttccggcgcgctgccatggccgccgcctcggtctcagcttgatcgctcgctagtgagagttggagcagcacagcgatggagctggccttgcagagctgaatccactaatgtgttctgcaacaatgcagaacagataatacagatcgcgccatgggacagcgtctgcaaccgccaggccatcaacagcctctatgccctgcgccggggcgaccgctgcctgttctaccactccagcgccggcgccacctcccgtcacatcgtcggcgtcatggaggtcgccagggagtggtacgagggggagggggaggcggcgagcggcggcgccgtggacgtccgcgcgataattttcagggcaactcattggctccggttttgggcacaattacaaaggtgtgatgaagatggagagtttctgaaagttgcatgtcgcaagttggagaaaatggttatgcaacttaaggccaactatggatggagattcacaaataggctggaataa

SEQ ID NO: 18892 - DNA, 320 bp, Oryza sativa
  Clone ID: PAT_MRT4530_24406C.1
cccccccctttttttttttttcttttttcttatatacactcccaaaagaaacgaacgctttctaaaaaagacagagcccaatccactcccactattctcagcctactcaacccaaatcatttccttcacccttcaaccctcatcaccatcttttaccacccccccccaacaatatacttccatttattccttcacaaaaaaaattcccaacacttccaccctcaccactaaattcactataaaaataaacatcctacaaccacaaattccctttttttccccaccaatacttccttatcttcccatccccacaccacatt

SEQ ID NO: 18893 - DNA, 3492 bp, Oryza sativa
  Clone ID: PAT_MRT4530_24407C.1
atggagaagcagaatgtggatttcggcaaggtgctcttggagattcaggagttattgggggcgctgaatcgtgcacaggtcgagactcaagcggtggtcgtccagcaggatcaaggagttagcagttggagacctcaagtggaagctgcggttcaagagctgcgctgggagcaaatcacagcaagcttccgcatcgacgctttcccctcgagttccgtcgacggacgaggaaaggaaggcaccgctgctgcccacgccaccgccaacttctcttctggcctcggcggagggtggaagcaaatcggctcaaggccaccattagcttcagagttaccggggaaagacttcagggggaaacatgaccctgggtccaaccccggtcaagggtataatcaccgtgttccaaagttggatttccctaaattcgatgggttggatccccaggactggtgtatgaagtgtgagcactatttcaatgtgaataacatgtttcctggtttgtgggtgagggtagccaccatctattttgtgggaagggctgcatcttggttaagatcttctagggctcatttgcgttttccgatgtggggggatttttgtgctgctgtgtcggagaaattttatcgtgaacaacatgaaaatttgatcagacagatggatagtattaagcagtcgggaacggtttgggagttttatgagaggtttgatgaactgatgaaccaattactagtttatgatcctggggtgagtgcaaaatatttgactcatcgatttattgaagggctgcgaagagagattcgtaatcctgtactcttacagagaccaaagaccctcgaaactgttttgtctgtttctttgttacaggaagaggtgttggagaatcctcaagtttccagtgtcaaggaagtcaagagaatggaaggcaactctagttttcgatcatcaggcaagggaccttggccattgccgcaaccaccagggaagagtggaagtttctctttgatgaatcgtcctgaagagaaaagaagcactgatactgttcgcagtccgacaaattcaacagataaagtgactgctctcaaggcttatcgccgagcccagggattatgttatatttgcgtagagaaatggtcccctactcataagtgtgctgcatcagttcaactcaatgtggttcaggagttgttcagtctctttctggagggaggagctcaggaaagtcaagaaatctcaattctatcatatgctaaagccggtgaactaatggcgatctcagtgcaggcaatacaaggttctgagccagatgggactatgcgcatgctagggtgtgatttgttatcagcaaaggagatgcagcaattgcaacagaaacaagcagtagctcatatggtccagctttgttctccctctcaagctgaggtatctgaagaaatgccaagtgccattcatttattacttcaggagtttgctactgtttttactaagccaaaggggttgcctcccacaagacaattcgatcacacaatacctctgattccaggggcacaatcggtgaacatgagaccctatcgttacacacctacccaaaaagatgagatcgaagctcaagtgactgaaatgttacagaatggcatcatacaacacagttctagtccctttgcatctccaatattgttggttaagaagaaagacggatcatggcgtttttgtgttgattatcgtcatctcaacgcaattacagttaagaataagtaccccctgccaattattgacgagttgcttgacgaattgtccggtgctaagtggtttacaaaattggatttacgtgcgggatatcatcagattcgaatgaggactgaagatgaacacaaaacagcattttgcactcataatggtcattttgagtttaggcggctgaccatgccttggcaacacaaggctcttacaaaattgttagggcttcagtacaggatcatttataaaaaaggtgttgataacaatgccgctgatgcattgtctcgctgtccaatacctgaatctgttgctttatcggctctttctgtttgtgttccagaatggacacaagaagtaattgagggttatcatcaggatcctgactctgccggtaaggttcaaacgttgtgcatcaataattctgccattcctgactttacaatcaaaaatggtctgctatacttcaagggcagaatgtggataggaaataatgtgcctgtacaacaaaagatcttagccaatttgcatacagctgctattggtggacattccggaattacagtgacttatcaccgaatcagacaactttttgcttggacaagtcttcgcgcagatgttgcaaaatttgttcaacattgcgatgtctgtcagaaagctaaggaggaacatgttaagtatccaggggcattacaaccgttgccggttctggaacagtcttggcaaattgtttccttggacttcattgagggtctgcctcgctcatccactttcaattgcattttagtggttgtggataagttttccagatatgtgcattttgtggcattggctcatcctttcacagctttggacattgctgaggcatacatgcagcatattcatcgattacacgggttgccagaggctctcatttcagatcgtgatagaatttttactagcacactttggacgacactatccaaattggctggcactcaactgcgaatgagttcttcttatcaccctcaatccgatggacaaacggaacgagtcaatcagtgtcttgaaacctttttgcgttgttttgtgcactcctgtccctctcaatggagcaaatggcttgccttggctgagtattggtacaatacttcctttcattcttctttgggaaccacaccatttgaggtattgtatgggcacaaacctcgctattttggtttgacagcttcagctgcttgtacagcaccagagttggttgattggctgcatgaaagggataagatgcaaactcttattcgagaacatctgctacgagctcaaatgagaatgaaacatcaggctgatttaaagagatcggagcactccttctctgttggcgactgggtctatatgaagcttcagccttttgtgcaacagtcggtggtcactcgcactaatcgcaagctttcttttcgtttttatgggccctttcaggtattggccaaggtggggactatggcttaccgtcttgcattgctagattccagtttaattcatccggtggttcacgtctcccaactcaagaaggctttggctccagtggaacgggtgttgcatcacaggcttgttcgcaaaggagctaagatggtggaacaagttcagattaggttgaaatctcccaagattaaccatggaggccttatctacctcttgcaacttagtctcttgcaggcaaaccaaagtggctttgtactgttggagaagattcctgacggcttctcttttggctggcgcatttag

SEQ ID NO: 18894 - DNA, 213 bp, Oryza sativa
  unsure (1)..(213): unsure at all n locations
  Clone ID: PAT_MRT4530_24408C.1
gtttcttgggcgagccgctggcgggagggaggaggtggcgcactccgtggaggaggtacccgcacancggcttcttcccggcaagatcaantttgggcaaaaggccggngtnacacacaattatgattcgattgacatccacaatcacctngaaacgtncagaagctgttaggatcaantgncttgggngtnncaactctttgncatgnacaa

SEQ ID NO: 18895 - DNA, 4860 bp, Oryza sativa
  Clone ID: PAT_MRT4530_24409C.1
atggagaagcagaacgtggatttcggcaaggtgctcttggagatccaggagtcgttggtggcgctgaatcatgcacaagccgagactcaagcggcggtcgtcaagttggaacaaggagccagcagttggaaacctcaagtggaagccgcggttcaagagctgcgtggggaggtcgaagagatcaagcagcaattggatctcattggcaaatcacagcaagcttccgcatcggcgtcttccccttgggttccgtcgacagacggggaaaggaaggcgccactgctgcccacgccaccgccaaattctcttatggcctcggtggagggcggaagcaaatcggctcaaagccatcatcagcttcagaatcaccggggaaagacttcaggaggaaacatgaccctaggtccaaccccggtcaagggtacgtatgactcacactccttccagtttccaaaatttgagagttcgggggttgaaggtggagaaattgacttcgaatttggggagagacaatataatcaccgtgttccaaagttggatttccctaaattcgatgggttagatccccaggactggcgcatgaagtgtgagcattatttcgatgtgaataacacgtttcctggtttgtgggtgagggtagcaaccatctactttgtgggaagggctgcatcttggttaagatcttctagagctcatttgcgttttcctatatggggggatttttgtgctgctgtgtcggaaaaatttgatcgcgaccagcatgaaaatttgattaggcaaatggatagtattaagcagtcgggaacggtttgggagttttatgagagatttgctgagctaatgaatcaactattagtttatgaccctggggtgagtgcaaaatatttgactcatcgattcattgaagggctgcgaagagagattcgtaatcctgtacttttacagagaccaaagaccctcgaaactgctctgtctgttgctttgttacgggaagaggtgttggagaatcctcaagtttccagtgttaaggaagtcaagagaatggaaggcaactctggttttcgatcggcaggcaagggaccgtggccgttgccgcaaccaccagggaagagtggaagtttctctttgatgaatcgtcctaaagagaagagaagcactgatactgttcgcagtccaacaaattcgacagataaagtgactactctcaaggcttatcgccgagcccagggattgtgttatatttgtgcagagaaatggtcccctactcataagtgttcagcctcagttcaactcaatgtggttcaggagctgttcagtctctttatggaggagggagctcaggaaagtcgggaaacctcaattatatcagatgctgaaacgggtgaactaatggcaatttcagtgcaggcagtacaaggttctgagccagatggaactatgcgcattttaggacaagttcaaggaaaacaagtgttaattctagtggattcaggcagctcagtgagttttatcagttcacagatagcagctggtctaaaagggatacaatctcttcctcgacaattgtcagtcagagttgctaatggtggtacactctgttgtgatgctatgattcctcagtgtgaatggcaagtgcagggtcacagatttagaaccactttgagaattttgcctcttaacagctatgacatgattttgggaatggatttgctgaaggagcacagtccaatgttagttaattggtctcagaaaactatcagaattaatttgctgggagcaatggtgactctaacaggggttcagtctgaactgtctaggtgtgaattgttatcagctaaggagatgcagcaattgcaacagaaacaggcagtagcccatatggttcagctttgttctctctctcaagatgaggaatctgaagaaataccaaatgaaattcagttattacttcaggagtatgcaactgtttttgctgaaccaaaggggttgcctcccacaagacaattcgatcacacaattcctctaataccgggggcacaaccggtgaatgtcagaccctatcgttatacacccgcccaaaaagatgagatcgaagctcaagtgactgaaatgttacagaatggcatcatacaacacagttctagtccttttgcatctcctgtactgttggttaagaagaaagatggatcatggcgattctgtgttgattatcgccatctcaacgcgattacagttaagaataagtatcccttgccaattattgacgagttacttgacgaattgtcaggtgctcagtggtttacaaagttggatttgcgagcgggatatcatcagattcgaatgaagactgaagatgaacacaaaacagcatttcgcactcataatggtcattttgagtttagggtacttccatttggcttgactagtgcaccagccacttttcaagggatcatgaacaatattctatcctcattacttcgacgctgtgtgcttgtgttcgttgacgacatcttaatctacagtcgcactcttgctgaccatatcaaccatttaagggctgttttccaaattttggttaaacatggtctgaaagttaaacagagcaaatgctcttttgctcaacagaaactgtcttatttgggtcacagaatcagtccaaatggggttgctactgaagaagataaaataaaggctgttaaagattggcccactcctaagtcactaaaggacttgagaagcttccttgggttagcaggttattaccgaaagtttgtgcaaaattttggtattttcagtaaaccattgacaaatctgttgcgcaagggtcagcctttcatttggaatactgtgacagatgcagcttttcaaaccctcaagcaagcactgatgtcagctcctgttcttgcaatgccggatttctccttaccatttgtggttgaaaccgatgcatcagataaagggattggcgctgtgttgatgcagaatgatcaccctatagccttcctcagtaaagctttgggacctcggcattggggtctttctacctatgacaaggagagtttggctatcatgatggcagtggatcactggagatcatatttacaacatgatgaattctttatcaggacagatcatcgcagtctctcatttttggctgaacaacggctgaccacgccttggcagcataaggctcttacaaaattgttgggacttcagtacaagatcatttataaaaagggtgctgataacaatgctgctgatgctttgtctcgctgtcctgtacctgaatctgttgctctatcagctctttctgtttgtgttcccgaatggacacaagaagtaattgaaggttatcatcaggatcctgattctgccagtaaagttcaaacgctgtgcatcaatagttctgccattcctgacttcacacttaaaaatggtctgctatacttcaagggcagaatgtggataggacataatgtgcctgtgcaacaaaagattttagccaatttgcatacagctgctattggtggacattccggaattacagtgacttatcaccgaatcagacaactttttgcttggacaggtcttcgtgcagatgttgcaaaatttgttcaacagtgtgatatctgtcagaaggctaaggtggaacatgtcaagtatccaggtgcattacaaccgttgccggttccggaacagtcttggcaaattgtttctttggacttcattgagggtctgcctcgctcatccactttcaattgcattttagtggtggtggataagttttccaaatatgcgcattttgtggcattggctcatcctttcacagccttggacattgctgaggcatacatgcagcacattcatcgcttacatggattaccagaggctcttatttcagatcgtgatagaatttttactagcactctttggacgacactattcaaattggctggcactcaattgcgaatgagttcttcttatcaccctcaatccgatgggcaaacagagcgagttaatcagtgtcttgaaacctttttacgttgttttgtgcactcctgtccctctcaatggagcaaatggcttgccttggctgagtattggtataatacttcatttcattcttctttgggagccacaccatttgaggtattgtatgggcacaaacctcgttattttggtctgacagctgcagctgcttgtacagcaccagagttggttgattggctgcatgaaagggataagatgcaaactctcattcgagaacatgtgctgcgagctcaaatgagaatgaaacatcaggctgatttaaagagatcggagcgctccttctctgttggcgattgggtctatatgaagcttcaaccgtttgtgcaacagtcggtcatcactcgcactaatcgcaaactttcttttcgtttttatgggccctttcaggttttggccaaggtgggaactgtggcttaccgtctggcactgccagattccagtttaattcatccggtggttcacgtctcccaactcaagaaggctttggctcccgtagaacgggtacagtctcatttacccgttttgcctgctgatgaagctgcagacatttcgccttgtcaggtgttgaatcacaggcttgttcgcaaaggagctaaactggtgaaacaagttcaggtctgttggtcccgccaagatcccgccgccgtcacctgggagaatcttcaggaactacgtcaacgctttccacaggccgaagcttggggacaagcttcatttcaagggggggagaatgtcatgacgactacttcatctgatccacccaaaggcacggatgatcaaggcgacgaaccaatctcacacaatgggtag

SEQ ID NO: 18896 - DNA, 459 bp, Oryza sativa
  Clone ID: PAT_MRT4530_2440C.1
attcgcgccgcccccggtcagcccgcgtcgccggtccccatcatcggcggcgcccgacgagtttaacccttgcgcggctctgctggagtgcgagtacaagaacgacgccgcagccgagaacacgctgctctactcggcggcgtcggtgggggacatggcgttcgtgcaggagttcatggacagggaccccttgctggtgtttggcgagggcgagtacggcgtgacggacatgttctacgccgccgcgaggggcgggaacgccgaggtgttcgggctgctgctggaccacgccatgtcgccgacgtgctcgacgaattgtcccaacggggaaggcgcagcagcggtggtggctggctcctggtgttctggctggaaatgatgggcaaaggagtccacgccgccgcgaggggcggcagcgtggagatgctgagggagctcatcgagcgtcgcttcgacgtg

SEQ ID NO: 18897 - DNA, 318 bp, Oryza sativa
  Clone ID: PAT_MRT4530_24410C.1
atgggagagacggatgaggaggaggaggtggactctccgtcgtcggtgaggactggaggaggcggcctctccgtcagcggcggcaatggggacgagggggaggagctcgagatccccttgaggaaggtactggagacggcgggtagctctcggttggggacgacgctggcggaggagcttgagcccatcttgatgccacgggacatcgtcgtcgcaccaccgggaaggggtgggaggcaaagtggagaggaggagtcggcggcagtcgcaactctgatgaagaggcgtggagggaggagcggaggcgtccgtcgatga

SEQ ID NO: 18898 - DNA, 1989 bp, Oryza sativa
  Clone ID: PAT_MRT4530_24411C.1
atggagaagcagaatgtggatttcggcaaggtgctcttggagattcaggagttattgggggcgctgaatcgtgcacaggtcgagactcaagcggtggtcgtccagcaggatcaaggagttagcagttggagacctcaagtggaagctgcggttcaagagctgcgctgggagcaaatcacagcaagcttccgcatcgacgctttcccctcgagttccgtcgacggacgaggaaaggaaggcaccgctgctgcccacgccaccgccaacttctcttctggcctcggcggagggtggaagcaaatcggctcaaggccaccattagcttcagagttaccggggaaagacttcagggggaaacatgaccctgggtccaaccccggtcaagggtataatcaccgtgttccaaagttggatttccctaaattcgatgggttggatccccaggactggtgtatgaagtgtgagcactatttcaatgtgaataacatgtttcctggtttgtgggtgagggtagccaccatctattttgtgggaagggctgcatcttggttaagatcttctagggctcatttgcgttttccgatgtggggggatttttgtgctgctgtgtcggagaaattttatcgtgaacaacatgaaaatttgatcagacagatggatagtattaagcagtcgggaacggtttgggagttttatgagaggtttgatgaactgatgaaccaattactagtttatgatcctggggtgagtgcaaaatatttgactcatcgatttattgaagggctgcgaagagagattcgtaatcctgtactcttacagagaccaaagaccctcgaaactgttttgtctgtttctttgttacaggaagaggtgttggagaatcctcaagtttccagtgtcaaggaagtcaagagaatggaaggcaactctagttttcgatcatcaggcaagggaccttggccattgccgcaaccaccagggaagagtggaagtttctctttgatgaatcgtcctgaagagaaaagaagcactgatactgttcgcagtccgacaaattcaacagataaagtgactgctctcaaggcttatcgccgagcccagggattatgttatatttgcgtagagaaatggtcccctactcataagtgtgctgcatcagttcaactcaatgtggttcaggagttgttcagtctctttctggagggaggagctcaggaaagtcaagaaatctcaattctatcatatgctaaagccggtgaactaatggcgatctcagtgcaggcaatacaaggttgtgagccagatgggactatgcgcatgctagggtgtgatttgttatcagcaaaggagatgcagcaattgcaacagaaacaagcagtagctcatatggtccagctttgttctccctctcaagctgaggtatctgaagaaatgccaagtgccattcatttattacttcaggagtttgctactgtttttactaagccaaaggggttgcctcccacaagacaattcgatcacacaatacctctgattccaggggcacaatcggtgaacatgagaccctatcgttacacacctacccaaaaagatgagatcgaagctcaagtgactgaaatgttacagaatggcatcatacaacacagttctagtccctttgcatctccaatattgttggttaagaagaaagacggatcatggcgtttttgtgttgattatcgtcatctcaacgcaattacagttaagaataagtaccccctgccaattattgacgagttgcttgacgaattgtccggtgctaagtggtttacaaaattggatttacgtgcgggatatcatcagattcgaatgaggactgaagatgaacacaaaacagcattttgcactcataatggtcattttgagtttagggtacttccatttgatttgactagcgcaccagccacttttcaaggggtcatgaacagtattatgtcctcattactttaa

SEQ ID NO: 18899 - DNA, 369 bp, Oryza sativa
  Clone ID: PAT_MRT4530_24412C.1
atggcggcgtggcgcggcggcggcggcggcggcggcatgggcgtcgatggcggtcctgtcttcttcctccgttcgcacgagacagaggggagcgcgagggcggctccggatggtctcgccggcggcgaccggcggcgggactggctagggcagaggcaggggcgactagagggggtcctcgcgctcaccctagatgcggcggcgcggcccggggaggatggaggagcaccttgggactatgaggaagcttaccccgtgctctatttgggcggaggcggtccgaggtggcgtggccacgagctccctaggcggtcggcgacggcaatggtggcggcagatctccggcgaagaggtcctaaattaacttga

SEQ ID NO: 18900 - DNA, 887 bp, Oryza sativa
  unsure (1)..(887): unsure at all n locations
  Clone ID: PAT_MRT4530_24413C.1
tgttgttgttcgtctatattgtgtgttgtggcgattgttgggttatgtgccttcattgggtgccgatcgccctggtcccgccccgcgtcttctcgtgatgtgtttttcacagatcttcatntatttgaaaattattgtttttttttttttttttttatagaaaaaccccaagtatattaggcatgcgatcaatgcaacaagcactattaaccggccaaccacacacacatgacaacactctcacagacaaacatacacattccacacaagcataagacaagaacatacagttgtcatacagctaggctatccctgtagcagttctagccattttatgctattaattttctatatcaaacgcaagctaggagtaggaggcacacatattacgtacgttatgtcctttgttgcagtgcctgcaaatcttggcagtaaaacagtagcaaacttattagcagttagccggcatggtgaggccacacttggctggcagctgcatggcgcggttggggtcgatgttgtagatgctgagccacggcgagttcttgtaggagcagaggcagttaaggtcggcgtgcgacagcgccgagcagcagcccgccgacgggttcgtcgtcgggttcgacgtcgccgccgccgccggctggcacttcatgaactcgtcgttgctcatgttgcacacggcgcgggccggcgccggcgccacggccagcagcgccgccgcgacggccaccacgaggacagccagcgccaccgccttcgccattgccgtcggctgctggagaggtgaggagctggatcgagctagctagtgactataggtgattggtacctggtggagctagctagctggtggctatctctagtgaggtgggcggacgggtggg

SEQ ID NO: 18901 - DNA, 391 bp, Oryza sativa
  Clone ID: PAT_MRT4530_24414C.1
cggacgcgtgggctgaaagtggggcagatatctgtggcggaggggactggatttgtggcagaagctgtgggagttcagactacgacctacagaacgtctaactacaaaccatcgatgaacgcggatgcacaagagagcttaaggcagaggctaccttcagctcagctcctgaccctggcgaatgaagaggtcgctggtatggctttggctggaccagatagtgtggccgacatctcagaggaagaatgtacaacgacattgacgggtgctggagagatggcaccggcaagttgagcatctctctcggaggcttcgacaggagcatcaacactagaaggctgctgtactgaggcatgggctgctcctgttgtcatggacgaggcattccatg

SEQ ID NO: 18902 - DNA, 226 bp, Oryza sativa
  unsure (1)..(226): unsure at all n locations
  Clone ID: PAT_MRT4530_24415C.1
caccgccccctgtgcccanccggttcttcgagaccggtcgttccccgcttcccgcgtcgtccgcgtaggtagctcggctgcgtatgtcctcaccggcgagnagctcanagtcccccggcgtaggtagtgcaaacaaggtgttcctcggcatcatccagggcanagtctcttcgaccccatgctcgactgcctccaaggagtggntatcggcgatgccccttcccga

SEQ ID NO: 18903 - DNA, 442 bp, Oryza sativa
  Clone ID: PAT_MRT4530_24416C.1
ggttgatgacctcccggaggctgtcaaggtgatgaattcttgtcaccaaatagcctttcatagttgcagttgtagaaataaaaatcacataggttaggaaaagtttctatttgaatgattctgtggattcaactgtgatcaaatgaggtttgggtgtgcgctggccaaattggttcagcattctaccttgatgatactcacaagaactcaccagactagacagtattttctttctaactattcttttcgagaccagatgaggaaaatcacactttcagcctgtttaaaattttaatttacgtatttcactggttttgacacaatattaccttatttggacccagaaatggtagcttattttttattcttttttgcaaaattatcttcaaggtttatgaagttattacaaaatagataccaagaggatacatgaagaaatgat

SEQ ID NO: 18904 - DNA, 654 bp, Oryza sativa
  Clone ID: PAT_MRT4530_24417C.1
atggcggctgctaccatggcgctgagctcctccttcgccgccgccgccgctgttggtgcgccatggcgtggtgtcgtcggcgccggccgcgccgcggttggcttcccgcctcgccggcgtgctgtcacgctcgtcgtcagggcccaggccgagccggaggtggagccgacgaaggaggagacgatcacgtcgactccgagccccgtggcggcagcgcccaaggcgaagccggcggcgagcacggggctgtgggacgtgctggcgttcagcgggccggcaacggagcggatcaacgggcggctggcgatggtggggttcgtgccggtgctcgccgtggaggcgtcgcgtgacgccgcttccgcgtcccccgccgccgccgcctctgtccgtctccgcgccgagggggcggctgctcgttgtggtcgccgcctccgtctctgcgtcccgtgccgccacccgcacccgcctccatccgtccccgcgctgaggggtgccggcctgacgacaaagaacgggcaaggaactagcagagcagacagcagcccggggattcgtgcggtggcggtgacggcgacctgctgctgcgtacctcagctgcgaccggcgggcgctacgggcgcgtgcgacggcggcggacctaacaagcgcgactag

SEQ ID NO: 18905 - DNA, 657 bp, Oryza sativa
  Clone ID: PAT_MRT4530_24418C.1
atgtcactcgccaccgccgccgccggagcgcaaccgttcgtccgctcctcctcctccgccgccgcggcgtcctcgtcgcggcccctgctcgccgtcgccgccgcccgccaccgccgcccgcatggatctctcgccgccgccgccgccgcggcaaggcggcgtcgtcgtcgtccgctcctccagctcccggagccactgacggggaagctctggacattggatgacttcgaaggcaaccccgcgctgctggttatgtttgtatgtaatcactgtccattcgtaaagcatctcaaaaaagatattgcgaagctcacctcattctacatggaggatggtcctgattacatagctgaggaagcaaaattgtataaatactctttcccgtatctatatgatgagtctcaagaagttgctaaagcttttcgagccgtctgcacgccagagttttacttgttcaaaaagctcctgacagatggacgaaggccatttgagcttttctaccatgggcagtttgacgattcaagaccgagtaacaacgtgccagttaccggaagggatttaagtcgtgcgattgattgtgcacttagtggacaagagctaccttttgtgccaaaacccaggtttcctttagttcctagagaatctgtgttgctttaa

SEQ ID NO: 18906 - DNA, 885 bp, Oryza sativa
  Clone ID: PAT_MRT4530_24419C.1
ttgaatgatctactggctcgctccctgagttctgtgcttcaattcgatcctcgctaagcttcctccactcgatcgatctctctctgcgttttagttggttaatttttgtgtttgagttatttgcaatggcggccgctgccatggcgctgagcagctccttcgccgtcgccgccgctgctgctggtggcgcgccatggcgtggtgtcgtctccgctggccgcgccgcgcctcgccggcgtgtcgcgctcgtcgtcagggcccagtccgagccggaggtggagccgacgaaggaggagacggccacgtcgtcgtcgtccccgtctccggcgacgaccccgactccgagccccgcggcggcggcgcccaaggcgaagccggcggcgagcacgaagctgtgggacgtgctggcgttcagcgggccggcgccggagcggatcaacgggcggctggcgatggtggggttcgtgtccgcgctggccgtggaggcgtcgcgcggcggcgggctcctggaccaggccggcagctggagcgggctgccgtggttcgccgccaccgccgccgtgctctccgcggcgtccctggtgccgctgctccgcggcgagaccgcggaggcgaggagcggcggcgtgatgagcgcccacgcccagctctggaacggccgcttcgccatgctcggcctcgtcgccctcgccttcaccgagttcctcaccggctcgcccctcctcaacgtctaattaatcgattcaactaaattaattaagctgtgtgcgagtacggtgtgtatatactgggtggctagctaggttgtgtttgtgtgtgtctacatggtagcgagtggcgagcttatagtgcttggtgtactaccgcggaatttgaaaagggatt

SEQ ID NO: 18907 - DNA, 491 bp, Oryza sativa
  Clone ID: PAT_MRT4530_2441C.1
atatcagaaagaaagaagtgacggagagtagagaaaacaaacaaaataagctcaaagttttggttcatagccatggatgggaggcatgttatccttggccttctcatagcacttgtgttcgttggcaatgcttcttttgttattggagaatgctgggaaacaacatctagtagtccaatatgtgtggggtttatgtgcaaggctacttgctggattggtgcaaaagcaacaaatgggaaagtcgtagaagccacatgtactggatcagtgatcaagagcgagtgttactgtcgttattgtgacaaaaactagagttgaaattatgttgaaccagatgtaccagagacatgtatcaaatccccatgtatgtactttacattgggatgaaactctctatagatgtgatatcaataatggtgatgcatgcatgtgtgtagtttgatcaaatgtgataatatcaaaatacaatacatgtaagagttgagtgatcc

SEQ ID NO: 18908 - DNA, 753 bp, Oryza sativa
  Clone ID: PAT_MRT4530_24420C.1
atggcggctgctaccatggcgctgagctcctccttcgccgctgccgccgctggtggcgcgccatggcgtggtgtcgtcggcgccggccgcgccgcggttggcttcccgcctcgccggcgtgctgtcgcgttcgtcgctagggcccaagccgagccggaggtggagccgacgaaggaggagacgaccacatcgtcgaccccgaccccgactccgagccccgcggcggcggtgcccaaggcgaagtcggcggcaagcacggggctgtgggacgtgctggcgttcagcgggccggcgccggagccgatcaacaggcggctggcgatggtggggttcgtgtcggcgctcgccgtggaggcgtcgcgcagcggcgagctcctggaggaggccagcagcgggggcgggctcgcgtggttcgccgctaccgccgccgttcgtccatcccgcccgccgcgccgccgcttccgcgtcccccgccgccgctgcctctgtccgactccgcgcgcggggggcggctgctcgtcgtggccgccgccgccgcctccgtctctgcgtcccgcgccgccgcccgcaaccgcctccatctgtccccgcgccgaggggtgcctgctcgtcgtggccgcggccgacaccgccgcctcgtcccccgccgccgcagccgccgcgtccgtgtcacccgctgccgcctccgccgccgcatcccccgtctgcgccgccagcgataaagcgaaaggaagagtgagagagagagagtga

SEQ ID NO: 18909 - DNA, 192 bp, Oryza sativa
  Clone ID: PAT_MRT4530_24421C.1
cgccggtgtcgtaaggaccatacctctcaatcacctctcatatccaacgcaaatatctatgtagcctatatgtcaccagagagtcttaatgacagtagtttaggcacgatttttccagtatcgcaggacaaaggaggcgaaaagtggagatgagaatagtgcacaatgtgtgtgaagtgaaaggatagggga

SEQ ID NO: 18910 - DNA, 162 bp, Oryza sativa
  Clone ID: PAT_MRT4530_24422C.1
ggaataagtccactttgacttactaacccgaatctaatgccatgaccttaaaccgcaaaaccggatattctctgacttgccgaactatttgtaaatcggttgcaattttgacttccccttggattggtttttaggatggccaattttttgcttgaatgttgg

SEQ ID NO: 18911 - DNA, 1097 bp, Oryza sativa
  Clone ID: PAT_MRT4530_24423C.1
gattcggccgcgggcaggaaggagtgatctagcattctagctttgctcgcctgagttctttgcttgtcctcactagcggtgtttgacagtttgagttgttagcaatggcggccgctaccatggcgctgagcagctccttcgccgccgtcgcagccgccggtggtggcgcgccatggcgcgccgcggtacgcttcccgcctcgccggcgtgttgcgctcgtcgtcaggggtcatgtcgagccggatgtggagccgacgcaggaggagccggctacgtcgtcgtcaccgactccgacccccccggcggtggcgcccagggcgaaggcggcggcgaccacggggctgtgggacgtgctggcgttcagcgggccggcgccggagcggatcaacgggcggctggcgatggtggggttcgtgtcggcgctcgccgtggaggcgtcgcggggcggcgggctcctggagcaggccggcagcggggacgggctcgcgtggttcgccgccaccgccaccgtgctctccgcggcgtcgctggtgccgctgctccgcggcgagagcgcggaggcgaggagcggcggcgtgatgagcgccgacgccgagctctggaacggccgcttcgccatgctcggcctcgtcgccctcgccttcaccgagttcctcaccggctcgcccttcgtcaacgtctaattaatcaattcaattaaattaattaagctgtgtacaagtacagtatgtatatactgggtagctagctagggttgtgtttgtgtgtgtatacattgtagcaagtagcaagcttatagtgcttggtgtactaccttggaatttgagaagggattaaaattttagaactcttacaaaaaaaaaaaaaaaaaaaaaaaaaaaaaaatcaagaaggccgctcgcgatctagaacggacgcgtgggctcctgtgcagcacaagtacatgtccgcgtacgtacgtatgtactgggtagctagctaggccgggttgtgtgtgtgtatacaatgtagcaagtagcaagcttgtatagtgcttggtgtactaccttggaatttgagaagggattcaaaatttggaaaaaaaaaaaaaaaaaaaa

SEQ ID NO: 18912 - DNA, 1108 bp, Oryza sativa
  Clone ID: PAT_MRT4530_24424C.1
tcgaccacgcgtacgccacgcgtgcgcgtcaacagaggctaggagagagaggtagagctcctccggcgaatggagtacgtgaaccctctcaccggcttccgcgtcgacggccggcgccccaacgagatgcggcagctcaagggcgaggtgggcgtcgtcccacgcgtagacggatcggcgctgttcgagatgggcaacaccagggtcattgccgctgtctacggccctcgagaggtccagaacaaaggtcagcaagtcaacagcaaagatgctttggtgcgttgtgagtataggatggcagattttagtactggggatcgaaggagaaagccaaagggtgacaggcgatcaacagaaatttcacttgttatccggcaaacaatggaggcaagcattttaacacatttaatgccacgttcacagattgatatatttgtccaagttcttcaagctgatggtggtacaagggctgcatgcatcaatgctgctacattagcacttgcagatgctgggattcccatgcgagacattgttacatcttgcagtgctggttatctgtgttctactcctttgcttgatctgaattatatagaagacagtgctggaggtccagatgtcactgttggctttcttacaaagatggacaaagttactcttctgcagatggatgcaaaattaccaatggatacatttgaaactgtaatggaccttgcaattgaaggctgcaaagctatcgcaaactacatccgagaggtgctattggagaacacaagacggctggagtgccagcgtggttagttaacgctagtaggtgatgcccttcaattgagccacctttgactggtcttgtgacaagcaaattccctagagattcaaagattaatggtgcgatccaaatacataatgaaagatggtcaacatatcactagaatttagattatgctgattaagaacaatttctctgccagatatttgccatcagattcaaaattatgtggagctggaaactgcaatcatcaatgctcaactatggagtgatttgctgatcatttactgttatacttgttatctctgcttgtgatttcatatcagtgatgattaggttctc

SEQ ID NO: 18913 - DNA, 269 bp, Oryza sativa
  Clone ID: PAT_MRT4530_24425C.1
ccacgcgtccggattgatttcgtgttgtaatcttgcgtgatcgatcatggtgtgtcaattaatggcaagggcgtggtcatggagccccagcccggctcgccggagaccgccgagctgcccgcgcctatggtgctgagccgccgccgccgccgtcagatgaggcggcggcggaggaggaggaggccggcgttaagcctgataggcaatcatcttcatcgtcttcgtcgtcgtcgtcggaggaggagaaggaggtgtccaaggacgtcgcg

SEQ ID NO: 18914 - DNA, 976 bp, Oryza sativa
  Clone ID: PAT_MRT4530_24426C.1
cccacgcgtccgagcaccagcagaaggagtgatctagctagctcgcctgagttctttgcttctccagatcgatcgtttcgcgcgcgtctccgcgttcatctgctgtgtaatttgagttattattagcaacaatggcggttgctaccatggcgctgagctcctccttcgccgccgccgccgctggtagcgcgccatggcgtggtgtcgtcgccgccggccgcgccgcggttggcttcccgcctcgccgtcgtgctgccgcgctcgtcgtcagggcccaggccgagccggaggtggagccgacgaaggaggaggcggcgacgtcgtcgtcaccgactccgactccgagccccgcggcggcggcgcccagggcgaagccggcggcgagcacggggctgtgggacgtgctggcgttcagcgggccggcgccggagcggatcaacgggcggctggcgatggtggggttcgtgtcggcgctcgccgtggaggcgtcgcgcggcggcgggctcctggagcaggccggcagcgggggcgggctcgcgtggttcgccgccaccgccgccgtgctctccgcggcgtcgctggtgccgctgctccgcggcgagagcgcggaggcgaggagcggcggcgtgatgagcgccgacgctgagctctggaacggccgcttcgccatgctcggcctcgtcgcgctcgccttcaccgagttcctcaccggctcgccgctcgtcaacgtctaattaatcaattaaattaaattaaattaattaagctgcactgtacacgtgtacgtacaatacattcatgtacttgcgtatgtactgggtagctagctaggccgggttgtgtgtgtgtatacactgtagcaagtagcaagcttgatagtgcttggtgtactaccttggaatttgagaagggattcaaaatttggaactcttgcaaaaaaaataaagaaaaaaaaaaaaagggggggctcgtgccg

SEQ ID NO: 18915 - DNA, 909 bp, Oryza sativa
  Clone ID: PAT_MRT4530_24427C.1
atggagtacgtgaaccctctcaccggcttccgcgtcgacggccggcgccccaacgaggtgacccctaccctcttctcctccatcctctttccagtttcccctccacttgttcaatcgcaggcatggcttacacgggctgggtatcacgcagatgcggcagctcaagggcgagatcggcgctgttcgagatgggcaacaccagggtcattgccgctgtctacggccctcgagagggcttgttcggttaatctccaagaaggccaagagggagggattgagggggaggtccagaacaaaggtcagcaagtcaacagcaaagatgctttggtgcgttgtgagtataggatggcagattttagtactggggatcgaaggagaaagccaaagggtgacaggcgatcaacagaaatttcacttgttatccggcaaacaatggaggcaagcattttaacacatttaatgccacgttcacagattgatatatttgtccaagttcttcaagctgatggtggtacaagggctgcatgcatcaatgctgctacattagcacttgcagatgctgggattcccatgcgagacattgttacatcttgcagtgctggttatctgtgttctactcctttgcttgatctgaattatatagaagacagtgctggaggtccagatgtcactgttggctttcttacaaagatggacaaagttactcttctgcagatggatgcaaaattaccaatggatacatttgaaactgtaatggaccttgcaattgaaggctgcaaagctatcgcaaactacatccgagaggccaagtttgccgaagagaggaatagcgacgaggcctatgttagagatgccaagaagtactgcggcaggtttgataagtcgaagattggtttccgcaagtggtaa

SEQ ID NO: 18916 - DNA, 429 bp, Oryza sativa
  Clone ID: PAT_MRT4530_24428C.1
atgtcgcgcacccagcgattctgcgagagcgcctccgccacagtcagcttcgttctgcccaggtgtgtgaagagcaaaggtgaggagacagagatgcagcccctcggcaaccagttcgccctccaaaaacatgaaatgaactggcagcgcggtcagcaccgatttgatcaggcgcagtcggccgtcgggagagagcagtttgggcttccagccggccacttttttggacagccgatccaaaatcggttgcacttccgccttcgtcggtcttctcagggagagtggaagaccgaggaacacaatggtgtcatcggcataaatggatgtgtttgggatggaacgtcgagtgtccagcttggcaagaagcccccaggaagtagctttggcgagcaagccttgcagagcatccatgacaaggacaaagagtag

SEQ ID NO: 18917 - DNA, 455 bp, Oryza sativa
  unsure (1)..(455): unsure at all n locations
  Clone ID: PAT_MRT4530_24429C.1
ttgaggatcgggccgagttngtgcatagcaangcaagngtncgangccctctcgcncccaatccnncccaatcccctcctcatccactccgctctgcggccatggccgcctgctgctcctccctcgccnccgccgtctcctcctcctccgccaagcccctcgccggcatcccgcctgcctcgccgcactccctctccctccctcgctccccngccgccgccgccnggcccctccgcctctcngcctcctcctccagatccgcccgggcaagcagcttctccncccgcnccggnggnttggaacaatgcgccgngggtcggaaaaaagggncccaactccaatgcgaaggcnntntccaacaagaattccnccanntttnttttttcnaacnncnncggnanaaattagttnttctcctcctccnncccgtggnattcnatttccntnngcccaac

SEQ ID NO: 18918 - DNA, 200 bp, Oryza sativa
  unsure (1)..(200): unsure at all n locations
  Clone ID: PAT_MRT4530_2442C.1
gccgcctcccccacttggaagttgcaaagcgaagccaccaacctcaaaaacccaaaccctagctctcctcgccgccatcccatggngcgcctccacctcgtggtngtggccatggccgngctnttcgacgccgnggcgnntggcgcagggcccnanngcctacccgangccggttccgaagcgcagcaacncggtggcga

SEQ ID NO: 18919 - DNA, 565 bp, Oryza sativa
  Clone ID: PAT_MRT4530_24430C.1
tgaattcggtgttgaataattgtcataaaatcaaaataacataacatggagctgccatttgttgaaattcccaattcagacggggggttgtttgttgaacacatgaatttagctgctacgctgagctgctgacccagctacttggttccaaggacaaggagtgtgtccaaagttctctttgccgtcgcaacagttttggatcgcttctgctgcacctaattaattaaatttccccgctataatttgtcctaattaacccgtcagtccacttctccttcttcttcttcctccaccaacgccaacgcgcttggtcaatctcccactccgctataaaaatttctctccccgcactctctacgcggcggcgtgcacgttctcctccacctccgtgcactatttacttcccagtttgagtttgacattctcgcgggaagaaggagaagaagttggtgagcctgtgagaggctgattgcgcggcggccatggccggagggggagggaaggcggcggcgggcggcggcgaagcgccggcgataacgctggagcacacaccgacgtggatcgt

SEQ ID NO: 18920 - DNA, 2238 bp, Oryza sativa
  Clone ID: PAT_MRT4530_24431C.1
atggggcgtgaggctctcacctaccacccggcggaccaccactccggtgcccgccggccaccatccaagccgcagttcggctcgtggcgcgacgtcgtgaagaaagataggggccttgccgccgctgaggaggcagcttggacggaggtccggcggaaggggagcacggagcattcactgcgggcagagaggtggccgtctgggagaagagaacaacaggggaaggtgaagcaggtggtggtaagggaggtgccgccggcgaagtcgaagatcgtcaagccggccccacaggcgacagaaaagggcgcggtgatagccatggcgggtgctaacctgggcgggtaccagatctgtgcggccacgccgccgcagttcgtggaaaagtaccgcatcggcgagcccgactcgtggctagaaagggggcgggtggtgctgtcctggacctccgggatggagcgccatgagaggtacctccaggaactctccctgatggcgtcggtgctcaagggacggccgcccgtctcgccggcagagcttgcggagacaatcgagctgcacacaggcgtgcagcagcgttacttcagggtggaggtcacgcgcccggaggatttcctgatctcgtttcggaaccagagggagaaggaggcggtcctgcggtgttcgaaggcgctgttctgtaatgaggtgcctgtttcgttcaagccgtggaacagatgctgctgggcggaggcctcggctttccagttcttcaccaagatctccctcgacggccttcccccgcacgcctgggaggaggaagccatgcacaagctggtcaacagcttggacggtcagcttgccgagctgatcccggcggcggacgcgcgctgcctcggtctcttcgcttggttcaagaatccgtccgaccttccccaccatctggacgtggaaatcccggaacgcccggccgcagggcgatggcgggaggggacgagcgcgacaccaccttccccgccgcgggagaagccggccctcacctatccggtcatcatccacgtagaagaagtcattgaccctacgccgttgcatactccgccgacctccttcgacgacaactccgatgatgaagacgtcacccggcggaacactttctcctgctgggcaggtcgctacgatggcgctggtccctggccgacggaggtgggaggcggtcatgtctacggcggtgcgaccggttcggcgggaggtctaggcgcgcgctcctttgcccccatcccaggggaggtctcggccccgccaaggcggttgcttcaacgcctggcgaccatgccggcggcggggcagtcggtgacagaggagagccaggatgatgctgtcttgacagctgcggtggtgggggtcattgacatggcagcggcggaccgggttctagaccgggctgacattgttgttcaagacatgaaggcgggggaggtgttggcgtcacagccgcattcaccgacgttggttttgcaagcgccgggtgtgtggttctctccgcaagcggtgcaagcagtggagcaaccaggggccgacgtgggaatccctaccccgctggcggcgcctgtggttgcaacggcaaaggcgcttatcgttctggacgacgactgcagctgggcgctcgtggccggtggtgtgtcgcctctttcatcgccgctccaactctccctggacgagttaaccggcggtgaactgtcggcgctcggcacggagaatgatggcgaccgtgctgagctcagtgatgaggtccgggaggccactgtggaccacgttcacgttcacggggacgacctggcttcagggcaggaagtcgcattaactccgaatgggggatatgcattaacgcgtgttgcgtcggcctcgccgcgtattagagcgagccagtcgtcttttggcacgttggccaagaagctctcttttgaggatacgatggctgaggtgtcgctcgtggagcatgggtgcgagcggccagcattgaaggcgactggcgacgcgctgagctcaacgcaggagagcaggagtgatcgtgggtttgaatcggcggcaaaggcgggagagttccgtgtctatgtgcggaagcaggcccagaagaaaccgagccatgagcaacctgggccggaggggatcggcctcatgggcttggcaggccaggatctggggcaggctgacctgggacgggctgtggctggcgtgggacaggaaatgtcggtgggccaagtt

SEQ ID NO: 18921 - DNA, 297 bp, Oryza sativa
  Clone ID: PAT_MRT4530_24432C.1
atgtcgcgcacccagcgattctgcgagagcgcctccgccacagtcagcttcgttctgcccaggtgtgtgaagagcaaagccggccacttttttggacagctgatccaaaatcggttgcacttccgccttcgtcggtcttctcagggagagtggaagaccgaggaacacaatggtgtcatcggcataaatggatgtgtttgggatggaacgtcgagtgtccagcttggcaagaagcccccaggaagtagctttggcgagcaagccttgcagcgcatccatgacaaggacaaagagtag

SEQ ID NO: 18922 - DNA, 5727 bp, Oryza sativa
  Clone ID: PAT_MRT4530_24433C.1
ttagccgacttctctcaaaatgttggtctccctccacactgcaacttcatccttaatatcactgaagagctccgctgccgttctcgccttttgttcaaagatcctgaggtttcgttctcgccacacgaaccagcagatgaggatacaaagggagtcaaaagcgcccctgtagcccgtctgaaaacagagtctgactttaatccaccagtccgcgaactcccgtgccgcgaagaacatctcatacacagaggctgtgcagaaaactctgttaggagtgagcttccaactggtagagtcttgggcatcctcttgcagctgtacctcctgaatctcatcccacaaacgaaaatattccgataaggccagcgcagagaaactccctcgaatgtcgcgcacccagcgattctgcgagagcgcctccgccacagtcagcttcgttctgcccaggtgtgtgaagagcaaaggtgaggagacagagatgcagcccctcggcaaccagttcgccctccaaaagtccgtatctttaccgtcccctacctgaaacgacgccactgattggaacagaccggtgatgtcgtttgtcggtactgagtttatcagagtccacggccttcctctttgctccaatcgtctagcgagccatttcattcgcatcgcttggccaaataattccagatttttaactcccaatcccccgcactccttcgggctgcagacgatatcccaagccactaggcagtggccgccattaacctcctcttgccctttccacaggaacgctcggcatttcttgttaaactctttgattgcccattttggcagcacaagcacagacatgaaatgaactggcagcgcggtcagcaccgatttgatcaggcgcagtcggccgtcgggagagagcagtttgggcttccagccggccacttttttggacagccgatccaaaatcggttgcacttccgccttcgtcggtcttctcagggagagtggaagaccgaggtaagtgatcgggaaattctcaaccctacacccaagcagctgttgaactccgaccaacacatcatcatcgcacctaatcggcgtcaaagcactcttgctgaggttggtcttgagccctgtagcttttccgaaaagctgaagaatggcgtttaccgctgttgcctccctctcgattggttgcaggaacacaatggtgtcatcggcataaatggatgtgtttgggatggaacgtcgagtgtccagcttggcaagaagcccccaggaagtagctttggcgagcaagccttgcagcgcatccatgacaaggacaaagagtagcggcgacaacgggtcaccctgccgcagtcctcgcgccggcttgaagctgtcactttcatggccattgagcaagattctggtttcagaagttaggagcagggcagctatccacgatcgccacctggacccaaagcctctgtttcggagcaagttcagcaagaaacaccaagagattgtgtcgaacgctttagtgatgtcaagtttcaggaggatcataggcttctttcttcggtggaattgcagcgctaaacctctgacaaaaatgaagttttcgtgtatcgatcggccacggatgaaggcagtctggttttcagcaactagatcgcccattctcggcgccaaccgggacgccaaaatcttcgttgcaagcttggaaaagctgtgtatcaggcttatgggcctgtaatccttgatcaacgtgggcgcatccttctttgggagcagagtaatcaccgctgtgttgagattgtcgagattctgatgattcccagagtgaaatttcgtcagtgccgccagcacttcccctttgatgacttgccaacaccgttggtagaaaagcccggtgaatccatccggtcccggcgccttctcgtttggcatctcttttatcaccttccaaacttcctcttcagagaaaggcacttccagctcttgcaggttcggcgccggagggaagatttgattgaattggagctcagccgagtcgggatccgccacacccaaaattccctgaaaatagtccttggccgagttgacttttccctcccggagcggtgagatccgaccctgctggcgcaatctgaggcgttagagcgtcgcgaatcccaggctgcggttcttcaggaatgccttggaactgggttcaaccgcgcaaaggagtgtgatctctggcgcagcagcaaaacggtagatcaattcattggcaatctggagcaggaggcgaaagcgactgatcctctttggtccccaggaacagaaaggcataggaagacgtgccctcttgacatacagaatgacaaagggatctgagtcctcaactggaggcggacgggaatgcgcctcctcttgatcgaagtccagaaacatagagcaaaaagtttcaaaacgaaaccttcttctaccctgcggggtttccccgcaagaaagcaatagcgcacaatgatctgaactggacgaactcagcgcttgcaagtgcgcgtccggaaacgcatcctcccattccgttgagacaagcaccctgtccaatttgaccagggtgggaatttgttgctcgctactccaggtatacctcctcccgaacagatacagttctttgagctcaagttcattaatcttgttgcggaaagcattcatgagccgcctgttcacccgcgagttgttcttgtccgccgctgccgctattaagttgaaatcacctgccacaagccaaacctccccacagattcctctgatttcggcgagttcctccaagaacagaatcttctcgttatcatcttgtggcccgtagaccgaagtgaggaaacatgaatggttgcctgcaatccactccaacttcgccgtcaccgaccattgtcccaaatgcacttgtgatccacggaatacggaccccttccaggccacaataaccccgcccctggtatgtgacgcgggaagggcaacgaaatcatcgaaatccggcccacacagttcatggattacaagcaaatcaactacctctaatttagaccccgccgccaccagcgaagccaggtccggcggtggaacatctgcttcctccagcgcaacatccacatccagcagctccgctagcaccttcatgtgctgggtcgataacggctgatcaatcacggtagtgttctgctggaaggtgtcttgatccgcttcttcttcctcttcaatgatgcccatcttcttcatcgttaccttctgcgcttttgaagttgaatggcgacgagctccgttcccttgttgttgcagacgtgggctgcgccacggcgtgaaccactcagggatcacattgcgccaacaaggcttggatttggggactgactccggcggcctcctcccgagcagggaggggggaggctcagtagcgaccgacgcgaggaatccctgaagaatctggtccgcctcggggggtagcggcgtgttcgccggcgacccctccgaggttggccgcgcgcgggcgagtgccgtcgacggcgaggcgggaggtgggagcatcatctctccgctgagcgcctccctgctgctctcgatctcagtttcctggaccggccgctcgtcatcgctgtgggccacttcttcttggtgggcctgaggtggctcgtcctcgccacatacaacttggcccaccgacatttcctgtcccaggccagccacagcccgtctcaggtcagcctgccccagatcctggcctgccaagcccatgaggccgatcccctccgtcccaggttgctcatggctcggtttcttctgggcctgcttccgcacatagacacggaactctcccgcctttgccgccgattcaaacccacgatcactcctgctctcctgcgctgagctcagcgcgtcgccagtcgccttcaatgctggccgctcgcacccatgctccacgagcgacacctcagccatcgtatcctcatcactgagctcagcacggtcgccatccttctccgtgccgagcgccgacagttcaccgccggttaactcgtccagggagagttggagcggcggtgaaagaggcgacacaccaccggccacgagcgcccagctgcagtcgtcgtccagaacgataagcgcctttgccgttgcaaccacaggcgccgccagcggggtagcgattcccacgtcggcccctggttgctccactgcttgcaccgcttgcggagagaaccacacacccggcgcttgcaaaaccaacgtcggcgaatgcggctgtgacgccaacacctcccccgcctccatgtcttgaacaacaatgtcagcccggtctagaacccggtccgccgctgccatgtcaacgacccccaccaccgcagcggcgtagacatgaccgcctcccacctccgtcggccagggaccagcgccatcgtagcgacctgcccagcaggagaaagtgttccgccgggtgacgtcttcatcatcggagttgtcgtcgaaggaggtcggcggagtatgcaacggcgtagggtcaatgacttcttctacgtggatgatgaccggataggtgagggccggcttctcccgcggcggggaaggtggtgtcgcgctcgtcccctcccgccatcgccctgcggccgggcgttccgggatttccacgtccagatggtgggaaaggtcggacggattcttgaaccaagcgaagagaccgaggcagcgcgcgtccgccgccgggatcagctcggcaagctgaccgtccaagctgttgaccagcttgtgcatggcttcctcctcccaggcgtgcgggggaaggccgtcgagggagatcttggtgaagaactggaaagccgaggcctccgcccagcagcatatgttccacggcttgaacgaaacaggcacctcattacagaacagcgcctttgaacaccgcaggaccgcctccttctccctctggttccgaaacgagatcaggaaatcctccgggcgcgtgacctccaccctgaagtaacgctgctgcacgcctgtgtgcagctcgattgcctccgcaagctctgccggcgagacgggcggccgtcccttgagcaccgacgccatcagggagagttcctggaggtacctctcatggcgctccatcccggaggtccaggacagcaccacccgccccctttctggccgcgagtcgggctcgccgatgcggtacttttccacgaactgcggcggcgtggccgcacagatctggtagccgcccaggttagcacccgccatggctatcaccgcgcccttttctgtcgctgctctcccctggctctgccgccccggattgcccccagagacctccttcctctccggacacgcccacgctaggtgacccgggtaccagcaatggaaacaccttgtctctcccttgcagtcaagcttgcgatgacccaatcctaggcacttgaagcagcgccccagaagccagcgagggatctccttctccgaattgaatgccctgtcatggttgctgaactccttcctcggcttgaatgctctgtcatgtttgttggaggttgggtcacctgcccgcagtgaatgctccgtgctccccttccgccggacctccgtccaagctgcctcctcagcggcggcagggcccctacctttcttcacgacgtcgcgccacgagccgaactgcggcttggatggtggccggcgggcaccggaatggtggtccgccgggtggtaggtgagagcctcacgccccat

SEQ ID NO: 18923 - DNA, 475 bp, Oryza sativa
  unsure (1)..(475): unsure at all n locations
  Clone ID: PAT_MRT4530_24434C.1
ggaacacgaacgccgaactgtccggcacgaaccagagttttctgatactcgtatgtcacagattaatcagcaagcttaggggtgagtttaactcacgctaaaattgtgtaggatcgaaacaaagtaactaagccaaccagagggggtgaatggttggtatacccaaaaacccaaacttttagcggaaataaaagttacccttaaattcgatgtagatcggtctaaccgaagttgatccgccggtctgaccgcgctcgcgctgtcggtctgaccgatgttgatcactcggttcaaccgcctgaagattgcctgccgcgtgtgaagtcgccgccggtctgaccgcctcgccctagccggtctgaccgccgccttgccgccggtgagtcgccggttagactgccaaaacccggtgaaacacanatcgaagcacaactttattgcttctctctgtgtttacaaagtataccaacagcac

SEQ ID NO: 18924 - DNA, 5355 bp, Oryza sativa
  Clone ID: PAT_MRT4530_24435C.1
tcagcatttcttgttaaactctttgattgcccattttggcagcacaagcacaaacatgaaatgaactggcagcgcggtcagcaccgatttgatcaggcgcagacggccgtcgggagagagcagtttgggcttccagccggccacttttttggacagctgatccaaaatcggttgcacttccgccttcgtcggtcttctcagggagagtggaagaccgaggtaagtgatcgggaaattctcaaccctacacccaagcagctgttgaactccgaccaacacatcatcatcacacctaatcggcgtcaaagcactcttgctgaggttggtcttgagccctgtagcttttccgaaaagctgaagaatggcgtttaccgctgttgcctccctctcgattggttgcaggaacacaatggtgtcatcggcataaatggatgtgtttgggatggaacgtcgagtgtccagcttggcaagaagcccccaggaagtagctttggcgagcaagccttgcagcgcatccatgacaaggacaaagagtagcggcgacaacgggttaccctgccgcagtcctcgcgccggcttgaagctgtcactttcatggccattgagcaagattctggtttcagaagttaagagcagggcagctatccacgatcgccacctggacccaaagcctctgtttcggagcaagttcagcaagaaacaccaagagactgtgtcgaacgctttagtgatgtcaagtttcaggaggatcataggcttctttcttcggtggaattgcagcgctaaacctctgacaaaaatgaagttttcgtgtatcgatcggccacggatgaaggcagtctggttttcagcaactagatcgcccattctcggcgccaaccgggacgccaaaatcttcgttgcaagcttggaaaagctgtgtatcaggcttatgggcctgtaatctttgatcaacgtgggcgcatccttctttgggagcagagtaatcaccgctgtgttgagattgtcgagattctgatgattcccagagtgaaatttcgtcagtgccgccagcacttcccctttgatgacttgccaacaccgttggtagaaaagcccggtgaatccatccggtcccggcgccttctcgtttggcatctcttttatcaccttccaaacttcctcttcagagaaaggcacttccagctcttgcaggttcggcgccggagggaagatttgattgaattggagctcagccgagtcgggatccgccacacccaaaattcctttcatatggaagtatttggagttggcgtctccctcccggagctgggagatccgagcccgctggcgcactctgattcgttcgagtgacgccaatgccaggcagcggcccttcaggattgccctgaaacggcgttcaagaggggaaaggagtcggttctcttgcgccacatcaaaacggaagatcaattcattcgcaatctggagctggaggcgaaagcgactgatcttcttttgtccccaggaacagagagacatagcaagacgcgccatcttgacgtacaggatgacgtagggatctgtgctctcaaccgtctgctgccaggaatccgccaccacctgatcgaagtcctcaagcttcgtccaaaaagtttcaaaacgaaaccttcttctaccccgcggggtttccccgcaagaaagcagtagcgcacaatgatctgaactggacgaactcagcgcttgcaagtgcgcgtccggaaacgcatcctcccattccgttgagacaggcaccctgtccgatttgaccagggtgggaaattgttgctcgctactccaggtatacctcctcccgaacagatacagttctttgagctcaagttcattaatcttgttgcggaaagcattcatgagccgcctgttcacccgcgagttgttcttgtccgccgctgccgctattaagttgaaatcacctgccacaagccaaacctccccacagattcctctgatttcggcgagttcctccaagaacagaatcttctcgttatcatcttgtggcccgtagaccgaagtgaggaaacatgaatggttgcctgcagtccactccaacttcgccgtcaccgaccattgtcccaaatgcacttgtgatccacggaatacggaccccttccaggccacaataaccccgcccctggtatgtgacgcgggaagggcaacgaaatcatcgaaatccagcccacacagttcatggattacaagcaaatcaactacctctaatttagaccccgccgccaccagcgaagccaggtccggcggtggaacatctgcttcctccagcgcaacatccacatccagcagctccgctagcgccttcatgtgctgggtcgataacggctgatcaaacacggtagtgtactgctggaaggtgtcttgatccgcttcttcttcctcttcaatgatgcccatcttcttcatcgttaccttctgcgcttttgaagttgaatggcgacgagctccgttcccttgttgttgcagacgtgggctgcgccacggcgtgaacccctcagggatcacattgcgccgacgaggcttggatttggggactgacgctggcggcctcctcccgagcagggaggggggaggctcagtagcgaccgacgcgaggaagccctgaagaatctggtccgcctcggggggtagcggcgtgttcgccggcgacccctccgaggttggccgcgcgcgggcgagtgctgtcgacggcgaggcgggaggtgggagcatcatctctccgctgagcgcctccctgctgctctcgatctcagtttcctggaccggccgctcgtcgtcgctgtgggccacttcttcttggtgggcctgaggtggctcgtcctcgccacatacaacttggcccaccgacatttcctgtcccacgccagccacagcccgtcccaggtcagcctgccccagatcctggcctgccaagcccatgaggccgatcccctccggcccaggttgctcatggctcggtttcttctgggcctgcttccgcacatagacacggaactctcccgcctttgccgccgattcaaacccacgatcactcctgctctcctgcgttgagctcagcgcgtcgccagtcgccttcaatgctggccgctcgcacccatgctccacgagcgacacctcagccatcgtatcctcaaaagagagcttcttggccaacgtgccaaaagacgactggctcgctctaatacgcggcgaggccgacgcaacacgcgttaatgcatatcccccattcggagttaatgcgacttcctgccctgaagccaggtcgtccccgtgaacgtgaacgtggtccacagtggcctcccggacctcatcactgagctcagcacggtcgccatcattctccgtgccgagcgccgacagttcaccgccggttaactcgtccagggagagttggagcggcgatgaaagaggcgacacaccaccggccacgagcgcccagctgcagtcgtcgtccagaacgataagcgcctttgccgttgcaaccacaggcgccgccagcggggtagggattcccacgtcggcccctggttgctccactgcttgcaccgcttgcggagagaaccacacacccggcgcttgcaaaaccaacgtcggtgaatgcggctgtgacgccaacacctcccccgcctccatgtcttgaacaacaatgtcagcccggtctagaacccggtccgccgctgccatgtcaatgacccccaccaccgcagctgtcaagacagcatcatcctggctctcctctgtcaccgactgccccgccgccggcatggtcgccaggcgttgaagcaaccgccttggcggggccgagacctcccctgggatgggggcaaaggagcgcgcgcctagacctcccgccgaaccggtcgcaccgccgtagacatgaccgcctcccacctccgtcggccagggaccagcgccatcgtagcgacctgcccagcaggagaaagtgttccgccgggtgacgtcttcatcatcggagttgtcgtcgaaggaggtcggcggagtatgcaacggcgtagggtcaatgacttcttctacgtggatgatgaccggataggtgagggccggcttctcccgcggcggggaaggtggtgtcgcgctcgtcccctcccgccatcgccctgcggccgggcgttccgggatttccacgtccagatggtggggaaggtcggacggattcttgaaccaagcgaagagaccgaggcagcgcgcgtccgccgccgggatcagctcggcaagctgaccgtccaagctgttgaccagcttgtgcatggcttcctcctcccaggcgtgcgggggaaggccgtcgagggagatcttggtgaagaactggaaagccgaggcctccgcccagcagcatctgttccacggcttgaacgaaacaggcacctcattacagaacagcgccttcgaacaccgcaggaccgcctccttctccctctggttccgaaacgagatcaggaaatcctccgggcgcgtgacctccaccctgaagtaacgctgctgcacgcctgtgtgcagctcgattgtctccgcaagctctgccggcgagacgggcggccgtcccttgagcaccgacgccatcagggagagttcctggaggtacctctcatggcgctccatcccggaggtccaggacagcaccacccgccccctttctagccacgagtcgggctcgccgatgcggtacttttccacgaactgcggcggcgtggccgcacagatctggtacccgcccaggttagcacccgccatggctatcaccgcgcccttttctgtcgcctgtggggccggcttgacgatcttcgacttcgccggcggcacctcccttaccaccacctgcttcaccttcccctgttgttctcttctcccagacggccacctctctgcgcccagacgcactgccgccccggattgcccccagagaccgccttcctctccggacacgcccacgcttgtctctcccttgcagtcaagcttgcgatgacccaatcctaggcacttgaagcagcgccccagaagccagcgagggatctccttctccgaattgaatgccctgtcatggttgctgaactccttcctcggcttgaatgctctgtcctgtttgttggaggttgggtcacctgcccgcagtgaatgctccgtgctccccttccgccggacctccgtccaagctgcctcctcagcggcggcaaggcccctatctttcttcacgacgtcgcgccacgagccgaactgcggcttggatggtggccggcgggcaccggagtggtggtccgccgggtggtaggtgagagcctcacgccccat

SEQ ID NO: 18925 - DNA, 342 bp, Oryza sativa
  Clone ID: PAT_MRT4530_24436C.1
ttgtggagcagtcatctaacggttcatccgggcggctgtcgttgcggcggcggggggtgcagcggccaataatcagcatggtaggagggtcacggacaacatgctgtcatcgcggatgctgccgaggggaatgccgctgcgagagaggactttagcgcttgggagtcaactgagtagcgacaccagcgagggggcacctctatagaggtgacaaaacgacttggtcctggtgggccactcggcaggagcgtgttgtttgttgaccaggccgaggacaacgcggggacccaagctgctgatgggatgttgactacaaagcttgtccagcatgatggacctact

SEQ ID NO: 18926 - DNA, 409 bp, Oryza sativa
  unsure (1)..(409): unsure at all n locations
  Clone ID: PAT_MRT4530_24437C.1
gacgcccttggggttgggtttttttgttggttaataaggataatacttggtccttgactttacagaccatactctgctgcatccactaataatgactggnagggagaggaaacagactaattccaaggtgcccatgttagggttcaagtgcgtacggccacgtacnagggagtttgancggggcaaacaaaggggttgtgagaaatatcataagcagcnttctgtctcncaacaatctcggggtagctcacggctagcaagtagtatgaaaagcacctaatcacggatatgaacaccagtgtaggccgcctgagggaggggaacctaataggccgaaggaccctgatcccatgatctgttggcatggtgtccctgaggatggccacgtcctgtgatagcccccagaaat

SEQ ID NO: 18927 - DNA, 2418 bp, Oryza sativa
  Clone ID: PAT_MRT4530_24438C.1
atgacatctcgccgacaattcctcccacgcaagtggagaacggaatatcgacgaccccaacacctggaagaaatcctcaagtggctgcacagaaacctagagccgacaaggatatctacccagaaacccagatcttggtgtcctgttcataagacatccaagcatactgtacaagattgcccggtgatactccacacgaaggccgaactctacgcctgttgggagcgtgggattcaacgcacttcaccgacgggtgtcacatactgcccaatccataagtcaagatctcactatctcacgagttgcaaaatcttccttaaaatactcaagtcgacgtgtccttatgtccaacaaccacaagttcaacttcagtgcgttgccaaggaacgagacgtagcaatgacttcagattggttcgtgggttttgtcagtgtcaaccctgacgagccatctgtactacacctattggaagatcaagagtcctcttcgtcgagtttgccacgagatgtaaacgtgatcaatattggtgagacaacgcgtttgcagatacaacaatcgagccttcacctcaagatccatcacgaggaaatggtgaaccagctaatgggaacgcggaagcggaaaaccctattggagagcgtcctcaccgtgctcagtcaccacgggcaacacgatatccaactccgccacttcacgaccggcagagggaacgacgaaatcggaatgacactgactgtcatcggcgtcgttctccctctcgacaaggagggaacaccatctaccgtcgacaccgacaccgctccccttcacgttgaggagggaacaacgatcgagaaggacgccccaatgaacatcgagatccgcaggcccgcaatgatcgccgagataacgattgttgtgacggtggcggtgacaatcggcgagatcagggagccgatggacgagttcagggagaccatggtcgagatcagaggcgagatggcgacgacagatgggaacgtaactctcaatctcccgcgttgggacgagaccgacgacacgaccactgatcggtcaggcgtccgagataagctgttcaaaattatcgacagatgcgctcacacagacgacgccctaagatggaaggaaggaaaaagcaaggtaggggaagagaataagccagccaacaaagacgcaccagagtcgagcaagaagagaagtcataagagtgggaagcgcaaaccttcgggagaggtccatgctgccaagcaaacggacccacccatgtgcccaaacccccagaatgacaactcacgaaaacaatggtgccctatacacaagacgaacaatcactccatggaggattattacgtcttcaaaaaggagctggtgcgacaattagcaatcgagagaggcgcttttccatcatacacctcgaagagggaattcaagaagatagaacgcgaagtatgctcctcatcacagggggcggctaccaagatgaaatggtcccaacacaagatcgagctctcagaggcggaccacccaaaaattgcaaccacacctggcagatatctgatcgtggtcgagcccactattcggaatatcaaggtagcacgggttctcatcgacggcggcagttccatcaacctgcttttcaccagtaccttagacgccatggggataccacaaagcgagctgacaaccactccagaatcatcattgaagccgttgggtaagatcacactacctgccacttttggacaaacccataacttccgaacaaagcatatcatctttgatgtcgcagagttcgacagtacatacaacgccattattgggagtgcactcacgaagttcatggcagcatctcactattcctatcaagtgctcaaaatgccaggaccaaaagggacaactactatccagggaaaagttggtgtaatggtacgcaaagccaatgggaagtggagaatgtgtgcagacttcaccaacctcaataaggcgtgtcccaaggatcacttccctctccctcgaatagatcaactagtggattcaacagccggttgtgagctcttgagtttacttgacgcttactccggctaccaccagatcaacatggcaaaagaggatgaggagaagatggcattcatcacgcccttcggtgtattctgctatgccaaggtgccgttcggattaataagcacaggaaatacctatcagcgcgggatccagagagcacttggtgatcaacttgtacgaaacatcgaggcctatgtggatgacatcgccgtcaaaaccaagacgagcgattcgctaatcaacgaccttagggaaacgttcgacagcctccgacgatatcaaatgaagcttaaccaggagaagtgcacgttaggagtaccgtcagggaaaatactcggcttcctagtctcgggatga

SEQ ID NO: 18928 - DNA, 195 bp, Oryza sativa
  Clone ID: PAT_MRT4530_24439C.1
atggcgcaacatgccggcgtgccgctccctccgtccgtcctcggcgacaccgaagtcttcgcgcttttaggtttttgtgtgttggaaatggaatacggtggtggctcggtgacggagaccatcgaccgagaacagtcaaccgacggccgggccaacggtcagcgtcagccggcgacaacggggttgttcacttag

SEQ ID NO: 18929 - DNA, 126 bp, Oryza sativa
  Clone ID: PAT_MRT4530_2443C.1
aacaatacattcattcagactgttcctaattatgatgaggctaaatttaccacttacatagctaattacatgtgacgaaacacttggagcactcatcttcaaattcaaccctgttcagatctgaac

SEQ ID NO: 18930 - DNA, 353 bp, Oryza sativa
  unsure (1)..(353): unsure at all n locations
  Clone ID: PAT_MRT4530_24440C.1
agcaaagaggctacagagccaaaatgatcaaagaggagagatcncccnngtgaanaanggccnncaatngtngaaaccgactgggacacnncngnangaacaagcacaagcacaagatcaatatcaacaagtccaatacagggaacgacagcaaacatcncctcgatggaacggatgggaggagaactnctgcacgatcaaggcgagagtaaacaggaaaatccagtcggctgatcaacaacccacggccggagaaaacaacgccatagcagagtcccacnacccaccaagagcgcacagagtaacaacagagcatcccgcgcgacgcagccaggggcaatgatcagggacca

SEQ ID NO: 18931 - DNA, 411 bp, Oryza sativa
  Clone ID: PAT_MRT4530_24441C.1
atgcggccagggcgacgagacgagcagcggctagcggggtggacggtgcaacaggcggcgaagagatgggtgactgccggcgagaaggatggcgcaaagggcagcgatcggcagggagaaggggcggcgacattcggggagaaggactcgaagcccccgctgctgccggccgtggcgcttcccactgctctgaatcaaacgagagagagaataggaaagatggaggagaggttgtcgggggcgatggatgtgtcgagccgtcggcggacgcgacgagggcggcctcctcctcgggggtggggagcaaggagggcttccagcagcggtggttgtggaaatagccggagttctggatcggacaaggttctattaagcttgcatggctgctgctctttgaaagacgaggtctag

SEQ ID NO: 18932 - DNA, 936 bp, Oryza sativa
  Clone ID: PAT_MRT4530_24442C.1
atggatatcaattgtgatattgccaacaaggtgatgcaaggtgaatttaggttcaattccattaaggagatgggcatgtatggaagtgatgatgtcgatgaggaggaggatgaaactattattgttgctagcagacaactagatatgatgagaaaatttggaccggtgttgacatcatttgatcttgtcaaacctagagacccaaacttcacaactattcacccaagactacttggtgatcggtttgagccccatttcaacaattgcataggtgcaatagatgggacacatataccagtagttgtgcccgcatcaaaggtggttcaacatgtgggtagaaataaatatccgacgcaaaatgtcttggccatttgtgactttgacatgaggtttacattcattgttgcggggtggcctggatcggcacatgatatgagggtgttcaatgatgctttgcgcaaatatgccgctatcttccctcatccaccacctgggaaattttaccttgttgactcaggctatccaaatcaactaggatatctatctccatataaagggaccaaataccatttaccggaatttcgagagggtccacgtcctagtggcaagaaggaggtgttcaaccacttgcattcatcgcttcgtaatgtgattgagcgctcttttggtgttttaaaaatgaaatggagaattctattggacttaccaagttatccgatgctcaagcaaacaaaaataatacatgcttgcatggcgctgcataattttattcgagatagcaaattgagtgatgaagagtttgatctgtgtgataatgatgaaaactacatgccgatgccttcatctcaagggaatgccagtcacatgggagacgaagatggggacgcaaatgccttccgtgatagtattgctgatgctttatttgctaagagataa

SEQ ID NO: 18933 - DNA, 2709 bp, Oryza sativa
  Clone ID: PAT_MRT4530_24443C.1
tgcaggaattcggcacgaggcactttctcttcttccaccgagaagatcgacaggcgagggggctgtgcgacggcgtcggcctaggcgagcagagggcgtccggcgcgcgccagcagcgaactcgggggcgtactgcgtgcggcggcgaggtccatagccattccgacggagatggatcctgcagatggtgaggactccctctcgaaagcatttcgataccgtgatgatgtggtgaataagcgatcccaatcaggaggcaaccatggcgtctctggcctacatggctccggcagcttctctgatggattttggggcgacggcgtcggcgaagatggacatataggcgatcttcatggctcacccggcgtccacggccaccatgtctcgcctgccccccatggcgccggcagttctggcggatcacccgtcttccatggagccggtgccgggcaccgcgacgccactgtgttccaagcggtggcagatgtgtctccccctggcagaggccgtggacggcgtggcgggcatggtggtggacctggacgtggtaagagatcggccacacaaccttccgcacgtggtggccgaggaaacaaggtgccatacaagccaccaaggccatccagcagtgcaactgttgtcggcgacgccgagggagcagctggtgtagacaatgacttcacagaagaaacaatggacagtgcgcctcatggaatgaaggaggagcttgataaagcagattggtctagcacacacaataggatattttgtgaactatgcgtacaacaaattgaagacggcaataggcctatcgggataatgactactagatggtaccagatcatagccaaaaagtacttccaaaagacagggctaagacacaataagacacaactgaagaaccggtgggatgtgctgaaatccatgtacagcttttggcttggtctccttaacgacacagggcttggatgggatcatgcaaaaggaacagttgctgcacctgttgagtactggaaaaaagtcaccaagggacattctgaatggaagaagctacaacatggaccaccagaatgtttagaattgctggatgaaatgtttggtactattgctgttgatggttcttctgcttgtgcacctggagaaaatgctggaggggatgatgcaagtggtgatgtacaggaccttggcgacacaccagtagattgctcattgggtaaaaaaccagtgaagcgagggtcttccagcaccgccactagtccatacaagaaggttaagaaccccatggttaggataatgaggaatattcaaaccactatggataccaattgtgatattgccaacaaggtgatgcaaggtgaatttaggttcaattccattaaggaggtgatggatttggtggtggattgcggggcagcagaaggaagtgcggagcatttcatggctacaagattatttgtgaaagctgaacatcgtgatatgttcaagactcttaccaccaagatgggcatgtatggaagtgatgatgacgatgaggaggaggatgaaactattattgttgctagcagacaactagatatgatgagaaaatttggaccggtgttgacatcatttggtatgttctacgctgaaaattatttgaacaagtccaagtatagaaaagctaatttagcgggtcatgcttgggttatgagaaaccttgaagttccacaagattgttatgacatgtttagaatgagtaggccactctttgagaggttacataatttgttggtctcatcttatggtctgaagtcaactagtaagatggattcagttgaagctttagaaatgtttttgtggaccattggggctccacaatcatttgttcaagttaagaaccgatttgagaggtcaaaaggaaaaattagtagaaaattcaatgaagtgttgcagagtatctatctcctttcaaaagatcttgtcaaacctagagacccaaacttcacaactattcacccaagactacttgatgatcggtttgagccccatttcaacaattgcataggtgcaatagatgggacacatataccagtagttgtgcccgcatcaaaggtggttcaacatgtgggtagaaataaatatccgacgcaaaatggcttggccatttgtgactttgacatgaggtttgcattaattgttgcggggtggcctggatcggcacatgatatgagggtgttcaatgatgctttgcgcaaatatgccgctatcttccctcatccaccacctgggaaattttaccttgttgactcgggctatccaaatcgactaggatatctatctccatataaagggaccaaataccatttaccggaatttcgagagggtccacgtcctagtggcaagaaggaggtgttcaaccacttacattcatcgcttcgtaatgtgattgagcgctcttttggtgttttaaaaatgaaatggagaattctattggacttaccaagttatccaatgctcaagcaaacaaaaataatacatgcttgcatggcgctgcataattttattcgagatagcaaattgagtgatgaagagtttgatctgtgtgataatgatgaaaactacatgccgatgccttcatctcaagggaatgccagtcacatgggagacgaagatggggacgcaaatgccttccgtgatagtattgctgatgctttatttgctaggagataa

SEQ ID NO: 18934 - DNA, 2151 bp, Oryza sativa
  Clone ID: PAT_MRT4530_24444C.1
atggaagaacggaatgcgaatgccgtggcatgcttaattatgaagcttcatattaccatcccggtgtctactctaaaaatgcttgaattgctaaagttaatgatatcagcatgtgcttttccccatgatacggcagaaggaaacttgttcaccagaatccatggtaatcaaagttacatgggaatgcctgtaaagccaattgttgtcactttaggattagaagtggtcaagccaatcaatcttcaaaagaaattgaaagcaccgagtgcaccgttcgtctccgggcagccctatgactatcctatggctaacctctcgacgcgatgggtcaacaatgctgccatgctcaagcacaactcctacaccgacgggtcagcagtacgtgccattgtcctccgttcacaaaaacaattgcccggcatctccttcgctgcagggttcttctgcgccccaccctgccaatcattcctctttgctgtcttcattgtctacaccaacagcggtgccgggatcaccttatcggtaaacggaatggcacaggtaatctggtcagccaaccgggcaagcctagttggagagaacgcaaccattgagctcactggagatggcaacttggtactccatgaagctaatggcagactcgtctggtcgagcaacacttcagtccaattagtggcaggtatggagatcactgagcatggcaacctggtgctgtttgatcagaggaatgcgacagtgtggcagtcatttgatcatccaaccgatgtattggtccctgggcagtcattgctgcagggaatgaagctcagagcaaatacatctaccacaaattggactgagagtaagttgtatatgactgttctcccagatggtttatatggctatgttggatccaaaccaccacagctatactatacatatttggtggacacaaacaagagcagaaaagatccgacgagggttacctttacgaatggaagcctcaacatctttctgcagtcgacacaggcaggaaagccagaagccattattgcactgccagaagcgaagtccatccagtacataagattagagtacgatggacatttgaggctgtatgagtggtctgatgaaaagtggaccatgtgtgcggagagtacgggatatgtgcaggtggacaatgcatctgtcctcttcagactaatactagttcagccaaactattgcaaatgcgaaaaacagagaggattgcaagcaagattgcttgaagaattgctcctgcagggctgtaatgttcagaagctcggcgaaggtggatttggatcggtctttgaagggaaaataagtgaagagagagttgcagtgaaatgtctggaaagtgctagacaaggaaacaaagaattcttggcagaggtagaaactattggcagcattgaacacatcaatcttgttaggctgattggattttgtgtagagaagtcaaaccggatcctagtatatgaatacatgccaagagggtcacttgataagtggatatattaccgccacaataataccccccttgattggaacacaaggtgtaggatcattctggatattgccaagggtttatgttatcttcacgaggaatgcagacgaaaaattgctcatttggatatcaaaccacagaatattctcttagatgagaacttcaatgccaaattggcagactttggactttcaaagctaatggatagggatcaaagcaaggtaatgactgtgatgagaggcacaccaggatatctggcacctgaatggttaacatcacaaatcactgaaaaagttgatgtctacagcttcggcgttgttcttatggaaataataagtggaagaaaaaatattgatttctctcagccagaggagagtgttcagctcattaagttattatgcgaaaaggctcaaaataatcagttgattgatatggttgataagcacagtaatgacatgatctcgcgccaggaggaagtgattcaaatgatgaagctcgcaatgtggtgcttgcagaatgatagctgccaaaggccttctatgtcaatggttgtcaagtcatgtctcctcaaggcaatccatcgatatattctgctccacctcctgcatcagtattatctggtccaagatgaaatgggtggctaa

SEQ ID NO: 18935 - DNA, 1815 bp, Oryza sativa
  Clone ID: PAT_MRT4530_24445C.1
tcacctgtcgctcaccacttgcgaatccacgcctgacgcaccgatgctccaccaccacacaagctttgccgacatgtgggatccctgcactggcttcccccgccggccagtctttatgcgccgaagaccgcgccacacccaccgacagctcctcctcacacctaggtcgcctcctccaccgccggccgcgccactctgcgccaagccagcctcctccaccagatgcgcctcgcgccaatccggtctccctccatcggccgcgcctcccgcgccaagccagcctccatctccgccgcccgcgcctctcgcgccgagccggtctccaatgtcatcggctgtgcttctctgcgccaagccggtctccgacccctccaccaaacgatgccgcgccggccagatgtagtcgtctcccacgccctcagctagccgtttgaggccgccatgcctccagtgaccgacacggtcaccaccaccgcagccgctattgcctaacgcccaaccacctcgtcgagtgggattttcagtgcagctgacgctgtgtatctggtaagtgacgccgctgctgctgtggtacacgtcctccacgctgtagaagccatagaagacgtccatgccgatccgcatcgccatgaactggtgccacctcggcctctgcagcattacggcgccctcgacgaagcaatccccgtcgacatctacgtcgtggtaatccgtcggaatccgcacggcgaatccgcggcggttctgccactcggggcacccgcacgggttcacctcggcgcagcccctgcacagcaccgctccgcagcaggtcatgaccatgtcaatgtcatctcgctcctccccgccgtcacagctcgagcaccggggcggcggcggcggcgtcgctactgctggtgacggcggctcatcccatctcgtcctgcgctgacgctgacgctgtcgggaaggtgcagaggagcggctccacacaacgcccgggaccgggactgctctgttctgtctctgctcctggaacctgcgcctgcgccgggaagtgccgccctccgccgccgtccgctctgctccgagacgacgatggccgaggaggtcggcggaggagtgccgccggtgtgcaggccaagaatctgcccccgcggcctggcctgactcgaggaagatgcgccaggtacgaccatctccttcgcggccgtcggggacagcaagcgcccggtagccgccgccgacggtccccaagaatccgcgcagagaactcgccacgtactcgcccaaggcgtcgacggcgtagccgctgggtcgcacaagagacccgtcgtcggccaccgtacggagcaaagccggccaagaacctctcgccctcttcgtcagaacgacgtaggggccagcgggcaacgagagagcgcgtcctgcggcgtcgtcgtcctggccacgggaggtggtggtggtcgtgcagacgacggcgcgccaggagatccctctcgcctcgccgcccggaatcgacccaagaacagcatcccggcgcacgggcacggcaaacgcatcaccctcgtggccggcgataacgaagccgtccgggcgggtatcgtccagcgcaatggaggtggcgacagcaagaagcgccgggagctgcgcctggatcacatccgcaaagaaaaaccatgcgacgggccgcgaatcaaccggcggaatatctctcaaatggcgtgcctctcccgcggcggggatggaaccggagcacggggcggcggagagcgtaggatcggaagagcgcgatgtgtcggcgggtggtgggaatccctcgtcgccggcgtccat

SEQ ID NO: 18936 - DNA, 295 bp, Oryza sativa
  Clone ID: PAT_MRT4530_24446C.1
atggcgtacgcccgatttggagcgtggcgcgggggtgagggccgcgtggcgggcgaggtggacacgcgcggcggatccagaggcgcaagcgcgagagggagctcggctcatgccggggtggaagagccagcgccatggcgcggcctcgggctccgtttccggcgcagcgccactgctgctgctgagtgggggcgacgtggagacgacccgggccgtggtctccgcttcttcgtacgagcagtggtgacgtggtccgttgtggtcaggcactcggtgcaggcgcgggattcgaggg

SEQ ID NO: 18937 - DNA, 550 bp, Oryza sativa
  Clone ID: PAT_MRT4530_24447C.1
tggccccaccaactcgccatccccactctgtcgccaccgccgccactgccatggacgaaaccctcgccgccatcctctcttacctcccgcctcccaccttctccaccgcgaactctcacccctctttgctccgagcgttgtcaccgcagcgctagcctcccacttgggcccagtcgcctcgacgcgccttgcctccgcgcacctggcctccgtggatcctgacatcgtcgcgtcctggttcgccttcctcgcctccaaggaggttgggtgaactcgccatcgtgaatggatcctggcacattgagtggggttccccatcgatctcctcggctgtgcctccctatgtcgcctctggctcggtctctgccagttcctagacacagtcggccttcctccagcctttgttaacctacaggagatcgttgttgtccactcctccatgcaggaccacgagcttcacgccgtgctcccccgctaccccgggctcgagagtctcgcacttgtgctaacacatgactacccgagatgcgtccatatctggtcggggaag

SEQ ID NO: 18938 - DNA, 419 bp, Oryza sativa
  Clone ID: PAT_MRT4530_24448C.1
aaaggcgggaggccctttttaaagcagtttataatttcaatccaattttagcaaaagggtctttggttttaaacctaacacgaaaagttccctgaaattaccttcttaggaaaagcagcgtttacccccggataaaacccggaaaaaatctttaccaaaaaagggtggggtttgggaggaaaaaaccgccggggggggggcggccattacccgggggggagcccctttttgacaaattcgtgaatgagggaggcgatctgggcgtcaagccccttgacggccttcttcttttgggcctagagggtgggaagcgcctccacgaactcgggctcaaggcggggggcccccttgtccaatttggcctacagttccggggggggctccttttttattttggtgagccccgggggaatttcggg

SEQ ID NO: 18939 - DNA, 459 bp, Oryza sativa
  Clone ID: PAT_MRT4530_24449C.1
aaagtacaaacacagccatgtatacatatatttattgctaattgctaaaagaaacaagtttgaccaatgtacaaggtattgagaagcaatgcaacgatgcccttggtctcttcataggacaacttaattcgaccatctatcaataagcctttatccggcgagaaaggtgcttttgctgaggcaactagctcaagcaaaagcagaaacctcaaagaactagggcatatggttgccttctttctactcttcttggttgacagctaacaacagcttccttatcacctgcatctctaagctctggttcaatcgaagaatctctggccctcacgggcgtctgacatgacggcatcggactcagagggcggtggccactcagacgacacagtctccgtgctattcgcaggtccaccacctccttccccggtcacggcctgcgcgagctgggtgggcgacgccgcg

SEQ ID NO: 18940 - DNA, 252 bp, Oryza sativa
  unsure (1)..(252): unsure at all n locations
  Clone ID: PAT_MRT4530_2444C.1
tgtgggaactgatgctggtgacttgatggttgccgtgtttgaccatgttgacgtgtgtgtgacccatgttgtgcatggtggactgttgacctggctgtnttgtggagttgcgtgtgctgcctgatgatgtggatggctctaactgcacactgctgaggatgcttgatgcttggacctgcatactttaattgttgtacacctggatatctgataatgcccatgcatgactcccatgtttatccgctaaaaaaa

SEQ ID NO: 18941 - DNA, 228 bp, Oryza sativa
  Clone ID: PAT_MRT4530_24450C.1
ctatataactgttgtcgacttggcggtctgaagtgttgactcgtagtcgacaacagggtagccttcctcctcgaatccgcatccggcaagatcagatatagcgctagattcctctctttggttcccgtaggtaccatatggggttttcctaggcatatctctgatgtcgatatctggcagcttgtcttggcgtatgtaggcttgtattggcttgtggctttgtggcat

SEQ ID NO: 18942 - DNA, 1044 bp, Oryza sativa
  Clone ID: PAT_MRT4530_24451C.1
atgccggaaatgggcgcgcgtgggggcgaggcgggggcggcgagggtggccaatggtggtggaggaggaggaacgggagggatgaggctgttctcgcccgagtactacgcgctgtgcaccggcggcgggatgctggcggcgggcgccacccacctcgccatcaccccgctcgacgtcctcacggtcaacatgcaggtatgctattattgcaggagagcggtgaatcccatgaagtacaatagcatattttcgggactgaacattcttgtaaaagaagagggagcttcatctctttggaggggttgggcagggaaattctttggctatggtttccaaggtggctgcaagtttggtctttatgagtatttcaagaagaagtactctgatgtgctagtggacagaaataagagcaccatttactttattagcagtgcctctgctcaaatcatagctgatgttgccctctgcccctttgaatcggtgaaagtccgtgtgcagacacaacctatgtttgcaaaaggcttgattgatggcttcccaagggtgtatgccactgaaggcttgtccgggtacaactgcacaagtcacatcgctgacaacaaaactctaggtgtgaagtacttaattgtatatcttatcaccatttgttctattcgtgcagtttctatgctaatgttttcaacatttgagcatactgtggacatcctatatcggaatgtcattcagaagaaaaaggaggattgttcaacaatgcagcagcttggggctacttgtctggctggctacatatctggtgcagttggtactgttgtttccaatcctgcagataacattgtctcatctctatacaacaaaaaggctaaaaatatcatagatgctgtgaaaagtattgggtttcgtggtttgttcacaagaagcctacctgttcgaatcactcttgttgggcctgtcataaccatgcaatggttcttctatgatacaattaagatattgactggattgccaacgagtggagggcttcctcgtgaactggaagaagtttaa

SEQ ID NO: 18943 - DNA, 250 bp, Oryza sativa
  unsure (1)..(250): unsure at all n locations
  Clone ID: PAT_MRT4530_24452C.1
gttggacacttagactgaattatccactatgaggcagcagctggtgacgctgctcgtcttgatcgcgctgcccgcgcgcgccggtccgcgccgggcgccggcgacggcggcgtcgtcgtggcgcgggtcacgcacgncgacgncgnccgcggcctcgccatgncggagatcgtgcggcgcatggcgaccgccaggngcgaggcggaggctgctgtcggcggcggaggcggcgcgatgcgcgcgcgggtgc

SEQ ID NO: 18944 - DNA, 1561 bp, Oryza sativa
  Clone ID: PAT_MRT4530_24453C.1
ccatacatgaacaaaattcattcatcaacacaatcctccatacatgaacaaaattcaaataaaaatcatccaagggtgctactccatcaccactgccccatcctggatgcagcacttgtcgccgagccgccgccagcctctctctgaaccccctcagggccggggtgagaggcaagtagggagggagtttgccgtcaccgccggtagtcgccgccgccttctgcccccgggccgctggccggccaccaatctcccccctccgctctccggccagatctgggagggagggagggaggggagccgctgccgtccgcccgccatccaccccgagacgctggccaccggcctcctcccccctcccccctccggccagatctgggagggagggacggaggggagccgccgtccgccccaccgccttccacccaccgcataacgccgccgaccgccccgccgcgccatgctgccgaccgccccaccgcgccccgccgccctcccccaaccgccctctggccaaatctgggagggaggggccgggagccaccttgagtaaaaccgcatcggctggaggaatatcctcaaacatgtcgccagcgataaaacacaccgtgccatcgtcgggtgcctggctgatcacatgtgggaggtcaagcacgctgcacttgatgtccggaaacgccttggcgatggccatcgcggctcctccatggccgccgccgacatcgaccagcgatctaagccctcggaagacgacatcaccgcgctctcttagcgcgatctccatgaggaagctgctgtcggcgacgcacgcgtcgttgagggccgagttcatcgtgtcgtccctcttcatcatctcccacggtggcatgccatgagccatctcgaagagcgccgttgggctggcgtttcgtccatccctgaaccacggacttaggctggagaatgtggtgagcatcgcagggctcaccacgaggtgaaccagaggggagaagttgcacgaggccttatcaccgacgaggatgcgagatgccggggtgagcttgtagacgtcttcttcaacggcaaatatgccggagacggagagcacgcgcatgagccggcgaaggtgcgggagcttggccggggggatcatggtgtcggcgacgatatcggagattgtggcggcgcctccacggcggtggatggcgccagggattccaagatcagtggcgcagagaagcgccatggatttgtggtagccgtacaggtggtggtggagatcgatgtggcccttgaagcatgtccggtggacggcggcgtgcggctgtgggtgatgagcggcggcgcgccggcagaggacgagcggcgccgtcgaggacgtgcggtgggcagtggcacagggggatgcgtggtgacactggagctccaccccgtcgctcgtcccctccagggactcctccatggacgccatcgacctccaccatccgccggagcttgctcgtcgccaccgcccaaattcctcgccgatctggcagactaccgccttgttgacagtgaaatttggtaaggccaaagtcatcat

SEQ ID NO: 18945 - DNA, 288 bp, Oryza sativa
  Clone ID: PAT_MRT4530_24454C.1
atggctaaagaggcggaacttttgaatggggtaattcctcaccttgttgatgatgatttgtctatcttgcaatatgctgatgataccattatctttttggagcatgatttgcaacaggaattccaatgcattttaggaagctttctaataaagatcggaaaggtcattttcagggcacagttagaaagatgtgatgaagatggagagttactaaaagttacatgttgcaagttggagactacgattatgcaacttttttgccaactatggatggagattcacaaatag

SEQ ID NO: 18946 - DNA, 546 bp, Oryza sativa
  Clone ID: PAT_MRT4530_24455C.1
atgccgaaacgggcgatgctatatcacagagagtgcgggacaagggcggcggctcggcaacggcggctcagcggcgacgacgacgacagcgacaagggaggggccttggcgactttgacgacgaccgcgacgacggagggcctcgtcgacaacgacggcgcgcggtggacggcgacgagcggatccggcaccacctcctccatccaccgcgccacctccatctccgcccccagccacctcttcacccttccccgcctcgctcccctagccagggaaggacgcggcctccgtcctcgggagtgccctggcgtgagcgggagtgccggcagcacgcagattcgcaacgacggtgacggtggctgcaacgacgacgacagcggcgatggtagctgcgacgacgacgacggcgatgacagcggctgtgatgaaaacgacaacgctgtgatgcaagtagcggcggtgctctcttcctctatcctccgccatcagcagcaccagtataccctgggacgcctaccgacgtttccagcagcaggaatgtcgtag

SEQ ID NO: 18947 - DNA, 385 bp, Oryza sativa
  Clone ID: PAT_MRT4530_24456C.1
gcacgaggcacattctcacactcgtactgcagcgaggtggttggggactagagcgatgaccgatgcggtcgtggactcatgttggcttgtgcctggactccgccgttgccatatggctcctgtagtccgtccccttcgccgaggtcgacgcccccctcgcgtgccgcctgcagctggcgggaaattcctcttccagttccagtgtggcccagcgaggggactgctgtcgctgatctatctgctgtagccctcgcctttcgccgcgtaggaaaacagtgccatcctctacggtgaccagaatttctaaggctgctatatatggatcaaaagtcttatctttgttttcgcgtacaatttggtggaacagttaattccaatggccaag

SEQ ID NO: 18948 - DNA, 475 bp, Oryza sativa
  Clone ID: PAT_MRT4530_24457C.1
ttaatcctattagttgaaatagcttataaatgtctgccctgttaacctattcaatgatttatgattctatgttccatggaaaaagatccgtatcaggatttgctgattaggtgttgatatgtgacttggatatcaatgtttatttgtggaactgactgtgttctattcaagtagagcactggcatattatcaagctgacatgcaaattgcgttggcgtattaccaggccgacatgcaaagtgcatagacgagccatcgtagagttcacatgtagtttgcatgtagtactgtaacggctaacagagtcatcataaagttcatagacgattttggtcggaaagacaagaaaatgttaacggctacataaatgaaatggtcaaactagaatgctagatggtccaaaatttgcctaggatgcatgcttgcttatcaatacacgaaagattgcttgccgtatttatgaaattccatattt

SEQ ID NO: 18949 - DNA, 409 bp, Oryza sativa
  unsure (1)..(409): unsure at all n locations
  Clone ID: PAT_MRT4530_24458C.1
ggcggcgagagctcggctcctccctcgcctcttctcccctccaatcccggtggcagcggcggcggcggctccgcgacaaggaagggcggcgggagcttggttcctccctcccctcttctccccttcaatcccggcggcggctaggcgacaagtgcgggacaagggcggcggctcggcaacggcggctcagcggcgacgacgacgacagcaacaagggaggggccttggcgactttaacgacgaccgcaacgacggagggcctcgtcgacaacnacggcgcgcggtggacggcgacgagcggatccggcaacaactccttcatccaccgggcaacttcatttcgccccagcaactnttaaccttcccgcttgtccctagcaggaagacggtgnggggatttccgctccgt

SEQ ID NO: 18950 - DNA, 1214 bp, Oryza sativa
  Clone ID: PAT_MRT4530_24459C.1
ggcaaaagcccataggcccaaacattataccacaccattttcagcccaatcatattatattcatttacattagtatcaaataacaagagagctaagcccatataggcccaacaatcaaacacagtaacaaccgatacagcacacaggttacaaccctattagcatccatcggaacccgacaaacattcaatacaacacaaaatttacaacccagaatctacaacccaattaaatgtaaccatacagaatttcacccgatgccgcgtgaccaagatcttccaggtgagcttagcagcacttaagttttgtatcaggcagcaatcttgttttgatttgcaaatcgaaacatcacccccaaaaaagtaaccgtcggtaggcgtcccagggtatactggtgctgctgatggcggaggatagaggaagagagcaccgccgctacttgcatcacagcgttgtcgttttcatcacagccgctgtcatcgccgtcgtcgtcgtcgcagctaccatcgccgctgtcgtcgtcgttgcagccaccgtcaccgtcgttgcgaatctgcgtgctgccggcactcccgctcacgccagggcactcccgaggacggaggccgctggattcatgcgccgccgtcgctcccgacgacgggaggcggcagatccgcgcgccaccgtccttccctggctaggggagcgaggcggggaagggtgaagaggtggctgggggcggagatggaggtggcgcggtggatggaggaggtggtgccggatccgctcgtcgccgtccaccgcgcgccgtcgttgtcgacgaggccctccgtcgtcgcggtcgtcgtcaaagtcgccaaggcccctcccttgtcgctgtcgtcgtcgtcgccgctgagccgccgttgccgagccgccgcccttgtcccgcacttgtcgccgagccgccgccgggattgaaggggagaagaggggagggaggaaccaagctcccgccgcccttccttgtcgcggagccgccgccgccgctgccaccgggattggaggggagaagaggcgagggaggagccgagctctcgccgcccctcctctcgtcaccgagccaccgccggattggacgggagaagcggggtgctgccccgatcgcaacgagccgccgccgctcggtctcagccggcgccccgatctgaggagaggaagagggagatggagagggagaggatcccggccgg

SEQ ID NO: 18951 - DNA, 1076 bp, Oryza sativa
  Clone ID: PAT_MRT4530_2445C.1
tctcagcgggtacaccatctcttcattccgtattgcttgtcgagatccaccaaccgttctcgagtgatcgagaaggcgcagagtatggtctttcatctctaaaggatccgacaaggccttatccgctctgggcgtccctagccaaagttcccttaggttcctcagaggccttgtcaagacggcgtaaagggacattaggataggtttcaacgctatgtgtctttgtggtaagggatctctggataaaacacttggcgatattgtgtacctgatatcaactttgttgaagtagaggtaatgggagaatcgctacacctctagtcaagaaccaggtagtagtcgtaactcaaccagactggttgagaaccaatgggtaggtgtctctcgatcatttgaagtcgtggtacgaggatcgctgcgttattgctgtagtcgtacctcgaccatctgaggttacggtgcgagggattgctacgtactggttcgaggaccagtgaacgagtagaattatctctcgaacaccaatggaggttgcggtgcgagggattgctacgtaccggttcgaggaccatggttcgagaaccagcgagcgagtagaatcatctctcgaacaccaatggaagttgcggtgcgggagattgctacgtactggttcgagaaccagcgagcgagtagaatcatctctcgaacaccaatggaggtttgcggtgcgggagattgctacgtacctttctcaaatagtccagccacggccggtgctatgagataggtcatcggtcttcgttggtaggttaggcgcgacgactctgcatttgtcgagatcgttctcgataatgcggtgtacttgaccataacctactcgagtgctcaattgtttcctgaaaaatattttatctgacgatattgaaccattatccttcgcggcgatgatatcttggagcttgattgatctcgccggatcgaatagttgatgacgatgattccaatctcgtcgggagacatactctggccgggttggatctccctggtccgaagtcgtcgagtagcttgttgaagaatccatctcttgaatccat

SEQ ID NO: 18952 - DNA, 366 bp, Oryza sativa
  Clone ID: PAT_MRT4530_24460C.1
atgatgagcggtcgacgaaggcagaaagcggcgattcagttgatggaatctgggagaattagagaaagggagcggccgttcgacccctccacgcggtccaaggccctcatcatttctacattaaatccacccctgttaggtcgtgcatcccacgaacggacacagcccgattcggcgtgtaggtcggaccatgtcggcatgactgatctcacggctgggcatggtccatggggctcacctagaagcatctgccgacgttccgtgtttgtgaagaagagctggtcaccgatagcaagaccccttgcattaattaagtggatagtcagtggccaggtgcagcatctgaaagccgtcttgaagaagtga

SEQ ID NO: 18953 - DNA, 330 bp, Oryza sativa
  Clone ID: PAT_MRT4530_24461C.1
atggacaatcctaaccgtggtcatgaacatgcccatcagccttcagggcaacaaaccaatgtttcttcctatacttccccaactgatctggttttaggtaaccatgtgaatggatctgattgggtgaactcgtcactttcggtctttcttgaacaacatcgtcttcaacttgatcgtgctctacaaacccatatatctttgcacaatgcaactctatcagccattgtggactctatgattaccaccgcactaaaggaaaaggatgaagagatagctcgtttacacataatgttgaaccaattgcaagagttgataataaatatagagtag

SEQ ID NO: 18954 - DNA, 497 bp, Oryza sativa
  Clone ID: PAT_MRT4530_24462C.1
ttctcccaccgattatggttcctcgtacagttaacaatgggacttcgggagtcactaacgacaacaacacacatcgtggtgtaacagaatcatctactgaacgttatggaagaggttcatcttttggttcacatcattctcgatactcctctatgcacaatcagtatcaacaaggacttcaacaacaacatcatttaaacgctttacagagtcatcatccttccactgctggtttaaatgattctatgattttgggagatgattgtggttcagaaccaaatagtttagctgccctcctagctcctccgtctaagcagcccagacaacatcttgctacagatgctgtaacagctgctgctctagccagaggtgatgcacttgacgcgtatactgttgcgagtcgagcaatagctggtttagaaaatgttggaaatgtactcggtggaacgcatccaccgtgtgtgagccttcgagagtgtggtcatatttacaccttg

SEQ ID NO: 18955 - DNA, 345 bp, Oryza sativa
  Clone ID: PAT_MRT4530_24463C.1
atggatgccttaatgcatgcgaccacgatcagggactggcagggcctctcctgcgatcgggacgccaccggtcgcaggatcgagacggaggcggcgatcttgttgggtctctcgccggacgccggcgaggtggccgaggaggaagaggatccgttcaccttggctgggagaaggagcgtcgcggcaattgatgagggaaaaggaggcgatgtgtgccacctccaaatgatgacccatacgaaattgtcaataggcaagtacaagatccacccactgtccgcattggagaagaaatgtgagggggcagcagcagcagggcgagacaaaagaaccaaggagagttag

SEQ ID NO: 18956 - DNA, 1107 bp, Oryza sativa
  unsure (1)..(1107): unsure at all n locations
  Clone ID: PAT_MRT4530_24464C.1
atggcggcgcggcggtggttcgaggtggtggacctgaggctggcgctgcatgggttcctagtgttcgaggtgtcgtggagagacgtgcacggcatcaactacctgaacgagctgctgacggacacgtcgttggcgctggaggcgaggtacatgaagaaatgggagttctacagcgcggagcaggcggccggctgcaccaagctctggttccttggccgcgcccccgaggctgaggcgctgcgcggctacctcaccaccctctactccctgtcccaagacaacgtcgttgataacgacgacaaggacaacaataatattaatactagtactagggaaccaaaggancggncccggcccttttgggcccccccgggaaattggaaagctgagggagatatcatgtcggacatccggctgctgacgctgctggagtctggcctgccgtcgtgggtcatcttcctgcagtcgtacccgctgctgtgcctgctatacaggccgtggatgaggcccctggcgcggacgctctacctgctggtctccctggccaccgtcatcatcggcttctacgacctgtacaagaacgtgccgctgctcaaggccgcggcggcgcgcgtgtgtgggccgctcttcggctggatcgagacgtgggacatggtcacccggatccagtacctgggcaccatcctcttcctccggaaccacctgcgcaagtgcctgcaggggatggtggccctgctgcgcatggccagggcggtgctccgtccgctgtcggctccgctgtcggccatcgcggggcccctcctggccgcctgcggcgaggtatgcgagctgctgggcgacctggcggaggcgctgtgggcgcccttggacgccgtcctggactgcctcaacccgctggtccaggcgctgctccttccgctgcgtttcgcggcctctcttgcttcctgcgcgggctcgctgctctccaacacctacaacttcggcaaggacatctgggagacggtgagcagcatgttcgagctcaaccacatggccgaggcgcagcacagcgccttcgacgtctccttgctcaagtctctctggaacgatctcttctcccaggcatag

SEQ ID NO: 18957 - DNA, 1200 bp, Oryza sativa
  Clone ID: PAT_MRT4530_24465C.1
atggcgtacgcggccttcggcgccgcggtcgcctacccggcctccggcgctccggcggctctggcgctcgcgttcgtcctcggctacggcgcgctcctcttccgtctcccgttctccgtctacgcgctcgagttcctgcggcaggagttcccgatcgcgcggacgccgctgtccgtccaggcgtgcgtcgcggtcacccccgtcgcgctctccgtcgccgtcctggcggtgctcaaccaagcgagggccggcggcggcggcgacgtcgccctcgccacctgcgtcgtctgggccgccgacgtagccgccgtcctgtccctcgcgtggtgcctcacgcacggcggcgccctcgccatggctctcaccaggaggaaacagtacgaggagagcgggaaggcactggagcggatgatgaaagggtacaatcccaaagaccccgccgcggtcctcttcgccctcgacctgggcgagatccgcgatgcgtccgtccgcctcgcggcggctgtgtcggccgcgtgcgcggtcgctggcggcgtggcggtcggcggcggcggcggcggcatgtcatacacaggtctctcctatgccgccgcattcttcgcgctcccaatgctgtgcctctcgtacttccagaagacgtgcgcctacccggtggacatgcccaagcacctcgccgcctacgaccggccccacctgaaggtgatccgctatgcctgcgttcgcttcgtggccgccgtgtcagccgcaagcgcgatagccggcggcttggtcgtcggcggcgtgtcttggataggcctctcctacgccgccgtcttcttcgcgctccccatgtgcctcctctacttcagggagaagtacggtttctccatgtccgatatgcccagcctgctcaagtggtgcaacgtgtcggtgcctatggcggcgctagcgctgctgttccgcctcgtgacggcggcgcggcaggcagccgcaccggacgttaggctcgtcgccattgccggcaccgtgtgggccgtagacgccgctgcgattgggtttctcggctggcgcagcacgagggagatggccaagcccatactacgggcgaacgcgtcggagattttcacgtcgttcgtgatggtttgcctacgatactggctgtatctgcacgttttctatatccttggcaacggttcacagagatggttcaattcattatag

SEQ ID NO: 18958 - DNA, 3233 bp, Oryza sativa
  Clone ID: PAT_MRT4530_24466C.1
atggcggcggcgagggcgccgtggctgtggtggtgggtggtggtggttgttggtgtggcggtggcggaggcggcctccggaggaggaggagggggagatggggaggggaaggcgctgatgggcgtgaaggccggtttcgggaacgcggccaacgcgctcgtcgactgggacggcggcgccgaccactgcgcgtggcgcggcgtcacctgcgacaacgcctccttcgccgtcctcgccctgtctttggatattagtgaggctatcttgtttgttatgctaaaaaggatttttgtgatgagagtgtttccctgtgtgaaaaacaggaacttgtcaaatctaaacctaggaggtgagatctcgccggccatcggagagctcaagaatctacagttcgtggatttgtctggcaacttgctgtatggagacatccccttctccatctccaagctcaagcagcttgaggagctgattttgaagaacaaccagctcacgggacccatcccttccacattgtcccaaattccaaatctcaagacattggacctggcacagaaccagcttacaggcgatatcccaaggctcatatactggaatgaagttctgcaatacctaggtttgaggggtaactcactgactggaactttgtcacctgacatgtgccaactgactggcctgtggtactttgatgtaaggggaaacaatctcacagggaccattccagagagcatagggaactgcaccagctttgagattctggacatttcgtataaccaaatctctggagaaataccttacaacataggctttcttcaagtagccacactgtcacttcaaggaaatagactgactgggaaaattccagatgtgattggcctgatgcaagctcttgctgttctatatttacatgggaacaaacttactggagtcataccgccggagcttgggaacatgagtatacgtagctatggaaaatggtttgataatgaattggtgggcacaattccagcagagcttggcaaacttgaagagctttttgaactaaatcttgccaacaacaatcttcaaggtcctattcctgcaaacatcagttcttgcactgctcaaaacacagagatgtcttatggctccaagatcctgcgcgacgagaacttcgaagcgcacctctcagattgcggcatagccaaatgtgtcccctctgccaagtcccatgcctccacttatgtgctaggaaccatcatcatcaacttggacacattggatctttcctacaatgaattctctggaccagttcctgctaccattggtgacgtccttctgcaattgctcacgaataagaaggccgtcgacaacgaatcgaacttgcatcaattgatactctccaaagctgatgccaacacagtcatggaggcaataacaacttatctggtagtctgcccgaggaacttggacaacttcaaaaccttgatagcctgattcttactaacaacaaataggttcccttcagaccggccgaccatgcacgagcttcagctggtactgctctccttgctgccggcctcctccattgcaacgcccaggacggtggactactccccggttgctggcgtcaacgatcgtcggtaatccattactgcatgtttactgccaagattccagctgtggacactctcatggacaaagagttaatatttcaaagacagcaattgcttgcattatcttaggctttatcatattgctctgcgttctgctgttggctatatataaaacaaatcaaccacagccacttgtcaaaggatccgataagccagtgcaaggacctccaaagctagttgttctccagatggacatggctatccatacttacgaggacatcatgaggctgacagagaatttgagcgagaaatacatcattggctatggcgcctcaagcactgtctacaaatgtgaactcaagagcggcaaggccattgctgtcaagcggctttacagtcagtataaccatagcctccgagagtttgaaacagaactagagacaattggcagcatacggcacaggaatcttgttagcctccatggcttctcgctatctccacatggaaacttgctcttctatgattacatggaaaatggttccttgtgggatcttctccacggtccatcaaagaaagtgaagctcaactgggacacaagactgaggatcgcggtcggagctgcacaagggctggcctatctccaccatgactgcaaccctcgcataatccacagagatgtcaagtcctccaacatcctgctcgacgagaacttcgaagcgcacctctcagatttcggcatagccaaatgtgtcccctctgccaagtcccatgcctccacttatgtgctaggaaccatcggctacattgatccggagtatgccaggacttccaggctcaatgagaaatctgatgtgtacagcttcggcatcgtccttctggaattgctcacagggaagaaggccgtcgacaacgaatcgaacttgcatcaattgatactctccaaagctgatgacaacacagtcatggaggcagtggactcggaggtgtcagtgacgtgcacggacatgggactggtcaggaaggccttccagctcgcccttctgtgcaccaagaggcacccttcagaccggccgaccatgcacgaggttgcaagggtgctgctctccctgctgccggcctccgccatgacaacgcccaagacggtggactactcccggttgctggcgtcgacgacgacggcggccgacatgcgagggcacgacgtgaccgacatcggcgacaacagctcctccgacgagcagtggttcgtcaggttcggcgaggattgcccaaagattgtccctaggaatttgcagtgattttttccaaacctccaaaattttctcctccccaagatgctaaaaggatagtagcacagtgcaggaaatagtagctagatgtaggatctgaagttagatgaccatgatgatgatgttaatgccattgttcttgactcttttttcttcttggtgttgatctaggattgcccaaagattgtccctaggaatttgcagtgacatactagtgttgttcatggtattcaagagagagtgagtagatcagtgtcaggttcagagatgtttcgtgagcgccatgaagtcgccgtctttatgatgtaatatattttgatcagagaggcagagggaggccctcagtttttgg

SEQ ID NO: 18959 - DNA, 453 bp, Oryza sativa
  Clone ID: PAT_MRT4530_24467C.1
gtacataactgccgtgagcagcacatttagttatgtcaataaaaacaaatactgagatgtgcaatttccctattccctgaaacatcattctacattgggccatacaaccacacatttcctaaataaataagtagtttatgttgcatgtttcgaaaatgtaaaatatgcacagactagtcttactgattcctctgagtacaggagaaaacggttaaatggtcattattacaaccaaaatgtaacatcaaccttttagccatcagcaggtaactgctctaactgctcttcctcaagctccattttagataggtagcattctctctcaaaaagcaggaattcctgcaactgctgttggctgaacaaatgcattattccagattccgatgaagcaaccaactcaatgagcttatcacaatgatctagagaatcacctgcttcagatagagcgatgga

SEQ ID NO: 18960 - DNA, 491 bp, Oryza sativa
  Clone ID: PAT_MRT4530_24468C.1
tcgtttctcgcaagtgtctgccaactgtatctgtcaatggcctatccactggttcagtgtggagtattgcctttggaatccttgttgccaaatgtttgcaatacaaacctgtgaagaaagagttagtggtgataatgccaacttttggggttcagctagaaatacatttttggagtggaagagtacatcgtcgttttgtgccaattggtaagattttgaagccattgctgaatgagtgtgtgacgccggtgacctgttactggagcttggcattgcttctgcgtgatgaataggaacttatgcttgtttttcagaaattctacccttctgtcaaaatgtttggttcctgactggatggctttttgaaactcctaaactttggatgcctaatcagtctctgatgttcttgaatcgaaccgttctgaaacatgatccatttttgtgctcatttttgtatgattgtaatatttgataaaccagctatcatttac

SEQ ID NO: 18961 - DNA, 2454 bp, Oryza sativa
  Clone ID: PAT_MRT4530_24469C.1
atggcgatggaggaggaggaggccgcagcgtgcgagatcgcgcgcctgccggaggagctcctcgtcgaggtgctctccctcaccggcccacgggacgcgtcccgcgccgccgccgactccgacgccgtctggtcccgcttccttccccgcggcctcccgcgcctcgccagacgcgagctcccccgctcgccgccgccgccgccgtccaggaaggcgcacttcctccgcctctccgctggaccccttctcctcccacgcaaactcatgagcatgtggttggacagggagaagggcgccaagtgctacatgctctcggccagggcgctgcaaatttcgtggggcgattcgccgcagtactggagctggatccctctcgccgattcaaggttcaaagaaggtgctgagctcttatctgtttgctggttggaaatccgtggcaagttaccgggcaagaagctgtcacaaaacacaaattatgctgcataccttgtctacaagatagctgatagatcctatgggctggatttcccattccaggaggcatctgtcagcatcggaggaagcataacagcccgccaagatatagagaaccctcagaaaagggctgacggttggatggagctgaagctgggtgagttgtataatgaggaaggtgacgatggtgagagtatgtggttggacagggagactggttttaagtgctacatgctgtcggccagggcgctgcagattgtgaacttaacgcatagctggcgctggatctctctcaccggcagctccaggttctcagaagttgttgagttcttaaaaggataccgtgtggaggtctgcggcaagataccttgcaagatgctctccggaaactcaaattatgctgcttacattgtgttcgtggtagctgaagattcatgtgggttggcttctgtgtgggttgcaaccgtcggcgtcgggggacgccaatccactcgccaagtttgcttggacagctccaaccgcaatgactactactacgaaggcgagattgaggtgcctcaggatgggagtgtgattctccctcaggaaagggctgatggttggatggagctggagctgggtgagttctacaaccaagagggtaacaaccagggtgagggcatctggttcgacagggagaccggggccaagtgctatgtactctcggccagaacgttggtaattaagtgcagcgagacgtcggattaccggcgctggatccccctcgccgactcgaggttcgcagaagccgttgaattcatggatgctcctccccggatggaaatccgtagcaagatagacagcatggtgctgaccccaaactcgacttacgctgcgttcatggtgttcaagatagccgatgggttgtacgagctggacacttcaccacacgatgcgacggtcagcatcggagagaatgaatcgagacgcgaggttgccttcacaggaaggtaccctgagagaagagctgacggctggatggaggtggagctgggtgagttcttcaacgaggatggtgaggatggagcggtgtacatgagattgatgagtgaaggacctaaccggatgagaggcccgggaaaaaatcatctactcctggagcgtggaaaatttcctcgagtggaggcggcggcgcaacgaagacgtgacggagggggcagcgcgcggtgcgacccggaggcgacggcgacggcgacggcgacgacacggctctctcctccggccgccaccttgtctccatcatttcctaaagccaagaagtttcgcaccaaatctttccctctatttgaggccttgggagaactttacgatgaaggaacctacaatttcacctcaactgagccattgcaacatccaatcattactcaagttgagagtgatcaagatgatcttggtaacactgagattatatttccagattatgaggacaccttgacttatcaagtacaagatgatgcagatgcaactgaagatgataatgcaaatgctgaaaggcttaaagagatgccgcatagaagggttgttgctgtaccaagaaacaaagaagaaaaagaacccaagaggcaaaagaagagtgttggtgtagaaggacttatggaaaggtaccttgatatgaggaccaaacaaactgaagatgaggctgcacaattagcaagagaaaaggaggctcatttagcaagagaaaaggaggctcagttagcaagagaaaaggaggctcatttagcaagagaaaaggaggcttatttagcaagagaaaaggaaagtaatgatttttcaatcaagaggtgcatatctgttctgaattcgatggatgtgagaaaggcagaaaaggtcaaagcatataccgtcttcaagaatgcagagaacagagagatttttgtgagtgcttgtgatgaggatccagaatctgccttgagttggttaagaagtgagatggcttga

SEQ ID NO: 18962 - DNA, 141 bp, Oryza sativa
  Clone ID: PAT_MRT4530_2446C.1
atggctaagatcctgaaagtctggactttggattcatcgacaaaagtggctaacatcgatcgaccaatcgaggcgtggcccatgctgaccaatggcgttgccgcggccaccatcttcaccgtcaccgacatctcctcttag

SEQ ID NO: 18963 - DNA, 408 bp, Oryza sativa
  Clone ID: PAT_MRT4530_24470C.1
ttccatgctgaaactccggtaatcgcataaaccaacagaatatgtggacaaacatcttcaagcttggggagctccaaaatgtatcgtggtttcagtttcttcctgttgaaccagatccaagtacagcttctgagagaagttcaaaagctgagcagaaagatgctcttaacaacattgtgctgtcagcacatcttcacttacagagtgaaggtttcttaagtacttggacaaattcctttgttggtccatgggatccatcccaaggagagcataaccctgatgagaagaacaagcttttgttgtttctttctggccgtcactcgtttgtacctgaaatagctcagcatgctgtagccaaattaagagttgtttcaaatggtttatgggtagccccaagcaacttggaag

SEQ ID NO: 18964 - DNA, 648 bp, Oryza sativa
  Clone ID: PAT_MRT4530_24471C.1
atggcggcggcggcggagggagcgagctgctggtggaggatggagtgcgcgagggagtggaaggcggggcgggaaagggaccagatgaaggccggggcgtcggtggaggcgatgacctcggagaggagcgggaaaatcggaggaggtcgctccggcaacgacgcgacgtcgttggtgagcgagaagacgtgcgtgcgcttcggcgctgccgcccagaacggaagcaggagggaggaagagagggatgtctggggttaccttttggcgagccgagggagcgtcggctccttcggtgtcgtcgccgccaccgccgctctggagaagggggagaaggggggttggatttggaggaaaaggaaaaggcggcgatgggaggaagtcggaacgaatcgaggctgccgccgtgctccccttctcccgtgtcgccgtgtttcccagctgcagctgccgccgccgggcgccggccgccgtcgtgttgctggccaccgtcgcggcgccgccgctctcctctctcccgcctcgcctgccggcctcccgccgcttgcctcgcccagaaagagagacgaggagaaagaggagggtgatgacgtagattacgctgacatgtggggtctacgtgggtcccacgctaactcagctgccacgtag

SEQ ID NO: 18965 - DNA, 319 bp, Oryza sativa
  unsure (1)..(319): unsure at all n locations
  Clone ID: PAT_MRT4530_24472C.1
cacacgcccgcgaaagctaagatcctatagacgcgcccctctttttttttttttttacaatattttttacncaactccaacacatatagtggcacttcttcaaaatacgaggtaaaaacacattaatacattcatcctatatacccatccacaccacttattttgacacactataaaccaacacttcatagaaatttaagcaacacaagcttaactcactaacccaaccttaaatctctcactattcaaaactctaacactcttttaaaaaacatcaacatttctcataccccacaaaacaaaatattacatacacaaa

SEQ ID NO: 18966 - DNA, 388 bp, Oryza sativa
  unsure (1)..(388): unsure at all n locations
  Clone ID: PAT_MRT4530_24473C.1
tccctggcagccgttaccgggataagggccattncgatgcagttgnccgaagttcagcccagttggcttatntctcttccatgctattggcggaaagctctgtgggccagcntggagaaattgaggaaactagattcttgtttcttcttgtatacctcctgtcatgacatgaaggagagtcctancatttcattctacgagatgagctgaacaaactaactggctattgattaaacttgataaccatgtaattatattaaatatttcctctgtcccaaaatatagctatttctggccacctggacaagtacttgtctgttgctagtgctctggttctatatatgcaaaaatatcctccttagtgtggggctttgtaaaaaaaaaaaaa

SEQ ID NO: 18967 - DNA, 299 bp, Oryza sativa
  Clone ID: PAT_MRT4530_24474C.1
cttctgtctgagccgtaagaggctgctatcccaccaaaagattcaggcgctatagccttgagtgaccgaccatttggttgacttgctgttcagctagttcctcgtggttggccactcgcaggggacgctggggcacaactgtgcacactcttggacatgtgtcgatgcagttggccaagtttccaatggacacttagctggcgagcagccaagtggagatcatctttatggtgtttttgaccaccaagtaccaccagcactcgaatagcatacgttcgataagcatttataatggcgaa

SEQ ID NO: 18968 - DNA, 1552 bp, Oryza sativa
  Clone ID: PAT_MRT4530_24475C.1
atcgtgtgtgtgtgtgtgctcatgcttgctcaacattcagagagagtaccgagtacgtaccaatcgtacatatcgcaagtcaagaaggaacgttctctccaccttcagcaggcacgatgctgtagcctttgtgcgcttccgccggcgccttggtgtactgctcctggccaccggcgggagcgaggagtgcgtcgccggtgacgagaagaacggcggcgagagcgacgaggagagcccttccggtggtgctcatgttgtcgttcgtcagcttggtgtgccagaatgctctgagctcctcagcaaatcccctctccctgccgaaaaccaccgtcttgtggtcgcagccttccatgagtcggagctcggcgccgggaagcttggccttgaggtggcggccgcactccgccggaaccacctgatcgtcgccgccgtggatcacctgcaccgggacgccggccgcctcgacggcctccaggttcctgtcctgcagcatggccccaccgcagatgacgttgtgcatcgtgtgccacgccgagtggtgcgtgtgcttcgtcagatcacccagcagaaagtccacatccctctttcctgtgatgagcctgaagaggcgctcccagagcaggtgatttttgcagaccaagaagcagacagtcctcccaatgtgctcgtaccatgacatcactgcggatccgaactgcaatggcggccacagcttcttctccgccagtctcttcagtgccacttggctcgccttctcttcgcatgctccgaagtacggcggtgcaatcagtgtgattgatctgactcgttctgggtgcttggcagccaatgcgagggcgatgatgcagcccatggagtggctgacaagatggaaggagctcaggttgagtggatcgatgaggctccgctcgatcatctcgacgtgatctttcagtctgtacatgcagtttgccggcttgggagacttgccgaagccgaggagatcgaccgccaacattctgcagttgttgaggatggatgattcgcggaacactgttgcccagaacgacgatgacgaggtgaagccgtggatgaagatggcgtcttcttctccactctgctgcgtcgttgtcactgctccatcgtttggcggcggcggcggttggttggcgacgaagtgcagccggccgtcgtcgtggcgctgccatgcgcggcacgaatcgcagccgcagtccgaccacctcgggctccgccccttgcgccgctccgtctccgtctccggcgagccgccgctcctgcctctgacgagccccatcagcgcgtctcggagagcgctccgccggtggtacaatgtgtcggagacctcgtcgtcgtcgtccagcgccgccgcgctgtggctcccgtggcagtagcagctgaccgggctgtcctcgaagacggcgtcgaggaagccgtacacgaagcagaggagcacgtcgacgacgtccaggaacgcgaagacggccgccgcgaaagctgaggagacggctctcggccacgcggaaggcgagacgatgaccgcgaacgcgagcat

SEQ ID NO: 18969 - DNA, 526 bp, Oryza sativa
  Clone ID: PAT_MRT4530_24476C.1
gccgtcgccgtcggccgtcgtcgcccgtgtccgtccccgccgcgccgcgacgcgacgcgacattctcggactggcactagccatgatctagtggaggcaattttcgttattgcagctgtttggtgggttgaatgaatgaatgaataaagaatgatcaacctgattgatttgagcgccggagccagcgccagggttgccacaagagatggttccccagtgcgagaaactcaatcggaacggaaggagtatgctgatctcaagacagtgactggcagcgtgcgaaggagctcgtcagatagatcgtgtggtagtggtacacccatgaaagtgctgatagcgcaggagatggcgaaggagggggacacaaatcagaagaccactagtgttgtagctaagctgatgggtcttgatgatgatgcagcccttcctaagcctgttcaacctttcacaacaggaggagatttccagatggccatttgtctgctatgttggcacgagttaataaccaaatgtcgtttgacaacca

SEQ ID NO: 18970 - DNA, 131 bp, Oryza sativa
  Clone ID: PAT_MRT4530_24477C.1
agaaaaaaaaaccggggtttatcaaaagaaattttcccgggaaaaaagaggcttaaaatttaaaggggtttttcagcattttacaaacttacaagagggggcaaattatacaaggcccaacctatttttaa

SEQ ID NO: 18971 - DNA, 354 bp, Oryza sativa
  Clone ID: PAT_MRT4530_24478C.1
acatcgcccgatctcgacatcagagattagactaaacatactccatccggtacctacggaggccggcaagagggatctagctctatctctgatctcgacaagttcacgctagaggaggaagactaccctgtcgtcgactactagttgatgaataaagagcaacaccggcttcggccaacaggatgtagggctattacctgtcagataaggggcccgaacctatataaaaatctctgtctccatctcttttacctcaatctcgcatataccctggtaccaacgatccccataccatccaaataccgtagtcgtgatctcaaacgtcgacaatggcaccagtggcggacgcaggat

SEQ ID NO: 18972 - DNA, 2166 bp, Oryza sativa
  Clone ID: PAT_MRT4530_24479C.1
atggcgcaccatgcacaggagtcaggaaggggcggcgctcaggagggggcggcgttgggaggcggaggtagaggcgacggtgcttggggggcggcacggcggcggcgctcgggagggggtggcacggcggcagcgcacgggaggggtggcgcggaggggcggcgcggcggcggacagatgacggcgcgacggcacacgggaggggtggcacgacggcgcggcggcgcacgggagggagcaggcggcggcggcgcacgggaggggcggcggcggcacacgggaggggcggcgcgtgggtacccgttgggcatgcccgtgcccgtcgggcatgggcacgggcatggagttttgcccgatagagctggcgggcgtgggtcgggcacgggcatgtgggtctcgggtcgggcatggaatcgctctgcccgtgcccgacccgacccactgccatccctaaggtttggtagcacccattcgctgcctttcgccagagatcaattcttggcgagtgaagtcgtcgacggcgagtacatgctctaccatcttcgccgacgacgtcacctcctcctccgcgaccgccatgtcgtccttcctttcgtctccgtctccgggcgcggtgcggatggtgacggcgaccccagaggagcacggtcggaggaagtgggggagccgcggcggccggagatggaggaggtgaggcgcatacccagtggggtagcgcggtggccggcggccggaagaagaaagaggaggcgtggttggaggaggaagggggagcggcagccaccagaggaggggagaaggggggaagagcggcggtcggagatggaggagagaatgactttcacaaagaactgtgaaacttgtgcttccaagaaccccgcgccgccgcagccgcagccgttgccgctgtcctggctgtcgccgaggcggcaatggcggtggcggagcgactacggcgacgccgacgccgccgaagaagaatcaccggcgccgctcgtcgaggacggggtatccggtggaggggagaagaagagcttctgggcggcggtgagcctcatcgtcggaacggcggtggggccggggatgctggggctgccgtccgccaccatccgctccgggccggtcccgtccacggcggcgatcgtgctctcgtgggtctacgtggtgtcctccatcgtcctcgtcgcggagctcagcttcgccgcgatggaggacggcggcgtcgacgaggtcagcttcacgggacttgcgtcgagcaccttgggggcgacgctcggggcggtcgtggccgtcgtctacgccgccctcagcttctccctgctcgtcgcctgcgtcgccggcatcggctcgctggtgtcccagctcttcccggcggtggatccggccttggccaacgccatcttcccgtgcttcgccgggacgctcatcgcgttcttccccttcaaggccgtcgacggcgccaaccgcgcgctctgcggcctgatgctcgcctccatcaccgcgcttgttgtcaccggcgtttccgtcggccggagcagcatgctgagatcgctcggctacgcctgctggcgccctgctaccatcctgcctgcaattccggtgaccgtcctgacgcttgggttccatgtcatcacgccgttcatctgcaagattgtgggggattcagtgtacgatgcgcggcgcgcaatactgatcggcggtgccgtcccattggccatggtgttgtcctggaatgccgtcattctcgggttggcaagttccagtggcggtgcgagattcgatgatccaattaagctgctgctctcggtgaatccagcagcattgcctgccgttcgaggctttgcgtttgccgcattggcgacgagcttgataggatacgcggtgagctttccgaagcagctggctgatacagtggagttgattgggcagaggttttctccgaagcgaggaattgggcagctctctgaatctagcggtggccatggaagaaatggggctattctcacatggattgtgctgattattcctatcgttattgcgtcgttcttctcagcggccttctccaaggcactggattttgctggggtttatgcaaactgcttcctttttgggatcctccctcctgtcatggcctggattcaccggtcacagaagagaaagaggtaa

SEQ ID NO: 18973 - DNA, 429 bp, Oryza sativa
  Clone ID: PAT_MRT4530_2447C.1
ttttggttttttatttttttgtttttttttttttttttttttttttttttttttttttttttttttttttttttttttttttttttttttttaaaaaaaaaaccgggcttttaaaaaaaaaaattccccgggaaaaaaaacgcttaaaattaaaaggggtcttgaccaattaaaaaccaaaaagggggggcaaatataacaggcccattttttaaaaaaaagctggcgggggaaagggaaccttttttaacccgggaaaaaaaatgggtttaagaaggaaaccttttgccaaaattaaaggggaaaaaaaatgggggggaggtttccccccctccaaaaaaaacacggccgtttgaacccaaaacgggggggggattcccatgccccgggaggaccttttggggggagggggtcctgccggactagggg

SEQ ID NO: 18974 - DNA, 3509 bp, Oryza sativa
  Clone ID: PAT_MRT4530_24480C.1
cgaattgggtaccgggccctgcagtagttgcatcagtgacgaagggttctaatgcctttctgtcccgcctcgcattaattctttggcttggttggatgcgagagaaaaaagaggagagattttggtagaattgtaagatttttgttactactaccactcgttttcttggcttggtttggtttggtgtttgatcacgcggtggtgacattataagggcgcggttgcgcaggtgttcgaccagcgggtggcgaggtcggcggcgaggtggtggtggtgcgcacatgctcgaggtgctggacatggcgccgccccggcaccagccggcagctgggaaggcgggcggcgggcgcgggcatgggcatgggcatgggcatggtggtggtggtggtgggccggcggcgaggaagcagccgttgcagagtagcatggcgcagcccaaggcggagacgccggcggcgacggcgccggtcgcgccgccggagggagggacggagtgcggcggcggtggcgggaggcggcgcggcgggcgcgggcgcggcggcagggcgggtgcggggccggggccggggctggcggcggcgccggccgtggtggtggcgcccgcggcgcgcgccgtcattgggccgccggtggcgagcaaggggctgtcgttctgccggcggccggggttcgggacggtgggcgcccggtgcgtcgtgaaggcgaaccacttcctcgccgagctccccgacaaggatctcacccagtacgacgtgaagatcacgccggaggtgagctcccggagcgtgaaccgggcaatcatgtcggagctggtccgcctctaccacgactccgatctcggaggtcgcctcccggcctacgacggccgcaagaacctctataccgccgggacgctcccgttcgacgcgcgcgagttcgtcgtccgcctcaccgacgacgacgacggcaccggcgtcccgccacgggagagggagtacagggtcgccatcaagttcgccgcgcgcgccgacctccaccacctccggcagttcatcgccgggcgccaggccgacgcgccgcaggaggctctccaggtgctcgacatcgtgctccgtgagcttgccaaccgcaggtatgtctcgatagggcggtcgttctactcgccggacataaggaagccgcagcggctcggcgatggcctacagtcatggtgtgggttctaccagagcatccggccgactcagatggggttgtcgcttaacattgatatgtcatctaccgcgttcatcgagccgctaccagtgatcgaattcgtggcccaaatactagggaaggatgtcatatcgaggccattgtcggatgcaaacagaatcaagatcaagaaagccttgcggggcgtgaaagttgaagtcactcaccggggaaatgtgaggcggaagtatcgcatttcagggctgacaacacaaccaactcatgaactgattttcccaatcgatgaccaaatgaacatgaaatctgtcgtagagtatttcaaggaaatgtatggcttcaccattcagcatccccatcttccctgccttcaggtgggaaaccaaaagaaggcaaactatctaccaatggaggcctgtaagattgttgagggtcagagatatacaaagaggttgaatgaaaagcagatcacatcattactcaaggttacttgccgtaggcctagagaacaggagatggatattctacagacagttcaacaaaatggatatgagcaagacccttatgcaaaagaatttggaatcaacattagtgagaagctaacctcagttgaagctcgggtccttcctgcaccttggctgaaatatcatgatactgggaaggaaaaggagtgcttgccacaagttggtcagtggaacatggtgaacaagaaagtgataaatgggtgcaaggtgaatcattgggcttgtataaatttctcaaggagtgtgcaagaaactactgctcggggattctgccaggagttggcacaaatgtgtcagatatccggcatggaattcaacagtgagcctgtgataccaatatactcagctagaccagatcaagtagagaaggcgcttaagcatgtgtataatatgtcattaaacaagctcaagggaaaagagcttgagcttcttttggccatcctccctgacaacaatggttctttatatggtgatataaaacgtatatgtgaaactgacttggggttgatatcacaatgttgcttaaccaaacatgttttcaagatcagcaagcagtacctggcaaatgtctcacttaaaatcaatgttaagatgggaggaagaaacaccgtgctgctggatgcaataagttggaggattcctttggtcagtgacataccaactattatatttggtgcagatgtcacgcatcctgaaaccggggaggactctagcccatccattgctgctgttgttgcatctcaagactggccagaagttacaaagtatgctggattggtgtgtgctcaggctcatcggcaagagctcattcaagatctttacaagacatggcatgatcctcaaagaggcaccgtaacaggaggcatgatcagggagctcttaatatccttcaggaaggccactgggcaaaagccattgagaataattttctacagggatggtgtcagtgaaggccaattctaccaagttctcctctatgagttggatgctatccgcaaggcatgtgcatctctagaaccaaattatcagcctcctgtaacattcgtggttgtccaaaagcgtcaccatacaagactcttcgcaaacaatcacaaagacagaagtagcacggacaaaagtggaaacattttgcctggaactgttgttgattcaaagatctgccacccatcagagtttgatttctacctctgtagccatgctggaattcagggaacaagtaggccagctcactaccacgtcctttgggatgagaacaatttcactgcagacgaaatgcagacattgacaaacaacctttgctacacttatgcacggtgcacacgctctgtttctgttgttccacctgcatactatgcgcatctggctgcgtttcgagcgcggttctacatggagccagagatgtcggagaaccagacgacgtcgaagagctccactgggacgaacggaacctcggtgaagccattgcctgcggtgaaggagaaggtgaagagggtgatgttctactgttgatgactgggagactacctttaactactcacatatgatgtacctaacattgtagaattttagtggtagggatttagaattagcttccttcaggaaagggagcagagcaagcatttggatcctgagcgacctcttttgaccactctgtaaagtactaagtaacgcatgtataatagttgttgtatcagtctgaaaaaaaggaagtgcactcagtgcttgtttttccaaaaaaaaaaaaaaaaaaaaactcgagcgcgggtcgacaaggggtttcgaaaggggtttccaaag

SEQ ID NO: 18975 - DNA, 533 bp, Oryza sativa
  Clone ID: PAT_MRT4530_24481C.1
gatcgttctatctatagcagcagcctcggtagctctggggcggtttatatctagctagcgggctggctccagaagaaatggcaaagtcgtcgtcgtcgtcgatcaggagccttctcctcgccgccgccctcctcgtcgccgtcggcatctcgccgcacgccgcggaggctagtagtggcggcgccgtcatgggcctcgtcaccggcgtagtcccgtgcagcgccgggagctccatcaacgcggcgtccgttccgggattccccaacgccgccgtgcagctggagtgcgggggcagggcggtggccggcgcgacggcggacggcagcggcgcgttcgccatcaacctggggaagctcaccgcggcgacgctcacgccgctgctcaacgacaggtgccgcgtggtcgtcaccaccccgctggccgcgtgcgacgcgtcgctcgccggcgtcgccgggacgctggcggcgccgatcatcagtggcgtcctcggcaacatcattagcatcgtcccatcggccttctccgtcgtctag

SEQ ID NO: 18976 - DNA, 343 bp, Oryza sativa
  Clone ID: PAT_MRT4530_24482C.1
gttgcgttgtagggaacccgccacctcccctcctgccagatttggcgaggagagagctgccatggggagtccgctgtcgttgccctggggagccgtcgctgcccgtggggtgcctcaagagagagaccgagagagaagcacccaaagagaggggaagggagaaaaggcaaaataaaaaaccgaagcttagaaaactacgacggctaaaccctaactctaaacagtgggaaggggccgagccatactacactcccctgaaagcgcatgcatttgatggtccgatttcgtacgaggctaggagcctaggagaacggcatttcggcaacgccacgtacgccgtcgc

SEQ ID NO: 18977 - DNA, 692 bp, Oryza sativa
  Clone ID: PAT_MRT4530_24483C.1
ctagctccggtagaaatggcaaagtcgtcgtcgtcgtcgatcaggagccttctcctcgccgccgccctcctcgtcgccgtcggcatctcgccgcacgccgcggaggctagtagtggcggcgccgtcatgggcctcgtcaccggcgtagtcccgtgcagcgccgggagctccatcaacgcggcgtccgttccgggattccccagtaaaatctctctcatatttatgatcgcggcgacgctcacgccgctgctcaacgacaggtgccgcgtggtcgtcaccaccccgctggccgcgtgcgacgcgtcgctcgccggcgtcgccgggacgctggcggcgccggtgtagctcctcggcgacggcggcgccggtggcggcggcgccctcggcggcctgggcggcctcatcggcggcatcaccggcatcatcgggcagatcatcagtggcgtcctcggcaacatcattagcatcgtcccatcggccttctccgtcgtctagatcaacatcattgcttagttggatcaccatttccggagctgcgtccccccgggcttctccgtccgcggcagcatcatctgtggcccttttggcccattaccctgcaccgctttagtttgtaccgtcgcattacgtgctgctatatatatatatatatatatatatatttgtgtaaaaaaaaaaaaaaaaaaaaaaaa

SEQ ID NO: 18978 - DNA, 356 bp, Oryza sativa
  Clone ID: PAT_MRT4530_24484C.1
atggagtttcgcctggcggccaccgtgccgtcgccggtgctcacgggcgcgtccgactccatcgacagcctcgacttcgaccccaccggccaccacatcgccatcggcggcatcgcccgaaagatccggatttacagggtcgccgagccatctagccccgtcggctgcatctacatcccggcaaagctgagtagcgtgcggtggcggccggggcggcggcgagcccgcggcctcgaggccaggttcgccgggttcagtaatggcaagctcgggcccgccggatcaacgacggcgagctaccacggcggcggagacggctctgttcccaaccttgacgcctcttgctcgcccatccg

SEQ ID NO: 18979 - DNA, 414 bp, Oryza sativa
  Clone ID: PAT_MRT4530_24485C.1
atgcacatgagcactatggttcaaggcttcaagtgcatggtggctcgggcagaggaaggggcaccatcgacgacgttgggaagggtgccactccagcggtgggaggtggccttggctgcggcggcactaccggttggagtggaagccaccagccgttcatcacgaggggccagccagcactacccgggcgaggaggagaagtgtgcgccgacgggcatgatagggcgaggctgtggcggcggcgtcattgttctcgccggtcttcctctcgacacgctccgcgatcttctgccacggctagggagggagaagggagaagggagaaggatatgggggatggggtcgcagctcgccgcccgtggctggggaaggagagggataagggagaaggggatggggggtcgcagctcgtag

SEQ ID NO: 18980 - DNA, 1827 bp, Oryza sativa
  Clone ID: PAT_MRT4530_24486C.1
aatggcacaagcgcgaaggatcccaagcctcaattatcgagtaacattcccgtgcaacaaacttgactaatatttctgctttacaatacaatcgaatgatctaggagtattaccaaaagctcacgtttcagctttacaacaccaaaaatggaccacctcacttgaccaaataactaccgtgttttacttgccaaaaactaattctaggttaatttgtaggaattagccaatcgtgtctgccgcctaagaagaacatgcgttgattcacttgttttattgaccacggagatccttcgatggcttctaatgtaaacactatcagctgaattgagtatcagcgaggcaaaaccatttaatcacctttcttcgtcccaccctggaatgtttgcagtggcttcattgaccattttcacaagggtggccacactttcgggaactcctggaggaggtaatgtaagatttcttggcggtggtgaacgaagataagatcttttgtcaaaccgccattcccctattttcccataagttagctcaccctttaatgtataatcacacccataagtgtaatggatgatgaatgtgttgtccgatttcgcgtcccaaggaggctgaatcataaaatccttacgaaggctgtagtgcacaccatgcaatgcactagcgacagcatatgcatactgtacacataatagtaccgacatttccaagacccatccaaaagctttgtctgtctccacatcctctttcattttcaacgaaatattcatccaagttggagcaatcttctcaagctgggccttcttgataatcactggggaattaccaataggatcaatttttgagactggtccattttcttcaggaaagaacttcctcagtattatttcattttcagttggtttgatgtagaagaagggaaacgcagcaggttcgtcgccatgagctaagtttggcaatggcctcacaaagatgtgatctggctcagccataagtacatagctgcaaatgtcttctttgatgtttgatttcttcagccattgaacaaatgcccaaggcctgtttaggacaatgtaacctcgatccgcgccttcggggaggggatcaaccaccaaggtaggtatctcatccatcaatccgtcgggcttcccggagtgcaggatccgcgtgaagccgcccatgtcggagccaggccgatccctcatctccctgtaccagtagtacatcacccgcgactgccactggctgtagagcgcgtccgtcgccgtgagcgcgacgtggaacctcttcgacgggtccgagccgccgccgccgacgccgccgacgccgccgagaatcttccgcggcccggcgtcccggctccggccgtggcccaccatcgtcaggaagttgtaggtcgcgaagaagcagcccaccgagatgaggaggagcagaaacggcgaggccttgccggcattcttcctcccgctcatcctagtggggaggtcctcgtcgtcgtcgtcggcggcggcggcggcggcggcgaggattaagggttcggaggcgtttgactcgatcgcgagcggggtctccggattcggtggatctgagagatcgcggtcgccctcactcgggtgcaggagagatggagggaagaagaaggaggcggtgggttacttcggggacgccggggatggagggtggcgagcggcggggcagtcgcctcggcgtccggtggggattcgccggcgatcgaccgcgtttgggatggggggaggccgtggaagcgacggcggagaacttgttgcggtatggccgccgcgaccgggcgagaaaaaaaaaagagtgtat

SEQ ID NO: 18981 - DNA, 432 bp, Oryza sativa
  Clone ID: PAT_MRT4530_24487C.1
acagcccgggcaacatcgtcgtagtttatttttttcaccggacaaaatgcatggatgaattttacctgcaaacttattaacatgctgccacacctattgggggatgtcgaacgatcgggccgccgcccacccatttttgcctgataagacatgatacccccatagctccaaattggaggaaggagctagctttgaaaacacacaatttttatcccctttcaccccccccccctcatttgcccccccaaagcatgtcgtcctgggggaggaaggggcacaccgggaccctcccgggcgccaccccgagccttttgtacccctcccccaccctgggcgccccgttgggggggcaccccccaagcgcctcccccttgggcccgtcggggccggccaacgtcaccgtgtaccccccccccggggtcgtgtggcccc

SEQ ID NO: 18982 - DNA, 1233 bp, Oryza sativa
  Clone ID: PAT_MRT4530_24488C.1
ttttttttttttttatgcaaattttgtatcagtttttcttttggttgaaatttagtgttccgattatttttcatccatcatgcagtcatacagttatagtgccttcatttttctaggatacttttattcctttgtccctaattcattcagttacatcttgagctgcaagactaggctgttcacttgttctgaatgctgaaatcgcctgacccttgcgcggtttgatagctagttcattgtcttccatgagaatagccttgaaacccaggtgagagagtttcggtgtgagtttggagtgtgtttgccgagagctttgtattaggattagtttggagtgtgtttgtccgagagattttaagtttgtgttaatgttcctctgaaggtgtatgtttgctcctagttgagcggttattttgcatcacctatgaatgaaatgatttgaaggatttcgtttttgccttgttcatttaaattccgcttgttccttctctcttcttttctagatccggcttctctgatagccgcggttctagtaaggattttgagaaatccggcttgatgagtattttcgggggcaagatttgaattgctatattcaccccccctatatagcggttcttggtctttcaatcccactaactgttaatccaacctcaagcttggatcaagtgcacaaaagaacgtataatcgaaaataagatcaaattgttcacttggtttccacttgaagaaatcgtcagccagaaaagtaaaacagtctgcatttggcaaagatgatgaccactgcttagccttctccacagctgtactagaaatatccaagccaacaacaaatcgctcagggcttgccagagcaaccacatcatatcccagagctctccccttcgggagagttcctgatttaacgagatgttcgatgataggtgttggcttccccaaatcccacggggttacggcggcctcccacgacttctcccagccatcggaagaatccctttctactgcctcatttttcctcctcttcaacactaggccaaacaaatttccccaactactcgcccccaactcaatgatccaatccgcccacacccaccaccacccgcacatgcgataccatgacccaaacctagaaacccccccccccccccctctcctcaattccaactcccccaagtccccaaccaacaaccaccagagagagacagagagagcgagggggagagcccgatccat

SEQ ID NO: 18983 - DNA, 1380 bp, Oryza sativa
  Clone ID: PAT_MRT4530_24489C.1
atggaggccaacgcttcggtggacattgacgatcaacatgtctgcctgaagatctccaaccaggagtccaccacgagcatgtttcgctcgcacaagcagaggcacctcgtccggctcaccgacgcccagctagccctgcgccaagatgcatccacagagaataaggaaactttatgttcagttattcagagcatcaagttgccttatggctatgcatcaaacatagcaagttttggggaaacaataggctctgctcaagatgtgaagtttgatgcaaaaacacttactcaggcccatcgttatgtcttacgacatcttgatgaaatagaggattttcgtagagaatttctagaggaggagaagagaaaacaaaagaagtcagttttcacttcttttgaatctgacaagttgattaatgagcgattccatgattggctataccacaagtgtgaatggctgcgaggtccccgacactacagaggcttggatcttttgcagaatggagtgcgcaatcccgaaatagatataccccggaatgatcagtatgttgaagaacagaacatatctaatgagaattggtgcacaaactggcatgagtatcttcttggatcctatttaggaacattagtcaggaagccacatctagctccactgaatattctaaaatggaatgacaaaatttttataagaatatatcatcaaaaaatgattactgaagttaagagaaagtttgcaattgatgggagagctaagagttggcttctccatcagttagatggtaaatggaggcaatacaagggaaaactgaaaggaaaatattacaagcctaacttacctatggaacgagtattgcaaacggtgcccaacactgttgatgaatctcgatggcctacactagtttcctactggtactcaaaggactctaagaaaatcagtgacagaaaccaagagaatgcactcaagcatccacacactttaggaagaaagagttttacaagaaagagaaaagaactgaatgaggtatacatgaaattggctgagaaaagagtagatagtccacgactcactgaagctgatttggaacaagctatgttagatatgtttggaaaggatcatagtggtagagttagaggcatgggtccaaccattactcctacaaactattatggtggaaggtttctgaatatatcagcaatcaatgaacaaggaaccagctccaagaaatatcccgaggacaatttgttggctaggctgccaccatcccttactaggctcatcccaacaagtgaggttaatcaaaaccaagaagttcaggcaccaaatactgcgccatctcccagtcagagagcatcttctcagccttcaactgaagaagagtga

SEQ ID NO: 18984 - DNA, 680 bp, Oryza sativa
  Clone ID: PAT_MRT4530_2448C.1
gaatagagtcgaatgaccaattctccctaataataatattgatagagatttatctacttattgaaacaattccgatatacctggtggaacatcgtgcaacattaaaaaaaatcaataataagctaaaaaatatttcatcagaatataaattatatgtgacggagcgtggggctcctcaccgggagaccgcgcaggcccccctttgccgacctgggcctcctttttatctggtccggggtcaccacattggcctcctgctgcctaaggagggatacatgctttttacaatgagggctagtctacagccggaagtgacatctgacaagcagagcacacgcctcctgccccgctcgcccgcttttcccggggacgcccacttcaaccttcatttaatggccagtgacttccttgccatacttgcgctgaagcctggaatggatctgaccgggactgacataccaactccaggagttagcacgccggctccggctagggacgagagccaggaagctctcatcattccgatgggacgagggggtcggggcgccccagccctcggggccgaaacgggagcggcccgacccctcggggagacagagggaggggtggccacgtcaccctcgggcccgacccccccgagggggtcaggccacgtgggtgaccgcggctacccaagcctc

SEQ ID NO: 18985 - DNA, 762 bp, Oryza sativa
  Clone ID: PAT_MRT4530_24490C.1
atggagaagttatttattccttcctttttcactatcatggttcatttaattgtgcacctggttgatgaatctaaattaggaggtcctgtaaactatagatggatgtacccttttgagagctttggggaaacaataggctctgctcaagatgtgaagtttgatgcaaaaacacttactcaggcccatcgttatgtcttacgacatcttgatgaaatagaggattttcgtagagaatttctagaggaggagaagagaaaacaaaagaagtcagttttcacttcttttgaatctgacaagttgattaatgagcgattccatgattggctataccacaagagaaagtttgcaattgatgggagagctaagagttggcttctccatcagttagatgtgcccaacactgttgatgaatctcaatggcctacactagtttcctactggtactcaaaggactctaagaaaatcagtgacagaaaccaagagaatgcactcaagcatccacacactttaggaagaaagagttttacaagaaagagaaaagaactggaagttaatgaggtggaggtggaccgagaaaccttctttgatgaatgccataagacaaaagacggtagatatgttactgatgctactcaagaaaaaatggtactaacagatacttgtaacctgtataatctaacgccgagaaggacgacggtcgcccaggtgaagaccagcgtcccaagggcgttgcctaacctctcagtcatcgcaaccaagtga

SEQ ID NO: 18986 - DNA, 157 bp, Oryza sativa
  Clone ID: PAT_MRT4530_24491C.1
aagcaattagtaggtctgctgatacttgatttaagcgagaactccgtacgctactcattgtttacagttgacacccttaatctgagattcgcgcgctaccaatacatacttcagggaggcggttcagacacgatctatagcggcattctgcctatct

SEQ ID NO: 18987 - DNA, 621 bp, Oryza sativa
  Clone ID: PAT_MRT4530_24492C.1
agaaagtttgcaattgatgggagagctaagagttggcttctccatcagttagatggtaaatggaggcaatacaagggaaaactgaaaggaaaatattacaagcctaacttacctatggaacgagtattgcaaacggtgcccaacactgttgatgaatctcgatggcctacactagtttcctactggtactcaaaggactctaagaaaatcagtgacagaaaccaagagaatgcactcaagcatccacacactttaggaagaaagagttttacaagaaagagaaaagaactggaagttaatggggtggaggtggaccgagaaaccttctttgatgaatgccataagacaaaagatggtagatatgttactgatgctactcaagaaaaaatgaatgaggtatacatgaaattggctgagaaaagagtagatagtcaacaactcactgaagctgattttgaacaagctatgttagatatgtttggaaaggatcatagtggtagagttagaggcatgggtccaaccattactcctacaaactattatggtggaaggtttctgaatatatcagcaatcaatgaacaaggaaccagctccagtaatgtcaatgctttcataagttag

SEQ ID NO: 18988 - DNA, 666 bp, Oryza sativa
  Clone ID: PAT_MRT4530_24493C.1
atggaggccaacgcttcggtggacattgacgatcaacatgtctgcctgaagatctccaaccaggagtccaccacgagcatgtttcgctcgcacaagcagaggcacctcgtccggctcaccgacgcccagctagccctgcgccaagatgcatccacagagaataaggaaactttatgttcagttattcagagcatcaagttgccttatggctatgcatcaaacatagcaagttttggggaaacaataggctctgctcaagatgtgaagtttgatgcaaaaacacttactcaggcccatcgttatgtcttacgacatcttgatgaaatagaggattttcgtagagaatttctagaggaggagaagagaaaacaaaagaagtcagttttcacttcttttgaatctgacaagttgattaatgagcgattccatgattggctataccacaaggtcttcttatttaagtgtgattggtatgatgtgcaccatcgcgtgggtacgagggaagatgagtttggttttactcttttgaatttttcgtggggtatacacattggaaataagctgatggacgatccatttgttttctcttcacaagttgaacaagtattctatgtccaagatttgtttgacatgggaaaggttggagatgaagatgatgagatatga

SEQ ID NO: 18989 - DNA, 314 bp, Oryza sativa
  Clone ID: PAT_MRT4530_24494C.1
atggctttctcctcctttggcctctacctccctgcagggccgggcgccgaagcatggaagacatgtgactatagccgtagacatggcgagcagcagagcgcccggattcgagtggtagacgacgacgtacagggcgaattcgaaggcggcggcaacaagatggtcgtgccagagaagcagctgaatcgctttgttcacttggttgtgatgaccgagaggttaggcaacgcccttgggacgctggtcttcacctgggcgaccgtcgtccttctctgcgttagattatacggttacaagtatctgaaataaagtga

SEQ ID NO: 18990 - DNA, 1772 bp, Oryza sativa
  Clone ID: PAT_MRT4530_24495C.1
ctagcaacgaagttttactgagctattacaaacaaattctccacctgataaccgaggagaaaacacatgccttaaacccccactatccaataagtacccttgcaacattaacaaaacacaacccactgtaggctcttaattcacccattacttacttactttcacccctaaaccagattcaccatcactttcacctaaaccagaaaaatcaaagaaggtagagagaaaacttcaaaacttgaaccagcactattaagcacatacagccagccacacattgtaatgtagtagtaaatatgatgtactctctgggcaaagtagtagtgtcctgtgaatgcctgatgagatcgatcaattcctcctctcgtccatggcgaggatggtgctgaggttcatggggctgatgtggtcggtggagccgtgcatgatctgcgcgacgatgagccggttcgcccgctccgtcgggtggaacgcgtcccagtacgcgtacacgtcccggttcgcgcacacgttggacgccggcgtgcacagcccgataccgttgtacggcccctgcccgcagcacgccaccttcgccgtcacaaacccgtagtcctgggggttgaacatgaagtcgaagctgatcttgttggtgttggcggcgatgaagacgtggccgccgagctcggagttgagctcggcgagcatgcgctccagctgcgggttgaagaggtcggcggcgcgcgtcaggtcggtggcgcactcgccgtcgatgctgtgcatggccagctccgccggcacgcacccgatcatcccggtgcccgtcacgatcacccgacgcggacccagatcgtgcagcctcgtgaggatcttcctgtactcggagatgaggtaggggacgtaatcctggatggcgaactgtcgggacctgacggagaatggcaccaggtagtagttgttgacgaagtcgttgccgccgagcgtgatgagcacgagcgactgctgcaccacctgcctcgccgcgtcctcgccgacgaacgccgccagattccgctggtagttctcgaagttgtccagctgctgaccgatcctaattatgttcacgaactggatgccggtgtcgttgaggatgccgacgccggcggaggcgaagttggcgccgacgagaaggttctcgcctcggaggtccgggctcaggtacggcagagcaggctgggacccgaggtactcgctgatgatgtccgggatgttgagcccgtttgagaatctccccgtgggcatgtgcgtcgggaagtcgatcccgtacggcggcgcgtccgcgcgcgccgtcgtcatgaggtagttgttgttgccgttgtccacgagcgagtccccgaacacgaagaacgccctcggcgccgccgccgccggcgtcgcggcggccacgagcagcgccgccaccgccgccatgaggaatccaaccaaagaagaagcgcccatcgcgcgcgtacgtcggcgagactcgcgacagcagctgagagtatacacttggggctagctgactggcagttggacagtgggcgacacgacggtgcctcctcgcgccgcccgccggcggccccgttcacgttctcgcttgcgatctctcttatagagggaggccgcattcgcgttcgcaattcgcatcgatgtctcgcgccacgccaccttaagacgcgcagttaaggcgtgagcagtgagttagcggggcgcgggacacggaaagcaattgcgcgcgaggaccaccacaccaccctcgtgccgaattcctgcag

SEQ ID NO: 18991 - DNA, 303 bp, Oryza sativa
  Clone ID: PAT_MRT4530_24496C.1
atggttaacggcgactatttatgcaaactgcgcctgcgcgacggatatgggcatggacggacggaccggatcggatccggcattgatggtcgtcatgcgcacgagacctgggcggtgcgtgtggcgggttcccagcgtaaatggtggctcacgagagagccgtcaaaatcacagccgcccgtgccgtgccgtgcgctctacccaccttttctcctgtccacgcggagagagaacgcatcgcgcaacgcgcacgcgcacgagcgcgccgcgcgcggtcggcgaatcgccgcgcaccggcgctag

SEQ ID NO: 18992 - DNA, 303 bp, Oryza sativa
  Clone ID: PAT_MRT4530_24497C.1
atggagctgacgaaagcggaggttattggggacgggagcgtgagccgaagaggaagggatagtggtggcgggagaggctttagacctccgttcccgcgaggggattcgccggtgcacgccgccgccgccgccggcgcagagaacccgacaagcggtggagacgaggctgatgagcccagcactgatgccatctccctcacttccacacccttcctctctgcctcatggagggccaccgcttgcctacctcctcttcgtgtagctacctctacctcctccgtttatcatccctcttctccataa

SEQ ID NO: 18993 - DNA, 237 bp, Oryza sativa
  Clone ID: PAT_MRT4530_24498C.1
atggcacatcagattttggttaatgaatcacaagcaagcaatgtagcaggtggcgctagcactggtacggcagtgaccagcggagacaggaggccagatccatacatgagtgcatgtgaagccatgatgggtatattcctcattgttgtctacaccaatgagatcctagcatttaacagtcgtcaaaggctagacagttttaaagaatctcaaaaatgtgttggtcatgatctataa

SEQ ID NO: 18994 - DNA, 279 bp, Oryza sativa
  Clone ID: PAT_MRT4530_24499C.1
cccacgcgtccggccgcatggaggggctcgattcgccgatgctcaacgccgattgaaacatggagaattcacatttgatcgcgcaatgtggtggtgataggtaatgcccatcgaaccgtccagaatttggtatttgatcgcgcatatgtggtggttataggtagctctcctgttcttggtttttttcctcacttgaggtggtctataaatagttataaaatgtgcgccgctcagtaaaggaagggtggaaaggaaaggaaccaatctttatgtaaagta

SEQ ID NO: 18995 - DNA, 391 bp, Oryza sativa
  Clone ID: PAT_MRT4530_2449C.1
ctgttgcaggtcgatgtgggctgccggcgtccatcccggaggcgcaaaagtggcaggctgcagcggggacgacggtgacgccgaggctgaggacgaggacgaggacgaggggagctcctgcttctgccctccccggggcgacgactccccggcacacacccgaccgacgagggtggcgagccagcgcaacgaggggaggcgagctcgagggcgaccccgccgtgggttggctgacctcgccaacgcagtgccgtcatcgtcctcctcggcagccggagatgacgacgatgaccccttcctcccggccggcttcgtctccgctcggccttcttcagagagagagagagagagggggggggagagggagagggagggctgcaattctgtgtga

SEQ ID NO: 18996 - DNA, 2010 bp, Oryza sativa
  Clone ID: PAT_MRT4530_244C.1
ttatctgccggcggagagctcgatggcttcctggttgaagatggagtcctcgcccgaagtctgaactctgaacacatgcgtctctagctgttttcctctacacaaatggaggcttgacatgggttctttagtgacataaccaaccctatggtaactaagagccaaccatacatatacatacatgtatatctattaacactgggattgggaagtgacatgcatcaggacgtacgcagtcgtcatctgccggcggagagctcgatggcttcctggttgaagatggagtcctcgccccagtcgaagcgctgctgcatccgctcgtagtcctgccgccgcgtcacctccacctgctgccactcctcccaccgctccgcgagtccttccccttccagcatccgcaccacctccgacatggacggccggtcctccggcgacgcctgtgtgcacagcagcgcgatctgtatcatcatctccacctcctgcccgtcgtagttgctgctcaggttccggtccacgatggcgcccagctgcccttccctctgcagcttcttcacatggtcaagcagtagcacatcgtcttcttcctccaaccgtgagaagtcgatggcgccggacccattggccagctcaagaaccaatatccacaaactaaatacctcagtactccaagattggttccctatggacaaattttcaggcgcaaagtgaaacatagttcctcgggctagcgtccaatattgaatctcgtaaacgataggccacactaagattctgcatgaaaggataaacaagtagacgttctgtttgtgttgtacagaagccaatcaatcttaaaagattccggtgaactgcaacactgataagctctacttcacgcaagaatgcagcctccccaccagggctttcataatctgtcaaccgctttacagcaatcttagtgccatctggaagtgctcctttatacactttaccgaaacccccctgtccaaggacatttttctcactgaaactatcggttgcaagttgtaattctcgccaggcaaatcttttcaactgaccaaatgcaattcttcgatcgtcctcgcctgatacatcgacaaaaacttctcgtagatggcttttcctccttccattacagacaataaacacagcccctattataagtatccctattgctcctacaactgttccgagtacaatgcctacctttgagccatgggatgaaccttgataagaaatacttgatgagcatggatgcagaaagtttgctccacaagtcaagttattaccagaaaagttgtaacgtgcaacttgaaacagcgaaccaggtattgaaccagagagtttattgtaggctaacctaagaatttggagctttgaaagctggccaagagaagccggtattggtccaaccaacaaattgtcttccaaatccaaacttgtcaaactagataggttgccgatctgctcaggtatgccaccagtaatcttattaccaggcaaggaccagcttctggtttcctctaggatcacagtagctatttcatcacaactaccaccaaatataaaacattcaaaaactgaagctctccaattcgtggtgatagaactccagtgaatcccatagatgccaatgttctgcaggagggcatctgtcatcaggcacaccaacttggaacaaacaaaaaacacttgcacaacattgtagttgttgtcacaaataacagaattccaagtgcatgggttaacttgattttggttccagtcagaaagctggttaccagtagcattcagcttcagcttcatatcatatagtgcatcaccggagtccctggctaacccagttaacaagcaagccagtccagtatggcacctcctcaccccgccgcccgcgccgccgccgctggggcgcgggtaaaaggcgtgggtggggcgctgcgctggagcagttgactcgaggaagcagcaggaattggaccggtgctgccggggcggagcgcgtgcggccat

SEQ ID NO: 18997 - DNA, 821 bp, Oryza sativa
  Clone ID: PAT_MRT4530_24500C.1
gcacgaggaaagattctgttaaggaagacgagcttagggataagcctggctatgagcacttaaatgatccactgcatgtacttgtggaagctgagtttccgtctgatatcgctgatgtgcgactaaaccaagccgtggcaatcctggaggatcttctcaaaccaattgatgaatccatggactactacaagaagcaacagctgcgagaactggcaattgtgaatggcactttaagggaggagaccccaagcccccaccttagtcccaagtccccagtgtatcccccttcaactcaactgggatgaaacgcgctaagacaggacggtgatcggagatcgcgacatctggaaattcgatgcctgagctgatgatgagctgaacatactgcaaacctgttctactgctggagatgattgctgatgcaaacaaaggaaggaacagcacggctggcattaggccttgccttgattttgtgcgcttgaccgcagatatgttgttggatggaagaaaggaaatctatgtgaaagtgatatgtctgctcgtgggcttgttgcttgctcatattgttgtttattctttgtgtacctggctcctaaatattaacattattttgttttggattagttaatgcagttgatgggtggttcttagatattgggattcaagtggtggacaataatcaggtctggtctgtaccaaggagtaggttgtggggtgtcaaaaggttgctgttccagtggacaactgtgattgatacagttctcaataatattatttgcattggttattcttttaaaaaaaaaaaaaaaaaaaaaaaaaaa

SEQ ID NO: 18998 - DNA, 427 bp, Oryza sativa
  Clone ID: PAT_MRT4530_24501C.1
gcggccgacaaacctcacctatttggacatctcaaataacatactatcagggcttgtcgcatcaaacttcggagcgccaagacgtagatactatgaatctatcctcaaacagcatccaaggccagattccaagttcgatttgcaggttgaaatatttgagcaccttggatttatccaacaatcttttgaacgggaaacttcctcgatgcattgggatgagaaatcttcagaagcttctactaagtaataataacttatctggcacattcccatctttactgcaaggctgcacactgctacgttatatagacctatcatggaataggttttatggaagattaccgagttggattggagacttccaagaattagtttctttacaactgaggaacaataccttttcttggggatggtctttcactggaca

SEQ ID NO: 18999 - DNA, 456 bp, Oryza sativa
  Clone ID: PAT_MRT4530_24502C.1
tcagacactgaactcgcgcttgtgagttgtgagtcgtgacttgcccgggacagtgagcagcgcgcgcgcaagtccgatcgagctcatagtatggccatgatgaagaggtttgttttgccgctgatgatggcggtgcttatgctgttggtcgtgtcgggatcggcgcggccgctgggcggcgacaaatgggttggagcggccacctccggcgatcatcctctcatacagttcctcaaacagctgtaccttgttctgtcactgatcgtgatggtgatggtgttcttggtcgtgtctggcacggcggcggcgcggccattggcgggacaggaatgggccggagaagacaccgccggcgacgactccgtcgtcgtcaggtttctccggcagctgtatctgcacaagcttgctggtccaggtcactcctgcaagacctacagccctaacggcggatgctga

SEQ ID NO: 19000 - DNA, 421 bp, Oryza sativa
  Clone ID: PAT_MRT4530_24503C.1
attaaatcacaacctttatttgtcccaatttgcctggtacatctcaaaaatcacaaagtcgaaataccatcgtatgtcacattgacatgtgggtctggaccccacatgtcattcccatataccaatgcattggaacacttctttcgttgttcttcagtcctccctcccgaccaacgccagcaagaagcccttgtaaccgaacgatgtgtcgccgacgacgtcgcgagtgacggtggtcttgtacctgaccttgtactcctccctgatgtgtctcatgtcgatctcagcacgcgacacgattactctggtgagcatgtcctcgtacgttcccaatcccaagatcgagtgcctgatcacctctgcaaagtgtttttcaggtgatgttaagcaccacacggcggtctttagcattctgccaaac

SEQ ID NO: 19001 - DNA, 1322 bp, Oryza sativa
  Clone ID: PAT_MRT4530_24504C.1
ccccctccccctcccccctcacctacctttctcgccttctcctcaagttgaggtgtctttgctccgttgttttccccatctccagcagctccccgcgatcgaatccgccatcacctactgttggcaccacgccgtcacctccggctcaccggccacctcctccgtagacacgcccgttcgccccaccggccattgccggtgagccccaccccgcggggtggatggatccgccaccgttgacgccgggcaacggggtggatggatccgccgccgtcgagccacggagagcgcgggatccaccgccgccagcacacggggagagcggagccaccaccggccgtggggcctccttcccctctctttccctcttctttctcttctcccctcatgtctcttccctctcctgtccatgagattttgaccaccggtggctcttgctacagacaagggtgacggtggaggcgtgaggaagcaagcccccatccctccccccctcccccaagccccaaacggtgtcccctcctcaaacacctagaaatcccccaattttttctttcaaagcgcctccttctccggcgagacggccaccgccgggactcctcctccggcgagaagggtaagcccttctccttattcccctcctctcctcctcctgggtttccattctcctcctcctctagggtttccgcctcctctagttagctcccaatctcgctctccggtttgcctgtctaaatcccccttcccccatcaaccccctcaccctactcccaaatggtatcagggaaaattccctcgctcccaatccggcatccctccctgcctccctccgagcccagcaccggcgagctccctacccccctccaagcctggtgccaacaagctcccttcctccctccaagcctggctccggcgcatctctactactcctctcccgtgcaatgccctagcctagccgccgcctctcctcgccggcacgccaccgcctctctagccgccgccgccgccggtcgtcgccggcacgccgccggtcgcagccgccgccgatttctcttccaaatgttcctttaccctcgccgtcgccgccgccgccgccgccggagattccgccggcgttcacgcgtggaagctgcggacctgctcctccgcccccatccgatctccctggagcgaccgccacctccagagtccagaagctcagcttcgccgcccgagctcgatcgccgtcgcgcagcgtcgcagctcgagtgcccccccccccccccccccccgcctccgcctcactttcagctcctccaaaccaaccaacaggtccagcatac

SEQ ID NO: 19002 - DNA, 140 bp, Oryza sativa
  Clone ID: PAT_MRT4530_24505C.1
atggtcaaccgtggatggtggatacagatgaacggcgtggtgccaacagtaggtgatggcggattcgatcgcggggagctgctggagatggggaaaacaacggagcaaagacacctcaacttgaggagaaggcgagaaag

SEQ ID NO: 19003 - DNA, 1293 bp, Oryza sativa
  Clone ID: PAT_MRT4530_24506C.1
ctagagatgaggagttatagaggtggaggtagagatgtcgcaaatatacaccgcaacaccgccgacggctccctccgctccagatccacgcgccgccggctccctcctctcccacgtccgcgccgccagcgccctccacgacgacgtccacgcgccgccgcatccctcctcgccgccggcggcgtcggcggcccccctcctcgacgccgccgcaaatgcatgtaccgcttcccccacgaagaggagcgcacggtgcgggcgaaaaaagcggtacatcccccggccacctcctccgtagacacgcccgttcgccccaccggccattgccggtgagccccaccgtcgacggcggcggcttgtagccgagaggatctggtcgccgaggtcctccacgcgccgctccccgcacgcgcatctggagctcgctggcatgggggaggaggagcttgccgttgcatgaagaagctcgctggtgtgggggaggaggagctcgccggtgtgtgagaggaggagctcgctggtgtgggggagggggagcttgccggtgtgtgggaggaggagctcgccggtgtgtgggagggggagctcgccggtgtgggggaggaggagctcgccggcgtgggtgggggagttcaccgcactgccggctgccgtggcttccatcgccgccgccgcatccgtcctagggaaagcaagggcgagggggatggatccgctgccggcggcacgcggggagcgcggggcagccactgcccgccgcagggtctcgtcgtcacggtcgtcgccgccgggccgctgggaggacggatccgccgccgtcgagccgcggggagcgcggatccagcgctgccgggccgcggggtggatggatccgccaccgttgacgccgggcaacggggtggatggatccgccgccgtcgagccacggagagcgcgggatccaccgccgccagcacacggggagagcggagccaccaccggccgtggggcctcgtcgttggctgcgtcgcggatctcgttgtcaccgtcgggctgtggggagcgcggatccgccgcccgggtggcggtggcgttggccgtcagcaaaaactcattttggccgccagcaaaaatagtttttctagtagtgtcggcagcacagcggctgtagtgcaggttccttcccctctctttccctcttctttctcttctcccctcatgtctcttccctctcctgtccatgagattttgaccaccggtggctcttgctacagacaagggtgacggtggaggcgtgaggaagcaagcccccat

SEQ ID NO: 19004 - DNA, 411 bp, Oryza sativa
  Clone ID: PAT_MRT4530_24507C.1
gttcttgttggttttcctttttttctttttgtgggtccttttgggggggggggaaatcatgggcaagggggggggcggggggaaaggggaaaccggggacaggtcccggggggggaccaaccggaagcaaaaggggaaagcctggggggggagaagagggagcaaaatgacattaaggggggggagcgtaatggccgctaaaaacccggaaaaccaggggcgccaagggaaataaaaaaacggggagggcgccgggagggggggaaagcaaaaaggggggcaggggggggaggggggggaccagggagaggggaaagggggggacgccctttaacaaaaagacccgaaaaagggggggaaggcggttcaccctgggtggcccaaagggcctaaaatttcttccccaagggg

SEQ ID NO: 19005 - DNA, 1659 bp, Oryza sativa
  Clone ID: PAT_MRT4530_24508C.1
atgagcgaggcgatcccgtccacccgcccggcgctgcgccactgcgtcgcgctcctccgcctccacctcgccgcgccatccctcgccgccgccaagcagatccacgcgcgggcgctccgggccggggtgcccacctcccacccgctcctcgccaagcacctccttttccacctcgccgccctccgcgcgccgccgctccgctacgccgtcgcggtactctcccgcctcctcccgcacgggccactagacccgttccccctcaacaccgtgctccgcatcgccgcgggctcgccccgcccgcgcgtcgcgctcgagctccaccgccgccgcctcgcgctgcccgacacgcacacctacccgccgctgatccaggcgtgcgcgcgcctcctcgcactccgtgaaggggagtgcctccatgctgaggccgccaagaacggcttcgtcacgctcgtcttcgtccagaactcgctcgtccacctttatggcgcgtgcggcctgttcgagagcgcgcataaggtgttcgacgaaatgccggtgcgtgggcggaaccttgtctcgtggaattcgatgcttaacagctttgcggccaacgggcgacctaacgaggttctcactgtcttctgggagatgttgggcgttgactttgcgccagatggattcaccatagtcagtgttctaaccgcttgtgcggagtttggggcgcttgctcttgggaggagggttcatgtgtatgtggaaaaggttgggttggttgaaaattcgcatgtgagcaatgccctgattgatctgtatgccaagtgtggtagtgtcaacgatgcaaggaggatatttgaggagatggggttggggaggaccgtcgtctcttggacgtcgttgatcgtagggctggcagcgaatgggtttgggaaggaggcacttgagcttttcagtctaatggagagggagaagatgaaggaggattatggcatttcaccgaggattgagcatcttggatgtatggtggacctgttggggagagcaggaagagttgaggaggcttacgattatatcatcacaatgccattggagccaaatgctgtggtatggaggaccttgctgggttcttgtgctatgcacaagaagctggaactagggaaggttgcttgggaacggttggttgagcttgaccctgggcacagtggagactatgtgctcctctccaacctttatgctgctgttgggatgtcacatcctgagagtgagcagatatatgaaatgctggctgagatagctgagagattgaggcgagaaggcgcacgcgtcgcgccacaggagaaggcggagtccgcgacgccgatcccgacgctgtcgccaccggaggggaacatgacgttcgtggacggcgtgacgtggtgcgtggcgcggccgggggtgtcacaggaggacctccagaacgcgctggactgggcgtgcggccagggcggcgcggactgcaccccgctgcaacccggtggtcggtgctaccagccggacaccctcctctcccacgcctcctacgccttcaacatcttctaccagcagaacggcaactccgacatcgcctgcaacttcggtggcgccggaaccatcatcaagagaaatccaagttttggatcatgcaagttcctggcatccgagtaa

SEQ ID NO: 19006 - DNA, 426 bp, Oryza sativa
  Clone ID: PAT_MRT4530_24509C.1
gagatggtctggagaagtgtggttactttggcacgcctatatgatataatgtttggagtaattgttatggcaccagtagctgtgttgtcatggctgcctggactccaggagatgcagacgaggatcctgttcaatgaagcatttagtaggggactacatatttcccaaatcattactggaaaaaaatcacatggagtttgagctggattcatcttccttttctgaaaatgacctgccttgatggtattctattggaacgctgcccttctcaaggttcatacaggcttcccagtttagattagatggatgctagttctatgtacaggactctttatcttgattcttcttaactcaatttacacatggatttctatggtagagatgatacaagcgatcgaatgggttggcaatttgggttatattcat

SEQ ID NO: 19007 - DNA, 501 bp, Oryza sativa
  Clone ID: PAT_MRT4530_2450C.1
atggccgaacgggcagtggcgcacaccctctctccgagcgctagcggtgacgacagtgagcagaacccgcgtcgtcgagctcgtactccaccgcccccctctcgccgaagtcttaggcgggaggaggcgctcgagggggtcgaaagatccgcaacttcgccgcccacgagcgatggagaaggacggcgagacggggagcgtcgcctcctcgtctacggcgatggcagcacgccccagggcgcgctccaagctgcgggcgcgctcttgcgtcacccgcccgttgtccccgatccagagactccagcccgatgttggctggatgacgtggccgacttggtcatgacggcgcagcagcgcctaggcgccggtgggcggtcctccgccaccaaggcctctggcgctgctaccgccggctccgtgtcgtcgaggcggagggcgcggcgagcggcagccgttacccgccgttcgtctgccattccctcgtcaactgtcacaccctga

SEQ ID NO: 19008 - DNA, 437 bp, Oryza sativa
  Clone ID: PAT_MRT4530_24510C.1
gggtacttgatgctgctgaagtccacgccgtggaggtcgctctaaactatggatcccccgggctgcagaattcggcacgagaaaagaaaaaaaaaactcgttttcctttttcttctcttcccctcctcctgttggcgggaaagggggaaaatgaaggtcccaggttccacaaaattggcgggggggattgggcctaaatttccaatattggttaaggaaaagaaacctttggaaaaaaaaaaacaagggggcccccagggggaaaccccctttttttaggccccccataaaaaagggccttttaaaattccccccttttggaaatatttttttttttggaaaatttttttcttttttgcccccccctctccttttaaaaaaaatttttttttgcaaaacatatttctttttttgggggggggaaatttctctctccc

SEQ ID NO: 19009 - DNA, 219 bp, Oryza sativa
  Clone ID: PAT_MRT4530_24511C.1
tacctctgtgactgacacaaacgtgagggaggcacttggccactaccatggcacctttcgagatccgtactcagagctatcacgagacaaagacaacgagtacgaaccagatacttccagtgaggaacgacatctaggaactgacaaagaggaccagagggactatgctactagagaactaccacctggctaggatggtactacaactggatagaccac

SEQ ID NO: 19010 - DNA, 327 bp, Oryza sativa
  Clone ID: PAT_MRT4530_24512C.1
atggagagttggagactggatttggagcttggaagagctgagcgctactcgatggagattggagactgcagaacaggagaagtggagatggtgccgccgctcgccggagctggactgccgtgcgcccgtgctgcggtgctggtacagcagttcgtcgccgccgccgccaccgaagtgacggccgcgcccaccctgctcgtcgcggcgatgcggcccaccgcgcggcggcgtcaatcagcgaacagttttgccaacggctggcgtaacgacggcggcggctgcggcgccgcgaccttccagtgcctgccgtccgcagtggctagctag

SEQ ID NO: 19011 - DNA, 201 bp, Oryza sativa
  Clone ID: PAT_MRT4530_24513C.1
atggctgcaggcgacgctgcgacgccattgctggagatggcgtaccaataccatgagggctgccccgcctgcgccgtggagcgcagcaaggcgctcaaccccggcatcccctacatgcgcttcttccacatctggatcatcatcctcgtctcatcgtcgtcgaatgttcagacgtgtggatctaaaacaagtcttgcttag

SEQ ID NO: 19012 - DNA, 416 bp, Oryza sativa
  unsure (1)..(416): unsure at all n locations
  Clone ID: PAT_MRT4530_24514C.1
ccttttaataatttctctccccncccccaccctccccggggggttttttttttttttttccagaaggaaaccatatatagatggcccattacattatagagagcaaatgcccaatacaaaaagggggcaaacagggcagggggggggccagaatttctaggctaaaagggaccaacccaatggttgacactctgctattggcaaaaggtttacttggaccggaaaatttctaaaaaatcaaccccccgggtctccaggaaaaaacctgaaaccggatttctggaaccgggggtagcttatgggtgaggcataggaagtttataagccttttattttttccgttaatacagaaatcgcccccgtcaatcgccggggggaacaaaaatctgggtggctagccctccatcctgaaaaag

SEQ ID NO: 19013 - DNA, 257 bp, Oryza sativa
  Clone ID: PAT_MRT4530_24515C.1
gcacgaggcctcttcctcgcgacgagaagctagccgccgaaaaatccgccatggctcgccgcgcccgcgacgacgacgacgacgacgaggtggaggaggaggacgaggaggaggcgtacgacctctccctcagccatcctcttccttcgccgccggtccactcacccctaaccctagccgctgctgcccgtctcccatcctccttcgcggtcggtccactctctgcccttcgccgcctccgccggccaccaccgccc

SEQ ID NO: 19014 - DNA, 487 bp, Oryza sativa
  Clone ID: PAT_MRT4530_24516C.1
ggaggtggcggtgttggtatttcttacgatcacagataaatccgcaagcacacggaataccgctgtagcacttcaccttcgggtgaccccaaaaggatatcgaactcaaggaacgattactaggacgggattcagagctgtcaccacctaccatctacctctgacaaatccgtgggatacacaacaaacaaagaagaagttcttcgaacccgaagaaaagtgtaccgacagctccggtattcctccagaattcctcctagaaggctacactcgtcgagaaagaagtcggatgagcaccaaacttccgggtactcctccaaaggttcccctcactctctaccttattctaatgtacaaaagatacaatagagcatcttgtaattcagctcaaagttctgtgtcagaaatgagagtgaggagctctatttatagcctccatatgacggttacaggtatgggaaatgaccaaactaccccggaactgcta

SEQ ID NO: 19015 - DNA, 235 bp, Oryza sativa
  Clone ID: PAT_MRT4530_24517C.1
cttggctaccgattccaagagtatagcaccattgcacgctgctgtaacatcccggcccagggcttaataggattaatataagacttgtgcacacgagtgagcacttcttttctggaagccgatgtccaaagaactttagggttaagcgtgcttggcctggagcaatttgggatgggtgaccgaccggaaaattcttcccaggtgcacacgagtgaggacaaagtgtgcatgaaag

SEQ ID NO: 19016 - DNA, 288 bp, Oryza sativa
  Clone ID: PAT_MRT4530_24518C.1
ttggggtttttttattttttggggttttttttttttttttttttttttttttttttagaaaaggagcaaatctgaaatcggttgccctgaaaaagggatcaggggacaagaacttattccggggggaaaaaggctactacataacaggtttataccaacattcacgcactcaaaattccatgggaacataggagtaacaccacgactccagcggatagggattgccatgaaggcatgaaccggccatccatagagatatcactggtggcgctcaaggcttttcctccc

SEQ ID NO: 19017 - DNA, 541 bp, Oryza sativa
  Clone ID: PAT_MRT4530_24519C.1
gtgctttggctagatcccacatgtcagataaataaatatgagaatgcccctttttttcctccactcattgcatgctctatctctttattcccctgcatggtggcagctgaattgattagtggagcattatctctttctttcagttcaaccataattaccttaaaggcctgttggtcctgcactaataagaatttaaatgcactcatgagagagaacaggattatgtgtttccatcttctctgttctgaaacagattggagacaggtgtgtatgggtgggttcagggagcttggtgcctgtggaaagattgacggcaaaggctaggatctgcagaaatggaccaacaccactccagagcttttgatggcaacagctcggatggccatgcaagccagctatagtggcaaacccatggtgatggagcaaaatagtgactaaacagacaaattaacgtgccatgagaatctgcatagtggaatccaatggtcacactgacctccccctgccatgttggatgaacggggtggggtccggagggagg

SEQ ID NO: 19018 - DNA, 189 bp, Oryza sativa
  Clone ID: PAT_MRT4530_2451C.1
atggcgagcgctcgtcgcagccgcggcgtgacggcggtggggatcgcggtgtttgtggctgtcgtggtggtggcggcgggcgccgggggcgcggcgacggtgtcgtgcggcgacgcggatatcctaagtggcagcggcggcgacgacgacgccgctacatggcgtgagttcgtcgcgatcggtgcatga

SEQ ID NO: 19019 - DNA, 265 bp, Oryza sativa
  unsure (1)..(265): unsure at all n locations
  Clone ID: PAT_MRT4530_24520C.1
ctctagtttctccctcctcgctcgccacaatctctntcgccngtttgattactcctggcggcgcgcaactaccnctctgctcctcctcntcgccgccgccgccgccgccgccgacgccgccgccgctgtgtgtactactactactgcgaagagccaggcggggaggaccgatcccccctatgatgatgaggagggactggtggggccctcaaccccccccctaccaccgagtttccgacctcctacctgccctcaaaacgacttc

SEQ ID NO: 19020 - DNA, 383 bp, Oryza sativa
  Clone ID: PAT_MRT4530_24521C.1
aagcttcattccgatctgtgatgatgatcaataagatgacgaatacaagttgtactgctgcttgtttccatgttgatgttaagaatacacactttgtaatgacagaggagaagagattattcttggaagctttgaaacttgaattgtttagtaatagtagcagtagatcgaatgtggcgaataagatcaaggataacagtcaacaatcctcaacgtattcgagagttgcttctgatggtgatgtagattttgataagagtttggaaaactcacgaaatttaatgtgtcacaagagacatgatgttttgactcaacaagagtcagaatactttttgtatttgtaaatattattttacaatttgtattataaaaaaaaaaagctt

SEQ ID NO: 19021 - DNA, 276 bp, Oryza sativa
  Clone ID: PAT_MRT4530_24522C.1
atggggatagaaggattttcttgccaggactgccgtgggaaaaagagggcattgctcccacacgcgatggcgatgggcacaggagaaccaaccgacggcgatggccgcggacggatggaatggagatggtggagacgaagccaccgagcagaagaccgcggccgtccacagctaagcaaaagaaggcgcaagaacacactgggcaagggaggcggcgatgccgccggcggtgctggatggatcgacggaggaagcgtgtggactgcgtgcagatag

SEQ ID NO: 19022 - DNA, 741 bp, Oryza sativa
  Clone ID: PAT_MRT4530_24523C.1
atggacgccgccacgacgtccggccgcgccgtcgactgcgatcccgtgccggtgagggatgaagggtacgttgatgccttggtgagggcgtcgcttcatcttatcaggaaggatttccctcatgaggtccggggacatggcgtcagattgctacagcatttgatgagattcaggtgggaggaagtcagcataataaattggagcaaatttgctgatgtttttagtttattaggagttgagttgggagtcctcgatgatctggtttggaagaatgcagcagctgatttagttgcagaggtggtttggagccatggaatttctctgttgcatgacctaatcccctgccttgtgtgtctatcagcaaagcgtgctactgagaccgagttagtctgctttattctgaagtcaatttctgataatcgaattgctcatgtttcacattttggaggtgataaaggcgaactgctttccttatctgagttccttccgcagattttgccattcatttcctctttgcttgagaaacacgttggagctgttttgggtgaaaaagagaagtgtcaggtggaagtagctgaggaacatgcatctgtagtaaaagctgtcctagatgcagccattacatatgcagggtgggctcatgttgttgatctggggaagcacggtcttattaaggggtatgctatcgacaaagttgaaacagggtgttacatgatgtggatgcctactttcttgcaatga

SEQ ID NO: 19023 - DNA, 2238 bp, Oryza sativa
  Clone ID: PAT_MRT4530_24524C.1
tcaccaactctctaggcacttcatgacaggtattgcagctcctttggtgtcttcagtaccaccatctgcaccggtagcagcatctgcagcacccacaccatctgcagcagcataagctccatcaccactaacaacctgtttagacatctcggcttgctcatcctcagccctcaaacccagcaacttgtagaatttttcatccccaatgatatctagccacccttcatcatcatttgggggcaagaacctcatttggtagtgacggttttgtgcgccaggtgctaggttgccactcgacatggtggcctcgacgctagcggcagtggcggtggcggtgatggcgatgacgggagcggtggtggtggtggcggctgcggcgatgatgggagcgcctggatctggatcccctttcctctgctccacgagtggccaagttgtctttcctcttatctcacccctcaccatctttccatttccactgcaaacagttggcctaccccccttatgtgtgatccacatgactgccattggatcttttagcgtagccacaataaatgcgaatgcataaggttgtaaatgtggcaagaaatcctccatttgtggtatcaatggctcagaatattctgttgcttttgccttggccaaccgcctggctatgtctaaaaggaagtccttgtgaccctcccgtattagaggatgaaactgaggttcccagaaatgtaagatttgaaggaggacacggatggactttttcgcatcatcacggtcaaagatcctggatggtatctcaattttttctccaatacgttcaacaatttcataataatggtcagagcccttgatatatggtttcaaagtaatgagttctccaagaatttcacatatttgtttgtgatgttttgcactgatcattgaataatatttccgttctcgcatatttgacatgatccttagatgggggtgcttgctactgtcaatagcatacttggatctaaattcaggcctcaagttcttatatagaacttccaggtcaaaaaaatcaacctccaaacagtcaaccattgcatccacttcttgcattgtatcaaaataaactggaagatatcttcgaaattcatcttcaagctcccaattccattctagttgtgtttggccaaaaaattcctttggaggagcagaacatgccttagcatggagatcttccttttgctttaccaaccaacatgtaaagctatctgcagcatcttcaatctccttttgttccttcactaaatccctaagcttatcatcatttgcagcacctgcaaggtggatcaaagcacgacagaaggggatagctttggtggctgcttcaccatcaaccaagtacccaaacagactcatccttaacctcccaagacaatcattaagtaaaagatatccactctctcggatatcctgtagccattgtctcatctcaatttcttggaaaccttcctcctcatcgatcccaaatcttttagcttttgcaagcttttttgatagatcaaaagtaatctctcgattccagagggcatgtacgcattgaaggtaccttaggagcaatggaaggatcaaccctaagagactaactgagtatttatcgggcatttggatagcatgagactcttctgctctccttttgagctgcccttcccatgacttcaccacatcatgaacattcttcacaaatttcccagtctggctgggtccaaattttgctaagaggactgagtatacaagtaagaacttccttgtattgctgaatcctggaccaggatgacacaataaggaatgcttcagatataagattctgctctgcaaggagtagacagcccacgtggtggaaagagtttgatcgtctagctccatatgctaatgatgcaaagaaggtgaagaagttgtatatttacaggacagttgctggaccgaagggtaatgcccctgaattcatctcaacgttctaaatccatatatttttgaagttgaaggtttgtttttccacaaccaccttttgtttatatcatactctgctacgtcaggttgatctacatgttctaaagatctatcgatctacacggtcgaagggatcttccagaattattttgtgtacactcctttgctatcacctgagataagtctttatcccccagcagtataaaaccacaaaaaaaaaaagagggggccgattagaggaacaagctgcagacgcggcatccc

SEQ ID NO: 19024 - DNA, 2908 bp, Oryza sativa
  Clone ID: PAT_MRT4530_24525C.1
atggacactgtcctcccctccgctgtgcctgactcagcggctcctgtcgctggagattcagggctctcagagcagcagctgattcaatatatacactcgcttcgggaaaatcaagttgttgacggtttattcgaagatcttaaaaaagaaaaacatatgagccttacaaagcttgctcatatacttaaaatcactgatggattgtctaacattaatatcgtggagagttctgttgaacctaagacaagagcattgttagagggaattcaacagaaagtatatgatggcataggtctatgtccatccattggtggatcattttcggagttattgggtagtctatctctcagtgctactatcactaaagatctagggtctatggaagagttttctagagaaggcaaagacaattgtagcgctgaatgcagctttagcgtctggattgaaaagctgaagaaagatcttgaattaaaggcgtcttctgctagtaaggaacttcctgagggttgtgagtggaattgggagttcgaagaagaatttcagaggtaccttcatgtttatatggacatcttacaagaagtgaatgcaatggatgattgtatggagcgtgattatttggacaaagaaactctcttccagaaattgaaatttgaattcagatataagcatgccatcaacagctatcaacatccttatatggtgaccatttcttctctccgacaacgacaattttacacaaggacttgcttcagatgcaacatgcagatatgtaaatttcttagcgaacttgtcaaactgaaaccctacattaaggtttctgattgttcttatgatgttattgaaaatctcaaacaaaatcatgagatacttactgagatttcagactgtgaagtgcgcccgcccacctgccgctacgcgctccggtccgtcttcccctacgtccacggcaggctccccgcagcttactcttccacgccctcctcgacgctccgccctgctccgccccccgctgcgccgccgagcccccctattggctggtgtgttggtgccccgcccataactttacctgccccgatcgagcccttccttctcccagagccgccgctcgatcagccgcccctggagggagcgcccatggacgccgccacaacgtccgtccgcgccgtcgactgcaatcccgtgccggtgagggatgaagggtatgtcgatgcgttggtgagggcgtcgcttcattttatcaggaaggatttccctcatgaggtccggggacatggcgtcagattgctacaggtggatgggagattcagagcggcggacaactccgggaatagacaggaaggaagggtagctggatgggttgctagttgtgagcttgtgtgtgcggtgtggaagacaattttattaggagttgagttgggagttcccgatgatctggtttggaagaatgcagcagctgatttagttgcagaggtggtttggagccatggaatttctctcttgcatgacctaatcccatgccttgtgtgtctatcagcaaagggtgctactgagaccgaattagtttgctttattctgaagtcaatttctgataatcgaattgctcatgtttcacattctggaggtaagaatcataattcttttatgggtagtagttcaactaacagatgtggatgcctactttcttgcaatgatttctgtgtacacgcatcgcagtttttcaaacatatattgcagaggaaaagacctgttgctattgccgttgcagatcatgattttgcagattatctattctgtccacataccacatttcattatgtgccagctttacagggtgcattgagtatctctgcgaatccaaaggatacaagtagtagtagttccagccgctacagcaatagctctggtacaatattccagaaaactagtgtgcagaagagactgagcagtggaagcagcagcagcagcaaaaacaaacgtagcactgcagtcgtaatgagttctcctgattgtgaattagatctcctgttattggtgaatgtccggcataacaatgtttctagagaaagcatgctcgacgccgcggacccaagagtgggtaatgatggagctagacgagcaaactctttccaccacttgggctgtctactccttgctgagcataatattatatctgaagcattccttactgcgtcatcctggtctagatgtgtcatcatgattcagcgatacaaggaagttcttgtatactcagtcctcttagcaaaatttgaacccagccagagtgggaaagcaaatacacacattatgcatggtgcctcacacttccttcaatgtgtacatgccctctggaatcgagatattacttatgatctatcaaaaaagtttgcaaaagctaaaagacttgggatcgatgaggaggaaggtttccaagaaattgagatgagacaatggctacaggatatccgagagattggaaaatgtattaaattgcagcaggcgcacaagggcaagatttgtacatggaattgggagtttgaagatgaatttgaagatatcttccagtttattttgagatgatgcaagaagtggatacaatggttgggtgttttgaggttgatttttttggaccgggaagttctatataagaaattgaggcctgaatttagatccatgtatgccattgacagtagcaagtaccctcatctaaggatcatctcaaatatgtgagaagtatgcacttgctatgatttctaataatcagcttgtagggttccccgtaaggaaaaaagagtacaacaactattttacattttagcatcaattacttcggatcgactattttacccctattttgatcttcaattttgatttggccccagcaaaaggttgaagaaagaacacaaaacgg

SEQ ID NO: 19025 - DNA, 188 bp, Oryza sativa
  unsure (1)..(188): unsure at all n locations
  Clone ID: PAT_MRT4530_24526C.1
cggagnggggccaaaaatcacatttatttccctttcagaacaagagaattgcccctttttggagaaattgtttttatccagtagtagcaatggtggtacacccgggcaaggaattgaaattcaccacaagcacccaaatggaaccggatgtgaccacaaagccggccctgggcacccggaattcggcc

SEQ ID NO: 19026 - DNA, 428 bp, Oryza sativa
  Clone ID: PAT_MRT4530_24527C.1
ggcgcaggcgcggcggaagatggcaggtctgccaggcctgcgccatcgtctccgaggatcttggtgcctgtggtagcaagagaggaagtccatccattggatgagacttttgagaccgcctgtacatcaaccaaggatggaactgatcaactgtagatccagctaaaaattgcattttttttttaactcaaagaaaagattgacaaggtaatattacgtcaataatcacattatctgttttacccagatggacagttgttgatgaatttatataggtaggaagatgacaacgtacttgacttgcgtgaattttgcatggtcaccaccatgtatgtttttgctgacaatgatgttccacttgctagttaccttgtgtaattattgctgacgttacttttgcatggtcaccaccatgtattttttaaaaa

SEQ ID NO: 19027 - DNA, 1207 bp, Oryza sativa
  Clone ID: PAT_MRT4530_24528C.1
gcccggcgcggcgcttcgccatcgccgcaccgggcgcctcaggccgcgctcgagtccagccggtctcaggacgcgagggccccccgcctatggggcagggcgccagctgcgggcggcccagcgaggaggtggacttcttcggcgcggcgcagtcgggcgacctcggccgcctcgccgccgccgtccgctcccgcccttccgtcctcggccgcaccacgcgcttcgaccgcctctccgccctccccatcgccgccgccctcggccacctccagttgcggtcgatggggttggatccgtccgtgcaccgggccggcggcgacggcgaggaggacgacgaggaggcgcgcggcgggctgccggcgccgctgcacaggaggtctcgccgggcggtgaaccaccccagcggcgacggcggcagcaccagcagcatcatgggcagcattgcgtcgtcgatcgggaagatgggcagacggcgaaccgacagcagcgaacacgtcgacgtcgacaagccctagcacgcaactcatcggatcgagtcagagtggacacgatcatcctggtacaagccattgtcgtcgtcgtcgtagtcttcttcaaccgatcggcaaatgagctactattttttgtagattattactattattttttcctcaagaaaatgagctattccatctgtgtagatttgagccatgctgtattacgctgtgtaaatccaaataagcagtccttgcatgcttggtagcccccagcacttccagtggagttcttgaaaatttgtaaatgccaggttcagagatttggaccgatatgataatgagaacccaacacaaacaaaatgcaggagtgtaggcaccagatgtgcgcggcgtgcacgctggcgctgtgctgccacgcgaagcccagcgcggcggcggcgacgccgtgccagcagccgctgccgacctgcccgttctgccgcggcggcatctcccggctggtggtggcgacgaccaagaccagagcaggcggcgacgacgaggaggacgacgaggaggcgggcagcaggctggcgtcgccgctgcacaggaggtctcgccgggcggtgaaccaccccagcggcgacggcggcagcaccagcagcatcatgggcagcattgcgtcgtcgatcgggaagatgggcagacggcgaaccgacagcagcgaacacgtcgacgtcgacaagccctag

SEQ ID NO: 19028 - DNA, 387 bp, Oryza sativa
  Clone ID: PAT_MRT4530_24529C.1
acacaagaatctgtatttccatgtcatagcaatataggatacacagcatccgtgagaccatgatacgctcgataattgctgcactagtcaaaaaccccaccaggcttgctagctagcaaagcagatgaaaccaggtttgcccattcgctgatcgaattgaaggcaacagatcaaacctcttgggatgcagatccaagatgaataaacaagatgcgtgcactgactgaaattttcagccattatctacaaactgagccatattttcctttttcattgcaagcggggtaataatacatcctacattaatatacctctacaacccaaaccctccacatgttaataaaaatgttgggccggccttatcttagccgaacttctcaataaaac

SEQ ID NO: 19029 - DNA, 186 bp, Oryza sativa
  Clone ID: PAT_MRT4530_2452C.1
cggacgcgtgggctgtgctactatttgcttttaagaatgaagatatgctctgtataaagcattctgcaaaactcagcacagtgatctgcgacgagttttgcagaatgctttatactgtgctactatttgcttttaagaatgaagatatgctctgttgaaacaaaaacaaacgcgtaaatagacaag

SEQ ID NO: 19030 - DNA, 123 bp, Oryza sativa
  Clone ID: PAT_MRT4530_24530C.1
atggatgcaggcttcccgtgcagggcgaatccatcaaaaatagcaacaggagtcgggaggttgacgaagatgaacatgagcacttgggatgatcgtgactgggcagaggctgaagtgggttag

SEQ ID NO: 19031 - DNA, 233 bp, Oryza sativa
  unsure (1)..(233): unsure at all n locations
  Clone ID: PAT_MRT4530_24531C.1
gaacaaaccgcctccaaaaatctaaggtaagcacccgcgcgcgacgcgattcaggtgtagcggcggcggcagtagaggcgatggcggcggcggcgccagagaggcgcgaaggcggaggcggccgagatggacctcctcagggacgacgacgagagcgaggagagtgagatcgaccaanaatgggatgacaaggaggatggagatgangccacgcggcaatgggaggatgattg

SEQ ID NO: 19032 - DNA, 822 bp, Oryza sativa
  Clone ID: PAT_MRT4530_24532C.1
cggacgcgtgggcggacgcgacactgcaaaccactctctcggtctctccatccatccacctctctcgatcgtctcatgagctagcgcgccccgcgcgtacagccccgcatgtctctctccttggggtttagcgccggcgccggcgtcggtgccgatcgcctcgccgccgcgcccgcgctccaggccgccggtgctctgccgccacgcgtggacgtgtctctgtcgctggcgcgcgcggccaacgggcagccgtcgtcgtacctcccgctcaacgagaacgactcgctggacatggtcctcttcgacgtcctccgcgaggcctccgcggtggcggcgctgtcgtcgtcgtcgtcgtcgtcgccggagctgggcgcgcggacgacggcgccggtggtcgccggccaccccgccgggcgcaagggtggcggcggcggaggcggaggcaggggagcggcggcgaggggcggcgccgctggcgggcggcactaccgcggtgtgaggcggcggccgtgggggaagtacgccgcggagatccgtgacccgacgcggcacggcgcgcggctgtggctcggcaccttcggcacggccgaggaggccgccgcggcgtacgaccgcgccgcgttccgcatgcggggcgccaaggcgctgctcaacttcccgccggctgtcgccggtgacggcgcccgtcgcggcgccgccgcggccgcgaagcaggtcggcatgagcgacgtggtaccaagagcatgtcatgtagtttgttactctgtgcttagtgctcacattttttatgatatctttcgtggtgtgataccaattccgtga

SEQ ID NO: 19033 - DNA, 360 bp, Oryza sativa
  Clone ID: PAT_MRT4530_24533C.1
aggaaagaataatggaacattccaatcatcactcgactattcaaaagcataacaatatagttggtttagaccaaactatcaaggtctaaacgttaggaacccactcactcaccccattaggaagtatagaacgagctgcaactgaatacaaaaaaaaagcccacggtcctagtgtaaacagtaataatcagtgccaaaaaaactcatagctcatataaccactagctgtcttaagtagcattgtatgctttgtccagccaatatgtaggcaggagtacacgtaacaaggtagcagagcgcatggtcaccgacgaggcacagcttaccaaatattacacacccattgtgcgtgttaggacc

SEQ ID NO: 19034 - DNA, 986 bp, Oryza sativa
  Clone ID: PAT_MRT4530_24534C.1
tgcgggcgccctgtcctttttttttttttttttttttggaataaaacccactgctgaatttcataccgctatcatctatattcttgttttctgatctccaacataggatcatccaggggaaatttagtacacaataatcgccagctaattatcataaaaactacccctttccagctgagtgaatcttgttcttgtaccatcacgtacatgtcttgctgacttgtagaaccctatagctccaatagccaaccttcatttttccatttccgatgtcttcccgacgtcctactcaagagccggtgccacctcggttgggttaccttcaaacacatcagagcctgatgattctgactcttccgggaactcctgtgtttggaccgattccttgtaggaaggagtttctctgaagtctgtcgctccttcgttatacgttgccacagcgaacccacatgcaaccaggccgaagaagacgccgaacgcccacatgtactgcacgaagaagccgagggcgtcccactggggcccctcccagaagtcgggcttctccgggtccggcagctcgggcatcggcgtcgtcgacacctcgaaccccagcggctccccttcccagtccaccccttccccggcggcggcgtcctcgtccatgtcgggcggcgcgggcgccgtgacgctaccgcctccccggcgcttattcttgccgcgctcctccaggcgccgctgcgtgcgggacgagacgccgcctctgcgcgcgcgcgccacgtgcagcgcggcccggctgcccaccagcgggaggtcgagccgggtcgccgcggcggcggaagcgggaggggcgcggcggcggacggccgcgccgccgaacggcgtgggcgaggtgaggagagacatgagccggcgccggcgatgtgacgtggaggctcgagaggctggagctgctgctgcgagcaactcctcttcctactggctgtcgacgcttctcaggatctgtg

SEQ ID NO: 19035 - DNA, 1715 bp, Oryza sativa
  Clone ID: PAT_MRT4530_24535C.1
cgatcgcattcgaagcttcctccggtagctccggtgagggtgatggacgacctggacatggcgctgcctcaggccttcgagctcctcctcggcagagatcgagacgcctggccgcgcggggccgcgttcctcgtcgccgcccactacggggacgtccgcgaaatgaagaggattgcaaaggagctggacgaggacggcaaagggatcgaggcgactgtggctaacacaagcttcctcggcatgaacgcccttcacgcactgggttggctcggcaaggtgccggcctaccggtatctggtagaggaggtcaaaatggacgtcaacaaggccgacactgctcagggattcacacccctggagcatgccgtctaccatggtcgcctgcctgccaccagatacctccttgatcatggcgctgatgtgcatcaaattcgctctacgggaaatgtctctcttcttcactcagctgcagtaaaagggttctctgaagtagcaaaatttctgctttctagaggagttaatgttgatgcagaatcagaaatggggacaccactggctcttgctgctttcagaggatatgatagcactgtcaaggtccttttggagcacaatgctgatcccaacaaggttacaaacaaggcacttggtgcacctttagacttggcattaaccagctcttctgtgtcctgtgtgaagctgttggttcaggctggagctgaagtgaaagttgaggggccaaataatcatttggtaagagctgctgagaaaggcttaactgaagctattaaatgcatgttggaagctggtgcaaacccaaatgttcctgacaggctcgggagaatgccaatagagctggctgctgagtatggcacacgggaagatgttgagattctctttcctttcagctctgctattccaactgtggcaaattggagtgttgatggaataattaatcatgtacagtcagaaatcaagcaactagagatattatttactcaggacgataattttatcaaaaagagaaggtctgacatgaaacaacaaggggatgctgcatttaagaagcaggattatctaaatgcatcagtgttctacactcaggcactgaaggttgatccgtttgatggcacgttgttctcaaacaggagtctttgctggctccgcatgggtgatggagaaagggctttggatgatgccaatgcatgcgaaaagctacggccaaagtgggcaaagtcctactatcggcaaggagcagctctaatgtttctgaaggagtatgagagggctcatagggcacttggtcgagctttagagttggaccctgaaagtgaagagatcgagaatttgtattgggagtcgatggaactgtgcggttgatccctgaaatgccagctacagatagaagaagcacacgcagaactggaagctccttttgtgttatgaaagatggaacgacgcaaacgctcagtgatttgctgctttttgtgtacatatacttaggctgtcaaaacagaaacaaatgtctggtcttttatgtcgtgtttcgtcgtgacatcttcctggagtggctgttagactaaactagcattatcacattctatctgttgctagtatgggcacgaggatgatcaactgtctaagcaagctggaatgatatgaattctctgaaaaaaaaaaaaaaaaaaactcgagactagttctctctctctctctcc

SEQ ID NO: 19036 - DNA, 1237 bp, Oryza sativa
  Clone ID: PAT_MRT4530_24536C.1
gaaaggctgggtaccgcctgcaaggtacccgggtcccgggaattatcccggggtccgacccaccgccgttccgggcgatcacccgagacccccgacccccggtttgggattccccaattttagccctagaacacgcacatcccggaatcggagcaagaggcctgccttgccggcggaggagaggaattgatcgcgagaagcacggggaagtcgagcatggcgagcgcggatctgctgcggagggaggaggagttctacgcctccttgttcgactccgccaaaggtggagatgccgtcaagtcgcgtgggcagatgattgagaggaagattgaagttcttgaggacatggccgccaaggttagtaatcggagatctcgtaggtggttgaatgaccggttgctcattgaacttgtcccccgtcttcatgtggaagaaatcaaaggcctttttgctcctccaccatggggtgaggaactgcccgtttctgcattctgcaggacaagtgtcggtgaatgggatgccttcaggagtattgacatggatgttgaggcacgattggtgcaacagatgaaacagtcttctacaaaacagaagaaccatttggacagagatgaattggttgctctcaattcttggcatcatatagatcgtcaaacaagagaagccataaagagaaatttcctcccagatcttcttgaaatatacgaagaacgagttaggaccttcatcgaagacactagtggtaaagatatgcttgtactgaatgtccaggacccatttcagagattgcttttgcacggtgtatgcgagttctataatgtatcatctacaaccacgactaccgtaagagatggaaagctgtgtaaaacgacagcaatcaagaagagatcaggcacaggtgctccctccagaatcacattggttagcttcctaaggatgaagaaaaagtcccattaacatgggcttggcattggccaaacctaccgatttaggttgtgtttagtaaggacccatgtaaaatatacacattatcattttaacctatttgaatgcaagattggtcgctgccactttgatcgtgattggatgccaccagattgggtcactggttgtgacttcccaaaaaaaaaaaaaaaaaaaatccagggctgctcacattttttaacaccatattgcatgtcttacagcctggccatcgaatgtttcattctgtttagggggtactaagtcattgaat

SEQ ID NO: 19037 - DNA, 399 bp, Oryza sativa
  Clone ID: PAT_MRT4530_24537C.1
ggtggtaagctgctcttaggggggcggaacatctgccacatcacgtgcacaggagacgaaatgatgggggaacggcacaaggaccaaaccatccgagcattcgggacaaactactgattcagcgactctgaaacatccatgggcgaggggggcgacgtaccaccggagagcagcgccgagccaactgccgaaagaaaccaggcaatgaccttcctgagaccaaaactctaacgcataaggcaaaccgctcatgcagagccactagagcgaaggttctgccccaatacaatgggcacggcgtgccgatatgcgaacgctactcgaggtaggggaaagtgttgaccagctcgaataccccagctctgtgctgaggaccgccctaacatgactgttagaacc

SEQ ID NO: 19038 - DNA, 609 bp, Oryza sativa
  Clone ID: PAT_MRT4530_24538C.1
aactagtggatccccgggctgaggaatcggcacgagcgagcaaaagcgaatacttttgactttacattcaatcgactttaatagggagtactcgtggtgcattgttttgtagttttacctgcggttagctggtcagaattaaacatatatatatatacacacatatacatatatatatgtagctgaataagtaattcattgcatcgaggggattgttaaccattcatgcatatctaactgtggggtcggctgaggtgaaaattaaccagttcaagcatgcatgttggcatatagtataagctagcacatcacaaattcacaatcaccttcaagtgtttaatttcgctgcattagctactcctttggtcttgttacgtgagagagctgacagagagtagtgtataaactctgaacaaagaactgcactttgatatggagctagctagaagatgactttgaatctgtatatatatctttgtcattgtgatatgggagaggataacttgcttaaattttatgtgagtgactgttcatagaaataaacttgacgattgtttcttgtgtgctatagcatgctgtccgaagatgcacacatgtatatatacacat

SEQ ID NO: 19039 - DNA, 213 bp, Oryza sativa
  Clone ID: PAT_MRT4530_24539C.1
atgatcttcagtggtagcagctgcaggaaggccgcagcggcggtgaccggccgcccgctcaccgattcggcctaccgagatggacacacgtcccaaattcttgcccgcattgatcgagtgtccgggaaggcgaggccaccgaggcgcgagagcactcttgttggttacttcctgatggtcactttcatcggcaagccccacttcatacgcagc

SEQ ID NO: 19040 - DNA, 303 bp, Oryza sativa
  Clone ID: PAT_MRT4530_2453C.1
atgccgcatcgacgccactgccacggatgtggatggatggatggaatcatggaggaagttggcggcaacgcgtgggaagccgaggaggccggattcatcagggagctgaggatgatggtgtttgccataagatatgatgttaccccggagtatagccaaattccccatgaccgtaacgaggaggaggcagctttggtggccattggagaacttcgtcaccactttgatgaggagttggagctcgccgccgcttcaaacatcattgacggaaggtcttcacgatcactgatcagcgtcacgtga

SEQ ID NO: 19041 - DNA, 237 bp, Oryza sativa
  Clone ID: PAT_MRT4530_24540C.1
atggcgtttgctgaactggttgcaaaatctgccgtcttggtggcgtctgctgaattggttgcacaacttgttggactgcgggtgtttgttgaatcgactgcgcaacctgctgccttggtggtgtttgctgaatcggctgctgctgggttggatcaacacaaccggggattaactaattggcccggtgccgatgatggtgcagcaggtgaaggagccgataatggtgccgtcggctga

SEQ ID NO: 19042 - DNA, 1683 bp, Oryza sativa
  Clone ID: PAT_MRT4530_24541C.1
tcatgatgacatcaccactgagcatagcactggaccacaccaccgctggcgatctagggcacgtcggtgcaaaccgagggcatctacgtgaagaggatggcgagacgaactcaccgagggccggcgctactgtcatcggccaagggtcgatcggctgtcatttatgaatttaaccgcggtttctttgtctttgttcttgttgattgcaggatcaaatcaactggcacgcttgcatacccgaaggcgagttttggacctgcactggagttaagcagatctcccaggcctcgtgttttacgtcaacacgcttttggcatgcccggtgggactgattagaagtcagagttttcctcatggatgagaagccgccagcatcgttgtcttcggctggtgaacccggctctgttaaagctaagatccagaagctaggtctatctgaagtcgaagaaggcaacatcgtgaatatcactccggacaagttgacacctgatcagcagaaggatcttgaagcaatgatgcaacaagcacgtaacctattcttgaactcattcatgcaaacccgcaaggggacagttgtgcagaaatatgaagtaaaggtagttgctgatgtccctgggaccggttcttctaaggatagagaagtgaaacaagctccaagtgatgtggctcaaccgagtgataagggtgctgcagatggttctcaaggaaatcaaggtgttggctctaatcaggatggcaatatggcgcagttacagtttaacaactttcaggatcaggttgactatgccgtgcaccatgctttgatcaatcaatctggaatattggtcaatactttgtcaaacatggtgaagacaatggttgatggttcaatggctgaatatcaggctataggactggtttatctaccaggaggggtgttccccaattatcggccgttagtcactgataatcagccagctgttcaaccaatttctctgaatgcaccatcagctcagccgacggcaccattatcggctccttcacctgctgcaccatcatcggcaccgggccaattagttaatccccggttgctggtgagagaacaaccacagcatagtggacaaaatgtaaatcggctaacgcaagatcaggttgcggctaagttcttacctcctcaacctactgttgatccaacccagcagcagccgattcagcaaacaccaccaaggcagcaggttgcgcagtcgattcaacaaacacccgcagtccaacaagttgtgcaaccaattcagcagacgccaccaagacggcagattttgcaaccagttcagcaaacgccatcaaggcaacaggtcattcaaccgattcaacagcaaggcttgatgaatgcatcggctgggtttgcaacacctggcagtcagccagggcagcatgctgcgaattaagttgtcccagagcacttggttcatcatgtacagccagatcaaacggtgatccctcaagttgttcctgaacatttggtgcgtaatatccagccagattttcaaaattaccaggggggcaatttgaattatcagtattagcctccatcaccgcaagttcaatatcagcagggaggatcggctcaaccccagtttgttcctcaatacaatcaattcgagcccatgtcacaacaacctcaaggagcacctcagcaacgaccat

SEQ ID NO: 19043 - DNA, 3242 bp, Oryza sativa
  Clone ID: PAT_MRT4530_24542C.1
atgtccacctcccccggccgcacccgctccggccgccccctctcctcctcctcctcctcctcctcctcctcctccgcccccgcccctgcccccaagaggcggaggagaccggacaagccccccgaccacgaccccgcccccgcccccgcccccgacaaggatcttctcgtctcccctcacacgcctcctatggacgccgaggcgcccaagcccatacacctcctcaacgacaaggacaaggacaaggagggggacgatggatctcaccaggatacacccacgctacagtcaccccctcgtggatctgatgctcatccaataccaacggagctcaatgtttctgctgctgtcgccaggcctccacaaccaccccatgcacaaccaacggagctcaatgctgttgccgccgccgcgtctgctctaccaatggagcttgatgctgctgctgctgctgctgtgcctgccgaatcaacggagctcaatgctgctgcaaccgctgtgcccgcacaaccgacagaggtcaatgctgctgctgagattgtcaaaccaattgggctcaatgctgtcgctgctgagactgcaaagccagacatggccatggaattgcaggaaccgcctactgtaactgcagccaatgggagggatgtttcccatgaatcatttgaacaaaacctgcaacaccaggtcctggacaatgccttaaccgatccttctttgcttgccgagagcactgcaacaccagcctctactgctggcctcaagcctgcgaggcgcttcacacgatcgctgctcaagaacaaaccagaggaagagcccacagctagcaaaagtcaagaccctgctgtctccatgatatcggaggacaacaacgaggcctctgttgatttggctcttgccccagggaagccacagaggaggttcacaaggtctcttctcaaggtaaaggttgaggcgcgctctaccaacaatttgcttcaatccaaggaggcaattgacagcacatcagactcttctcggtcagtgaagaagatggagatgaagatgtctaagaaggtcgcctgcctcacaaagcacccaagcaacattagagagttgctcaacactggcctgctcgagggaatgccagtcaggtacatcatccccagtagcaagttgcagaaggctgtgctgaaaggagtgattacaggctgcaatatccgttgcttttgtttatcctgtaatggttccaagaacatctttcttcatcacaaactgaaatctttggaagctttttgtgtcaacgttgccttgagccaaaacaacatcaagatcccccttccccatcttatgcttgtaagagcaattccagggacaccgggctacacaaattggtctttaaagttctgcttgatgaggaaagttgatgggtatatcaaggatcaaagaatctactgtaatcactgcaaccgagtggttagcccgtcagcatttgaggctcatgcgggtgagggaacaagacgcaagccgtatgacaatatttttacatcaaatggagtatcattacatgagctgtcaatgaaaatatcaaaggacatggaattatctgaacgcgaaacagatgatttgtgcagagaatgtggtcaagggggagatattttcccttgcaaaatgtgcccaaggtcatttcacccagcctgtgtagggctgtctggagtcccctcagagtggtattgtgataattgcagcaaccttgttcaaaaggaaaaggctttagcagaaaataaaaatgctaaagctgctggaaggcaagctggagttgattctattgaacagataatgaagagagctatacggattgtcccaatctctgatgaccttggtgggtgtgccctatgcaagcagaaagattttaacaattcagtatttgatgagcgcactgtgatactctgtgaccaatgtgagaaagagtatcatgttgggtgtttgcggagccagtggcaagttgacctgaaggaattaccagaaggggagtggttctgttgtaatagttgctcagagattcgttcttccttggacaagataatctctgatggagctttgattttggctgagtcagatattgatatcataaggaagaaacatgagatgaaagggttaagcatggacactaatacagatctgagatggcgattacttgctggtagaaaggcttctgaagatggtgacttattgctctctgctgcagtcccaattattcatcaatcttttgatccaatcattgaagttcagagcgggagggatctaattcctgagatggtcaatgggaggagacccaaggatggaatgcctggccaagattatagtggaatgtactgtgcagtgttaactttaggcacttctgttgtgtcagctgcattgttgcgagtcatgggaggtgaagtggccgaactgccactagttgctacaagtaaagaccttcaaggactgggctacttccaagctttgttctcgtgcatagagaggatgcttatttctctgaagatcaaacacttcatgcttccagccgcccaggaagctgaaggcatctggatgaacaaatttggcttcactaaaattcctcaggaacagtcggatgcttatcttaatggggcacacctgactatattccatggaacgtcaaatctgtacaaggctattccttcgtcataatattggtttgaagccttgtgctgtgcatgtatgcagtcagacagatttgtgttttgaagctctgctgacaactgtacataagatgatgaagcatgggctaaaggatgatgatagcacacagaagaaagggggagaaaagatgaaagataaaagtaactcgaggcggcatgatattggtcgaccaaaattcttatccttcagtttggagatatgctggatgatggaggcaatgcattttgcttaattttgtttatctttttttaaaaaaaaaaattggctttcagcattttcagtgtggctgctatgccgctgagaaatgcagctatttttgatgtacagacctcaaacatcagaaactgcaggtttaatgcagtgctgaccctgttctgtttggagttagacttttggtctgtttcttgggttggcattattgcaagatttggaagggcctgtttgatgtggctgtcaagttttgatgggaaagagcatattgtatttgtggatatacatgctagcttaagtaaaagttttgaaggaatgcagtaagtagtggt

SEQ ID NO: 19044 - DNA, 928 bp, Oryza sativa
  Clone ID: PAT_MRT4530_24543C.1
gcacgatcccaccgcctccgcgccctagaaccttccagaagcggcggacaagacggcgtggaagctccaggtgcgcgccaccccgccctccggaaccttctggaggcgcgccggtgtgggggctgaggtgggtgggtgggaggatggggacatatggtctgggggattagatggagcagcgaaagcggcaggagtcgttgatggaggcggaaatgaaggcgcttcttctctttgaaatggacacactcgtcgaggagaactacgtccttgccgtcgaccccccaatcatgatctttggagagattcaaggatggatgttcaacatgaaagattttttcaaagatggtcgtgcccgtaactactcaaaccagttgtggcaatgttgctgcaatcctcgagcttgatgagaatttgaataagcagttccgtgtattttgaaagctgccccacaatgaatccaagaggtgttcctgcaaaagaggccagcgccagattactttctgtgaggccgcagattcagcagtgggtacagcgtatcctgcaaacaagcaccggcagattaagtcttgcgagctcccattttctgagatgagctgagctcatgctttacaagactcttaagccaggagtgctttcgagatgtataaattgattttatgtccccagtcctatcatttgtaagccaagagagtggctcacatttgagcttgagaaaatgcccctgtgaagggagtggtgtagatgaggccactcctttgattccatgggtgtgcgttggtccatgatgtaaaattttgttgctagcccgtttgccccctaggaaatcctgtgctggagaatgatatgcaaatgctgtgcctgagtatttattgttgtcagaatgcaaatgcaggaagttttgaaaaaaaaaaaaaaaaaacccgcggcc

SEQ ID NO: 19045 - DNA, 360 bp, Oryza sativa
  Clone ID: PAT_MRT4530_24544C.1
atgcctcaaaatgtgtttaaaggcaatctaaaagacaaggaagcgaagatcgagttcggcgaggcagcaacggccaaggtgctccgcctccccgagagttcatcatcgctgactgctgcaatgacatcctcgcaagcctacatggatcaatgcgtcatcgttgacatccttgccccggcgctcgtggagacacaggcgatacgcctttatccgcctatgcccatcgacttgccgaagatggagcgaagagataggaagaagagagatgggaagatgaccttgacatatagtggccactgttttttttacacgtctcgttctactgtaccagaaacaggatcaaaccgtctaaggatgtaa

SEQ ID NO: 19046 - DNA, 2481 bp, Oryza sativa
  Clone ID: PAT_MRT4530_24545C.1
atggcactttgtccagactgtggcgccattactgtatgcgaagtttgtggagttcttggttacaaaaatcttctgctatcttgcaaaaactgcaacggagctgctgtgcaccgatactgtctggacaaagttgattttgatgggacagtagattggtcatgtgatgaatgccatcctaggcatggcaaaggtactaatagaagatctttagaagtgactttagatgataaaacagtggttggcaagcagccagaaaatcagtcatcactggataccaaccacgacaagcctgggatgaatggtggtaatgatgactatgtcagtgatgacttgatgttggagagaaataaggaaagatttcagttgcatgacgaggcaaacaatgatatacacctgaaaagtatgtccgctaatgtgccccggtcttccactttgcatgaaaactctgtggcccgaaacgtatcatcctcagcaaatacagggctaccgatggatagcaattgtgtgccatctgcacacattgatattggaaatccaagagacagtagtgtgagactaatattaacaggggaaaatcgaagagaatcttcaatgctgctagatggggcttgttcaggttccttgtcaaaagactcgtcgaaagagaaaattgatcgtgaggccaattcttcccatatggaaccttctgatgctgtcaagaacttctgtaaggacaacccaatgaagcgaagaaaactcatgttattagatgatgatgatgatgatgtaggtgtggaactgtctgatactgttcaaaatgttgtcaaggacaacccaagcaaacgaagaaaactcattttacctgatgatgatgatgtagaggtggaactttgcaatactgttcaaagtattgcaaaggacaacccagggaagacaatacagcttattgtactagatgatgatgatgacaaacaagaggatgctgaaaatctgaatcacctatctcttgagtttgaaggaccaattgagaagcataaaatacacattggatatgccacagggcagagatgtttagaagatgatgaacatggactactggatagtttggatcaccggtctttggagaacacttgtcccacaaagaaacggaggagatacatatgtccaagtgacgatgaagaagaagaggttattaaaggttctacgaccactggatgtgctccgaatgatgttgcaaatacagcttcacaacatgtagatgccaaggaccaccatctgcagtccagaatggcatttgcttcagatttcaccaaacatcagtattatatttactcagagcctatgggtgagcctgcttggagtggtatctttatgacagatagcaatgtgcctattatgttggctgcacacctatcaactaaagcatgccagagagtgtcggaatttgcaagatcgttgcaaccagtagttgaagtaatcaagctccctaggttgaaagcatggccagagaggtgggacaaatcaggacctactgacgacagcattgggttgtttttcttcccgcatagtatgaggccaaatgaagaattagataaactagtgaaagaagtaattgagagtgatgttgtcttaaaagctgttctaggaactgtggagctactaatcttcccctctattcttttaccagaacaatatcatgagttccaggggaaatactacctgtggggagtgtgcaaggccaggaaacataatcctgacacagctgttcttgttgaagaacaatgtggcttggtctctgcctcggaggaagggtcatcggacaaagaaagttatgtcatgaaacatgtcgaggatcgattgcctgcagactgtaacccggaggcacgggagggggacatcaaaactgctttgggagaaggttgtttctcacctgatagctgtttgtcaagtaataaggcaagccctgtgaagggtggatcaccatgctttatgcaaccaggacttggcgataaacctcatgagcctggtgtagcagaccagaaagaagatgagcaagacttcacctctttacctagaaggaatgatcaaaatgctaccaatccaccaatcgactctttaccttccgcgaccagactgtttggattcgttacagcacggtctgaaagatgtcagcaactcatccaggagatggtcaaggaaggtgctctcttattctcggtgccggaagatatgacgatcaatcgatctaccataagcaagagcaatggagtaggagcagctcaggcccctgacagtggctgtcaacatgtgcaggagcgttgtgaacccattgaattcgttccgattgatcacaatgaccccgactcggcttctgaagcctgcctggatctgttcccggttcggcatgagcagattggattgacttctcaggtagatgttaaagaagtagaactggacttgagccttggcgcatttcggcgagcaccttcagagctgccatga

SEQ ID NO: 19047 - DNA, 335 bp, Oryza sativa
  Clone ID: PAT_MRT4530_24546C.1
tcgttcatagatacacgagctgtgacgcgagctatcctatttgtgccttggactgtggattatgacataacagctgattgacttcttatcagtgcatggtgtgccctttcatcatcaatcgtctgtggagagggaccaccttttgtttgtggaaagtgcacaaagactaccttacgcttgtcggcatgatggtctttcacgtggatactgagggcagtcaggactcgctcgctgaagcaagaggacattaggtcactgtacactagggaatcgtgatgaaagaacaacccaacttaaaaaaacattttttgtgattttgattgctcactgattaa

SEQ ID NO: 19048 - DNA, 229 bp, Oryza sativa
  Clone ID: PAT_MRT4530_24547C.1
gtcgttattacccgctgtgcttaagcacataaataggtcagagaggctaccgggacacgaccgatcacacattcagcgagaacatatcatgggccttcgaggacgacttgagacacgggtgccgatcgacttcgtctccgtggctggagcggattgtcagggctgcgccagaggcggcagggccggacacacagcaaggggccacgcgttcgcggccggcagcgtggct

SEQ ID NO: 19049 - DNA, 2589 bp, Oryza sativa
  unsure (1)..(2589): unsure at all n locations
  Clone ID: PAT_MRT4530_24548C.1
gccaagaacaaggccatatgagatttaccagattnnnatggcctgcctcccagttttcatctccttgctgttcctcatctcttcctgcaaaggcgatgaccagctcacacaggcaaatcgactgatctcccccggcgacgtactcatctccaaaggcagggtcttcgcgctcggcttcttctccccaacagcctccaaccagagcttcttcctcggcatatggtaccacaacatctccgagtccgagcgcacgtacgtttgggtcgccaaccgcgacaacccaatcaccaccccttcattcgcaacgctcgccatcagcaacagctctaaccttgtcctgtcggattccggcaatcacaccctttggacgacgaacgtcacggccaccggaggcgacggagcttacgcggcgctgctcgactcggggaacttggttctccggttgccgaatggtacaaccatatggcagagctttgatcacccaactgacacccttctgatgggcatgaggtttttggtgagctacaaggcacaagtcgccatgcggtgcatcgcttggaagggcccagatgacccctccaccggagacttctccatcagcggtgatcccagctcaaaccttcagatcttcctttggaacggtaccagaccatatatccgctttattggatttgggcctagcagcatgtggtcttcggtcttctcattcagtacctctctcatctacgaaacatcggtgagcacggatgatgagttctacatcatatacacaacctctgatggctcaccttacaagcgtcttcaactggactacacgggtaccttgaagttcctggcttggaacgacagcgcgtcgtcatggacagtcgtcgtccagcgcccatcacccaccatcgtgtgcgatccctacgcctcgtgtggtccattcggctactgcgacgcaacggcagccatcccgaggtgccaatgcctcgatgggtttgagcctgatggctccaactcttcttcgagaggatgccggaggaagcagcaattgagatgccgaggcagagatgatcgcttcgtgaccatggccggaatgaaggtccctgacaagttcttgcatgtccggaatagaagcttcgatgagtgcgcggccgagtgcagccgcaactgctcgtgcacggcctacgcttacgccaacttgaccggagccgaccaggcaaggtgcttgctttggtcaggggaacttgctgacactgggagggccaacattggtgagaatctgtacctccggttggccgactctactgttaacaagaagaagagtgacatcctgaagatcgaacttccggttataacaagcctgttgatactcatgtgcatatgtcttgcgtggatatgcaaatcaagaggcatacaccgaagcaaggaaattcagaagaaacatagactacagcatttgaaggattccagtgaacttgagaatgacaatctagaacttccatttatttgcttagaagacattgtcactgcaacgaacaatttttctgatcacaacatgcttgggaaaggtggttttggaaaagtttacaagggagtgttggaaggtggcaaggaggttgcagtcaaaaggcttagtaagggttctcagcaaggtgtggaggagttcagaaatgaagtagttctgattgccaaattgcagcatagaaatttagttaggcttatcagttattgcattcacgaagatgagaagttactcatctacgaatacttgcctaataaaagcttggatactttcctttttgatgctaaaagaaaatcagttctcgattggacgacccggttcatgataatcaaaggtatagcgagagggcttctttatttgcaccaagattcaaggttaacgataattcacagggatctcaaagcaagcaacatcttgttggacacaaatatgagtcccaaaatatcagattttgggatggcaaggatctttgaaggaaataagcaacaagaaaatactaccagagtagttgggacatacggttacatgtctcctgaatatgctttggaaggctccttttctgtcaagtctgacacctacagttttggggtgctactgttggagcttgtaagtggcttaaagatcagttcgccccatctcataatggatttccaaaatcttataaccttcgcgtggagtttatggaaagatggaaatgcaatggatttggtggactcatcaattcgggagagttgtctacttcacgaagttttacgatgtattcaaatagcactttcatgtgttcaagatgacccaactgccaggccactcatgtcatccattgtgttcatgttagagaacgagacagctgctcttcctaccccaaaggagcctgcttatttgacagctatggtctatggaactaaagacactagagaaaacaaggaaagatctgtaaataacgtgagtatcacagcactagagggacgttaaatgtttattacaccattccctgtttagtctataaacttctgtagcttgtagttgtacacttatattatacattagcaattcaaatttatacacagaaaatgttctgagct

SEQ ID NO: 19050 - DNA, 792 bp, Oryza sativa
  Clone ID: PAT_MRT4530_24549C.1
atggaagggagggtgctgcggcggagtgtcacgctggcggaccagctggccgccgtggggcccgcggggacggccgccgccaccgccgccgcggggtcctgcaacctccgcgacctcctcaagctccgcgacgaggacgacctcgccgcgggccgccgcgccgcggtcaccctcgcgtcggccatggcggccgagaggttgacggtggcgcctgcgtcctcggctgccgcggcggcggcggcggcgcgcaccttgctggatatcatccgggatgaccagctcccgtcgtcttccggtggtggtggggaaggtggtgaccccctcgtccgccgcgcggtctccctgcctgctccggttacggcgactcctcctcctccgccgccgccgccggagacgccgccgcgacagctgccgtctgtgtcgccgccgacggtgggggaggaggaggaggaggagcagggggagagggtgtccctgatggcgctgctggagcagacggagcggcagtggagcgccggctcgggcgcgaccgtgcagcagcatctcgcgtctccctccgccgccgcatcggcatcggtatcggcggcggcggaggacgaggcggaggcggaggcggggaagggggcggcgggcggcggctgctgctgcgtgtgcatggcgcgggccaagggcgccgccttcatcccgtgcggccacaccttctgccgcacctgcgcccgcgagctcctcgccggccgcggccgctgcccgctctgcaacgccgccatcctcgacgtcctcgacatcttctga

SEQ ID NO: 19051 - DNA, 3324 bp, Oryza sativa
  Clone ID: PAT_MRT4530_2454C.1
gtgaaaccctaggcttggttggctccaagcttcgcagccatcgccgcctcggcataaacccttctactccgcagccatcgccgcctcgagctgagcttgagattcgcggggggcgcagcaatggccgggaagaagaggccgccgaccgcgctctccgagcccgaagccgccgccgccgccgaggaggaggaggccgcagccaagacggccccggctgcggaggcgccagcgaagaagaagaagctggccatggagcggaagaagcagcggaaggagattgacaaggagaggcaccgccagtccgctgaatcggacgccgctgccgctaagccgaagcagccggcggaggtggcgccggaggctgcggctgcggctgcggcggcgcccgtggctcctccgcctgtgattccggtggtgtcggggcctgggcttcacatgaacgtgttcagggacctggcttcgcctgaggcgtcgcagagggaggccgcggcggaggcgctcgtggcggagctcaggcaggtgcaggtggcgcacgagaagggtgggcggaaggagggggagagcgaagcggagggtggagatgggtcgtcgaggatggaggccgagaaggacgatggcctggagaactgcgcgccgtcggtgcgttacgccattcggcggctcattcgcggtatctcttcttctagagagtttgcaaggcaaggattcgcattgggtcttgcagttgtgctcgaatcaattcatgcaatcagcgtcgaagcaatcatgaagttgatacctaatttgttagagtattcagcttcaatgaggggaccggaagctaaggacaatcttttgggacgattatttggttatggatcaattgttaggtctggacgggtctcgggacagtgggcacatgaagaaggttctcccattgtcaaggattttgtggatgaggttatcaaacttggtagcaagaaacgatatttaactgagcccgctgttgccgttatcctggatttagctggaaagctgccagaggaagctataatatctgagattctggaagctcccagtgtgcaagattggttcaacagagctgctgatgctggagatccggatgcactctatctggctttgaagttgcaagagaaaacaaatgcccaggagatatttgggaagcttctgccatatccattcagtccagagggtttttttgcagaagaacatcttctttcaattgctgcttgtttcaagaagtatactggtggaagatttgactgcatgacaaaaacgagaactgttaaagatttggttgccaagttccgaagtggtcaagattcgtctttgggatatgaggtgacatcatttgagctgcacgagaagttcaaatggccaaagccagctatatcaacatcaatacgcaatgaatgcattgaacaacttcaattcttaatagaagatgcacaaaaggatgaagctttacacgttagtgaggttaagtctaatgacctgggcttctacttcatgcgcttcattaacaccctttgcaacattccctcagtttcactcttccggaccttgagcagcaacgacgacaatgcattcaagaagttactggatgtagaatctctgcttttctatgagttgctcctccaagttcttctccatccagatgagtactgggaggcagcaattgatgtgactatatgctgcaagaaatcgttcccttccatcgttcagaatgacaaatccagtggacagccatctaatgagggtgcggaggtgtttaatgaggatgggccaggcaaatctaacaaggatgggccggaagagcataatgatgatgcgtcagaggattctaatgaggacgggccactagagtttatggatgtcttccgtgtggtctgtgatgaaattacagaaacagggcttcttgacatgttgagagttgtgaagatagatttgaaaggttctcgtcgccagtcaggtagtgatgatgatgaagatgatgcatgtgttgacattgaagatgatgatgaaaccattgtggaggacgcggaggttggggacactgattctactgcagacggactggatgaggaaatggatgatgattcagctgatgaagtagatgaaggtcaagatgatttgaaagaatcagttgcccatgagtcaaaggatggagatggtgcagaagttaccaaagatggggatgactcagatgattcagatggtatggatgatgatgctatgttccgcattgatccttacattgcgaggattttcaaggagcgcaaccttcctggcagtgaaactaagcaatctcaacttatgcggttcaagctccgtgtccttacattacttgagatatatcttcagaggaatacaggaaataatctggtgctggaggtctattctttcttaatgcaagcttttgtgaagtcacatagtgctgatggcagtgagcaattcaagcaacgtataggtggtatattgcagaaaaggatattcaaagccaaggattatcctaagggtgatggtgtagagattagtactcttgaaagtttgctggagaaagctctaaaattggcatcgcggtcacgatacaccacggttgcttctgtagcccaaaatgctgcattttggcttctgaagatcatcaattcaaagagtcattcgaaacaggagcttgcgagtgttgtcgaaaagttccaatatatattgaccgactacttcaacaacaagaaatcgcggttgaagcttgggtttgtgaaggaggctgtccggaggaatccttgggtaggagaggagctctttggatttgttctgcagaagattggatgcacaaaagctgaatatcgaagagttcaaacgctagaattggtagactgcatactcaaatcttgggctggtgatgattcgagtgcatcgaaggtgttgaagaagcacctttctcagttgtgcgagctgatacaagaagttcttacaaagatcccagaaaacaagggtcaccacatgggcctccagctgcctaagaaaggaaacatgctttttacaatgagggctagtctacagccggaagtgacctctgacaagcagagcccacgcctcctgccccgctcgccagcttttccggtggacgcccatttcaaccttcattcaatggccagcgacttccttgccatgcttgcgctgaagcttggaatggatttgaccgggactgacataccaactccaggagttagcacgccggctccggctagggacgagagccaggaagctctcatcattccgacgggacggggcgaggcgtgtgacaggccgcctgttgccacctaa

SEQ ID NO: 19052 - DNA, 623 bp, Oryza sativa
  Clone ID: PAT_MRT4530_24550C.1
ttttttttttttttgtgcatgcaacaaagattgacaaagttgcatctcaagttagtaaattaccaacaaatatgtttttttttttgccaatgatccaagatgaactcaattcaatcagtacaacgccacagatatggaagcagaggattaagcacgaactaccaacacacatcaaatagcacaagcacaaaacaatttactatgcatgtcaaacaaaggcacaggaaaacagagcatcaagtgtcaaagccagagtagacgccactccccctcagaagtcgcttctcttcttcaacgtagttcttccccctgctagcctggccacgatctctcttccgcttttccttctgtgagaaggaagcatctttattctctttctccatctgcctcggctgcgggtttcgcacaccaataagcttttctccctcagttactgcagttcttgtgcgctcccgttcttcataggattcagtttgatcttctttgtcgttgcgatctttcccggtggaccaagaccagttaggctcaacccctggaggccgcaccgtcaagacagatgggccgccacgatacccatgccggctcaaagcattgaaatccacaccaccaggtttccctcgtgc

SEQ ID NO: 19053 - DNA, 2685 bp, Oryza sativa
  Clone ID: PAT_MRT4530_24551C.1
atgtcttcccgcggcggcggggtagggggccggcgcggtggccccggcggcgccagcagtgtccgtggcggcgagcgcggacgcaaacgcggtcgaggtgctttggacgccgtggagccccgcgtcccgcttccacggggcacgggatccggccctggggctggccgggacggagccgccgcgccggtgccggcgctgcaaccggcggaggcggatgtgctcagcggcgaggtggagacggagatggcggccgggatggaggcgcgcgagggggcgtcgtcgtcgtcgtctgcttcggcgccggcggtgggggaggtcgagccgccgtcgcgggcggtcggtgcgctgccgccgacgtcgagcaaggcggtggtgctccaggcgaggccggggttcgggacggtcgggacgagctgccgcgtccgcgccaaccatttcgtcgtgcagcttgccgacaaggagatctaccattacgatgttgccatcgcccctgaattgagatctcgagaaaggaacaggaatataatcaatgaacttttaagatcacacaaaaaatacttggatgggcggcgttcgcctgcttatgatggaagaaaaggcatgtttacggctggtgcattgccttttacagacagagagttcgttgtcaaaattgcaaacgaccctgagagaggaaaccagggggagaaagagttcaaagtgaccataaagtgtgctggtgctgcaaacttatatatgcacagccttaagcaattcttggctggtacatatccatctcaagatcgtttttctcacaagcatttggacataaggatattgattgtggcgttgaatggtggagaggatatttctgcaacaacattttacaaggctcagccagtaattgactttgcattggactatctgaacatgaacattcgtgatgcttattcaaggtttgatcaagatgggacaagggtatcagttgtccagtacttcaatcgccaatacagttattctttgaaatatattaactggccgtgccttcaggctggcagcgacagcaggccaacatatttacctatggaggtttgccgcatagtaaaaggacaacgctattctagaaaattaaatgaatgtcaagtcacacgcatgttgaggttggcacgtgagacaccagaagaaagggagaatagtattttagagattgctaatgaaaacaactatggcaatgattatcatgccagagaatttggcatcggggtgacaaaccaacttgccttagtcgatgctcgtgtactccctgctccaatgcttaagtaccatgactctggacaagagaaagtatgtaatccttccattggtcagtggaacatgaataacaagaggatgctcaatggtggatccatcaattactgggcatgcttgacttttgcttcctgcgtacgtctggctgaagttaggacgttttgcaaggagttggttcgtgtgtgcaatagcattggcatgcaaattaccggggaaccatgtgtccgtattaggcaagaacgccaagatcacttagatgctgctgtcagagatatacatcgacaatctgcagaatttctttctcaacaaggtgtgatcgggcaacaacttgagttactggtaatagtactacctgatgcaaatgcaactgtcttttatggaaggataaagcggctttgtgaaactgaacttggtgtgataactcagtgctgtttagctaggaatgttcagaatgtccgccaacacaatatctccgaaacctggcacttaaaatcaatgttaagaattataaacagaagtgtttatgttatacgtcaattgcgggctggggaatataaattgaagagatttgctccggtcgagaaaaagtatctcgaggttgttgcatcgatggattggccagaagtgtcaaaatacaaatgctcggtttcttcgcaaagccatagggaagagatcatagctgatctcttcacagaggtgaaagattcacagaacagacttgtttatggtggaatgatcagagagttgatagagtctttccgtaaagcaaatggcagctacaaacctggaaggataatattttatcgagacggtgttagtgaaggccagtttagccaagttctgcttagtgaaatggatgcaattcggaaggcttgtgctagcatagaggagggctacctccctccagttacctttgttgtggtgcaaaagaggcatcacacccgtctttttcctgaagatcatcacgcgagggatcagatggatcgaagcagaaacatcttacctggaactgttgttgacactaagatatgccatcccagtgaatttgacttttacctttgtagccattctggcattcagggaacaagccaccccacgcattactatgttctattcgacgagaacaatttcagcgccgatgcattgcaaacattgacttaccatttgtgctacacatatgcacgctgcacgcgatcagtctccatagttcctccggtgtactatgcgcacctggcggcttccagagcgcggcactacctggaggagggatcactccccgaccacggatcgtcttctgcttctgcagccggcggttctcggcggaacgaccgtggtgtgccggtgaagccgctgccagagattaaggagaatgtgaagcagttcatgttttactgctga

SEQ ID NO: 19054 - DNA, 464 bp, Oryza sativa
  Clone ID: PAT_MRT4530_24552C.1
tcctcacctctaactggatccttaacggccgccctttttttttttttttttttttttttttttttttttttttttttttttggcaaggaatataccctttgaattgaacattgtaaagaatttttagcttttgaaacgaatgtatattgccgcaggcacacacaaagagcacgcggggtgacagcccggggggcgccccgcccgcggtaacaaacttgacggtcatgagcccgagcgggccgggtgagggaaaaacctgctgtgcctgaatccaccctcacggttccatgcgcagcctgcgtatccaccgcggccgagagtcggccgcgccacacacgcgggcaatccccgggaggcgggctcccggcccaacggtgaaacggtggccccggcgcccccccgcaggagagcccatacggcttgagtccggtgagaacctgtcgggcacgccgctcgacgggtcg

SEQ ID NO: 19055 - DNA, 1903 bp, Oryza sativa
  Clone ID: PAT_MRT4530_24553C.1
atggcggcggcggcggcggcagcagcagcagaagacgaggagaagaggcctctgctgcttcgtccgaacggcggcggcggcaaggaggaggaggacaagggcggcggcggtgggtggagggcgtgcgtgctgatactggggacggagctgagcgactgcctggcgttcgccggcatcgcgaggaacctggtgagctacctcaccggcgtggtaggggagagcaatgtcgccgccgccagggacgtgtcggcgtggacgggcacctgcttcctcacgccgctcgtcggcgcattcatcgccgactccttcttgggtcgccgcaccaccatcctcctcttcctctccatctactccatggggatgatcacgctcacagtctcggcgtcgttcgcaaccccacaccttgatgcatcctccgatggcgtcctccgcgccaccgtgttcctggggctctacctcgtcgccctcggcgtcggtggcatcaagccgtgcgcctcgccgctgggcgccgaccagttcgacgacgacgacgcggcgccggcggcgagggcgtccttcttcaactggtactacttctgcatcaacgtcggctcgctgctggcggccaccgtgcttgtgtgggtgcaggagcgcgccggctggtggctcggcttcgccatcccggcggcggtcatgaccgccgcgctcgccgccttcctcttctgctccaccctgtgcggcctccgggcgttccacacgccgccggggagccccctcacgcggctctgccaggtggtcgtcgccgccgtcaggaatcgcggcgtggagcttcccggcgacagctcgctcctgcatcagctccccgacggcgactaccggatcatcgagcacaccaatcagttcgcgttcctggacaaggcggccgtagtggcgtcgccgccggcggtggcgatggcgagcccgtggatgctgtgcacggtgacgcaggtggaggaggtcaagatgctgctgcggctgtccaccgtgtggccgacggtggtgttcttcttcgccgccacggcgcagatgtcgtcgacgttcgtggagcaggggaaggcgatggacacccgcgtcggcccgctcgacgtgccgccggcgacgctgtccaccttcgaggtggtcagcatcctcctctgcgtcccggcctacgacgccgcgctgatgccgctcgcccgccgcgtcaccggcgaccgccgcggcctgtcgcagctgcagcggctcggcgtcgggctggcgctgtcggcgctggccatggcgtactcggcgctgctcgaggcgagccgccggcggcgcgcggcgacgagcatcgtgtggcaggcgccgtcgtacatggcgctgggcgcggcggaggtgttcaccagcgtcggcctgctcgagttcttctacgaccaggcgcccgacaccataaagagcctgtgcaccgcggtgagcctcgtcgccgtggcggccggaagctacctcaactcggccatcgtcgcggtggtcgcgtgggcgacggcgccggagaagggcggcggcggcgggtggattcccgacgatctcaatcgaggacggctggattgcttcttctggctcatgttcggcctcagctgtgtaaacctgctggcgttcgtttactcttctacgagatacagctacagggttgctaactaatacttcctctgtttcacaactcattgaatcgcaaattgctgtagcttctctgacaactccagctgtggagttgtttctgggcattgctaatatatgttttagtctgaaggaaaattctatgagcatcctgctgatgtttctggacgatgtaacattcctgaaaggagctgttcctgttattcgtgtgcttgtcattgctttaatcaagtaccataaattgccattgctttaa

SEQ ID NO: 19056 - DNA, 672 bp, Oryza sativa
  Clone ID: PAT_MRT4530_24554C.1
atggttcaactcgacgccgacgacgcgaacagcggtagcgccgcctccgccacccacagccacgccattggcgacatgcctcaaccggacgcgagcagccgcacaagcgccgacgaggatgatcacggccacaacgttggcatagacgacatcgacgacgccggagacaacggtagcatcggctccgactccgacgtccccagctgcgcggtgtgcacggagcccctcgagtgggcggcggtcggcccgtgcggccaccgcgccgtgtgctccgcgtgcgcggcccgcgtccgctcggcgcccaaccccgacaaccggtgctgcatctgcaggacgatctgccccttcgtcgtcgtcaccaaggccgcagcgggagtcgtctccttctcgacgttgccggcggtggccagccacgacgacgggagggtcggggagtactggtactgcgccgccgtgtcggcctacttcgacgacgagcagcagtacgaggcggccaaggcggtggcctcgcggcgccatggtgatcagccggcgatggtacaccgagccgtgcacggtgtcggttcacccaaagccccaacaatgcaaattgcactcagggtttacaaaacacatagtcacatagagattggcccggatttcacggaacctggatttcctgtaatggagtaa

SEQ ID NO: 19057 - DNA, 285 bp, Oryza sativa
  Clone ID: PAT_MRT4530_24555C.1
atggaagaagatgatgaagaaaatgacaacgttccagactgggctcaatacggtggatttgcagatacaacaggcgatgggggtggagctgttgaagaaaacaacggtgcggatgatctaggtcagatattgtgcgacgtaaagaaagactgcgaaagtgaaaaggaggtccaaaaattggagcgttacgaacagggggcacaaaaggttgggtaccacgctggaattgctgcaatggaaggcaaaataatggcgttactgacaaggcatttggcaagttattga

SEQ ID NO: 19058 - DNA, 627 bp, Oryza sativa
  Clone ID: PAT_MRT4530_24556C.1
atggcggcgaggaggaggacggcgacgatgcggctgtcgcaagacaacatcgagtggatcctcgcccgaacggagctctgcaccgacgacgccccggacatcgagaggtacatccccttcgtccccgacgccgacgtcgacgaggaccacctcccggagatctactacgacgagccggaggcgctgctggtgcacatcaacggcatcctgaaggccacctgggccaagttcagggacttccagagctgggtccgcgtcgagtacggcagcaatggcttcgtcgaggtggagtacgacgtcgacgagttcgaggaggcgcagcggctgcaggaggagcggaggctgtggcgtgcgcatgtctgggagaaaatcttcgccgatgatccgccggtggaaggcgagttcaccgagtatgtcagcgtatatgatcaagagacgagggcattcgtgatgagaccgaaggaattggagggtggcggtagcagtggtggccagattcgggccgagtctggcatgatctggccggtgggtggctggcggcgggggctgacggtggcggcggcgacacctggtagcgaagatggcggcgacggtggcggagccccatccagatccacgccaccctga

SEQ ID NO: 19059 - DNA, 1979 bp, Oryza sativa
  Clone ID: PAT_MRT4530_24557C.1
ttttttttttttttttttgctgttttttatacattgcttttccttctttctttctttctttcttttacattcaacaaccaaaaagaagaaatcatatttttctgaatgacaaacaccatgaatctccaacgaaataaattacattgattaactcaatattacaatataaatataaaatcaaaacatcctacatcccacttatggacgagccacgcccacacaaaaccaatcaaacggcgctcctcctattcctgcaattcgtcgagcgccttgagcaggaacggcttgaatcttgtcacattcaccgtgacgtcctgcttcatgacgatctcggcgagcgccggccagccctgcgcgtggatggccatggggtccttgaacacgtagtggtcccttgggtacttgtccttgagcgtcgtctcctcctccgagacgtaatactcgacgtaccggagccgcatgtcgcgcgccggctgcccgtagaagtttgtggccatccagtccatcttgccccacggcacgatctgtacgagcacggcgcccgttgggaggaagatctggtttgtcagcccggcgccgtgcaccgccagcagcacgtccgccgcgttcaccttctcggcgaacccgcgcacgtccgcgccggcctccgccacggtcaccgcaaacccgaggtcctcgcagagcgcggccacgtcgcgcaggttgagcagcttgcgggtgcccttcctctcgatcatcagcatcttgggcttagcgccggtcttgtcgcccagcaccgccgggctgtcccgcggcaggccgaacgcgcggcggaggaacctgttgtagtcgaccatggagtagttgcgcgggtttcgcgtcgggtgcggggagatgatgaggtcgcggtcgcggtacagcccgaggtggccgcgccggaagcagtgcacctcgtcgtccttgtcgaagttgatcaccccgtagttggagagcttcttcaggagcggcgtgaacttgtgcacccaccacggcttgaagttggtgatgaggaactgcacctcgccggcgaggtgcgacgtcgttaggaacagagggatcatcacgtccgtgttgtcgtggaagaagttgtcggtgtatccggccacggagaagaccaccgccgggacgttgtgggtccgcgtgcaggccggcgcgatggccggcgacgagaccgacttgatgatgacctccacgacgcccgggaggaggaagtcgtccttgcgagcgtacggtcggatcttcttctccccgttgccgtcgaacgcgccggcgctggacggatttacgaagaacatggttttctcctttgggctgatccggatatcgccggtgagctcgcagaccggtggccgcgcatatgggaagccctcatcaacgccgttctcatcgcaggagattgtggcctcagcttcgtccccggatggtttcgttactgtttcctcctcttcattcttttctgtcgtctccgcaaagcttggcactttccggtccgtctcatcttcaccaacatctttctcgtcctcttctttgctctgttgttgagccagcacagggttctgctgagtcgacgcaggtggtgcgttcttcatcaccaaggacgtgctctcgaagaccggcgagtagatggcgaaaaggcgggcaaaggagatgtaggtgaggagagcgaggcagcagccggcgaccagcccaatcccgagcttcttgggctcgatcctgccaagctccttggctagccgcggaggcctccgctctccggccggccctggtggcttggacggccgcgtgtacgccgtcgacgacatcacgcaaggactcctgagagaagcttagcccagaggtaccaaccagctgcgatcaccagctagcacctaacatatacaagtttttgttctaaggcttaaatccgcacatgacgagccgagtgtaacatgtaggcgatgattgctctccttggaaactag

SEQ ID NO: 19060 - DNA, 186 bp, Oryza sativa
  Clone ID: PAT_MRT4530_24558C.1
atggacagggaggcggtggggtccaccttgagccagcggctgatgaacatcatgatgaccaagatcagccacaccggcaaagtgcaccacatgagagcgaagcatcggatggctcagagcctagggcagattgccaagttcaagcgccgatatgagctggaagcagaggaaaacaatggcaggtag

SEQ ID NO: 19061 - DNA, 5911 bp, Oryza sativa
  Clone ID: PAT_MRT4530_24559C.1
ctgccccggcgggacgcccacgaggcaccagaagaaaggaaaaactcaagaacgctcactcgccctcatgggcaggtgaccgaggtgccaaaagccccacaccaagaagggaacatggccgcagggggaagaggagcggtacagtgcgtacatcaaggcgcacagcgaagcgtgctggggatcgcggggcccaggccgccggccccccgccgcgctgccaggagccagcagctgccgctggctcaagatgcaccaggcctgtcctcaggtgcggcaactcacgccgagcggcgagaagagctggccctccagcctcacagccgttcaggtagcaaaccagctgttgatggtccgggaggatccccctccacgacctgctcagcgacctaaggaccgcgattgcagcgcggctcaccgggggagggacgggacagcgagatcaagtatgtgctggcacacgcacctcaagaagcggctggacccgaagccgtcgtccgaccgggaaaccgtcgccgcccaagcgaaacgcgaccaagaagaccccagcggtgtcggccaagatcgacgttccgaccaccgagccgttgacgctgaagaatgagccctcgaggcactccgacctcagccggcaccgtccgcatcagccccggccgtcgtgccaggaaagtaaggcacgatgactatgaggcgaagccggcgatgatcgtgagggcgcctggagctgcaggcggccagcccgctggcagagcctcctgctttccggcttgcagccctcggcctccagaaggagtgcaagtggcagctggccggcggcgccggcagccggcgccggcaacaacttcctcggcctcagggctggcatgctcgacttcagaagcctccccatgaaatgaaatgatcctgcaaaccaatccatgatcgttacactttctcttctcttttgggttcttgatttcttagctagctttggttactgcttagtgttagtccttcttaattaggatcagatagaggaatacttcctttggggagatgatcagtgatcttgttgatcacttcctccattttgtgtaaatactgttccactcatacttagttcagttgatgatatggttatttaggttgttggatgtaaaaataaacacaatgtgggagatctatggtatttgtcactccttgtcaagaacaaaaaaaaaaacaatcatcaacgccaggagctgttttctcacctgatatgatcggtgaggcagttgctgacaggacaattgaactactgaggctcacgaactcagagactcagtgctggcaagattggcttttatttgctgacatttttttctttctgatgaaaagtggctgtattgattttcttgatttcgtggacaagcttgcatctcgagtaacaaatagtgatcaacagattcttcgcagtaatcatgtcacttggttactcgcacagattatccgcattgagattgtgatgaacacccttagttcggacccaagaagagagcatttgaacagtgatcagcttcagaaaggcaaacagatagatgagtggtggagacaaatgacaaaagcttctggggagaggatgatagattttacgagcttggatgagcgggcgatgggcatgttttgggttctctccttcaccatggcacaaccagcatgtgaagcagtcatgaactggtttacatcagtaggagtagcagatttaattcagggacccaatttgcagccaaatgaaagaatgacaatgatgcgtgaaacttatccactgtctatgtcattgctttctgggttgtctatcaatctatgtttgaaacttgctttccagcttgaagagaccatatttcttggccagaatgttcctagcattgctatagtggaaacctatgttagactgctgcttataacccctcattcattgttccgcccgcattttacgacattaacacaaagatctccatctatcctgagcaaatctggtgtgtctctgctcctacttgagatactgaattacaggctacttcctctatacaggtatcatgggaaaagcaaggcattgatgtatgatgttacaaagataatatcaatgattaaagtcaaacgtggagagcatcgtctttttagattagcagaaaatttgtgcatgaatttgattctctcactaagagacttctttttggtgaaaaaagaattgaagggtccaactgagtttactgaaacacttaaccgcataacgataataagccttgctatcaccatgaagacacgtggaattgctgaggtcgaacatataattcatcttcaaccattattagagcaaattatggcaacgagccagcatacatggtcagagaagactctaagatattttcctccccttattcgagattttttaatggggaggatggataagagaggccaagctatccaagcatggcagcaggctgagacaactgttattaatcaatgtaatcagctactctcaccatctgctgagccaacctatgttatgacatatttaagtcacagtttccctcagcatcgtcaatatctttgtgctggtgcttggatgctgatgaacggacatctagagatcaacagtgcaaatcttgcccgtgttttgagagagttatcacccgaagaagttacagcaaatatttatacaatggttgatgttcttctgcatcatatccaacttgagctgcaaagagggcatcaaattcaggacttactctctaaagcaattacgaatcttgctttctttatctggacacatgagttacttccattggacattcttctgttagctcttattgatagagatgatgatccttatgctttacgccttgtgataaatctccttgaaagaccggaacttcagcaaagaattaaagcattctgcacttcgcgttctccagagcattggctaaaaaatcagcctccaaaaagaatagaacttcagaaagccctcggtaaccatctctcagggaaagaacgttacccccccttttttgatgacattgctgctcgtctgcttctagtcatcccgttgataatttataggcttattgagaacgatgccacagatatcgcagatagagtccttgcagtttattctacctttctggccttccatcctctaaggtttacatttgtgcgtgatattcttgcatatttctatggtcatcttccatccaagttaattgttaggatcctcaacgtgctgggtgttagcactaagacacctttctcagaatcatttgcccagtatctagcgtcatcaaattcatctatttgtccaccaccggaatacttcgccaaccttttgtttggccttgttaataatgtcatacctcctttgagttgcaagtccaaatcaaacccatcggatgctgctggcagtacagcacgcacaacttataacaagccttatacatcttccgctggaggaatcagtaactctgatggtcagagggcattttatcaaaatcaggatcctggatcatatacacagcttgttttggaaacagcagccattgaaattctctcactttgtgtgccagcttctcaaatagtatcctctctagttcaaataatagcacatgtacaagcaatgctcatacagtcaaatagtggtcatggaatgtcaggtggtttgggccaaaactctggggtgccgacttcttcaggtgggggagttgaacctgttggtgccaaccgaccaaacaccacagcaagtggaatcaatgcatctaactttgtttctagaagtggctattcctgccaacaattgtctgttctgatgattcaagcttgtggtctgttgctggcacaactcccaccagaattccacacacttctatatgcagaagcagcccggatcataaaagattgttggtggcttgctgatagttcaaggcctgttaaagagcttgattctgctgttgggtatgcactgttggatcctacttgggcttctcaagacaatacatctacagccataggtaacatcgttgcccttcttcactcgtttttcagcaatcttccacatgaatggcttgaatctacccataccgtcatcaagcatcttcggccagtcaactcagttgccatgttaagaattgctttccgcatattgggtcccttgttgcctcgtctagcctttgctcgacctctgttcatgaagaccttggctttgctgttcaatgtgttgggggatgtatttgggaagaattctcaggcttcacctcctgtggaggcatcggaaattgctgacataattgacttcttgcaccatgcagtcatgtatgagggtcaaggaggtcccgttcagagcactagcaagcccaaactagagatattgacgttatgtgggaaagaatgcgcggcaatcagtggagtgatgctattagacaagcagttggttgatggtcagagtcaggcctcgccatccatgttactacctccgcattcttgcactgcagactactgtagacagtactacatcgagggtgagcgagctgtgacacaactgctcaaggacgtggatcctctgcagactgcagtggtactgacactacgcagacaacgcccccgtcgagagctcagtccagattacacgtgtacgcgtaacagcattttggaggcctggagggccaggaggctcgcagccgatgtcagtgacggcctgacgccgtcacgcctacgactcgcctcggcctttccacttctggccgcatctattaatccccgagcagcgccggaacctctccaaattaagactcgggtgagctcatcaggctcagttcatccctctcgtgagatacagatagcctcgcaaatcagggatcagcgtgtgatgggcaggcagccgtgctgcgagaaggttggcctgaagaaggggccatggacggccgacgaggaccagaagctggtcaccttcctcctctccaatggccactgctgctggaggctcgtccccaagctcgcagggctgctcaggtgtgggaagagctgccggctgaggtggacgaactacctgcggcccgacctcaagaggggcctcctttccgaagaggaggagaagctggtcattgacctccacgagcagctcggcaacagatggtccaagattgcggcacggctccccgggaggacggacaacgagatcaagaaccactggaacacccacatcaagaagaagctcaagaagatgggccttgatcccgtcactcaccggccggtgatgtcactcgctcagcctgatcccctgaagcagcagcagcagcagcatgaaccgtccgtctccggcggcaccggtgccgacgacaaggaggaggaggaggaggagacgccgacgagcgcccagccacagggcgtcgcttgcgctgcttcatccgcctccgccgtgtcgtcgtcatgctcctcgtccgcctcggcctccgccgcgacacccggcgcggacgtggactggcccggcctcttcgaggtggatgccattcttgacattgactgggctggcttattgtctgcctgcggcgacgatggcggctgcagcgccattggcgtcgatatgttgttcgaccaatgctctgacgttggctttgatcaagatgtgtggatgtgatcctgatcctgacaggagagtttacgtccgtgagtagaattagattggccgtgaagttgagattcatatcttcttctttcactcttctttgttttcctatattgaattcgtccatgacaagcatgcatatttgttgacaatgaagaagagaagaaatggtttggtgtgttttgtgataaaaaatgtagaaagtgttcaagcagttgcagttcacttcatttcggggaatccatcccttatgagcaaacatcaaaaaaaaaaaaaaaaaaaaaa

SEQ ID NO: 19062 - DNA, 756 bp, Oryza sativa
  unsure (1)..(756): unsure at all n locations
  Clone ID: PAT_MRT4530_2455C.1
ccggccgggcaaaaaaaaaaaaaaaaaaaaaaaaaaaaaaaaaaaaaaaaaaaaaaaaaaaaacacacactcacacgcaacggttttgttcaatcgatcggccgtcaccgcgagcgcacgatggcgagcgctcgtcgcagccgcggcgtggcggcggtggggatcgcggtgtttgtggctgtcgtggtggtggcggcgggcgccgggggcgcggcggcggtgtcgtgcggcgacgcggtgagcgcgctggcgccgtgcgggccgttcctgctgggcggcgcggcgggccgggcgatcggtgctgcggcggcgcgagggcgctgcgcgggatggcgggcacggcggaggcgcggcgcgcgctgtgcaggtgcctggagcagtccgggccgtcgttcggcgtgctccccgaccgcgcgcggcgcctcccggcgctctgcaagctcggactcgccatccccgtcggcgccgccaccgactgcagcaagatatcctaagtggcagcggcggcgacgacgacgccgctacatggcgtgagttcgtcgcgatcggtgcatgatcgaacatgcatggtgttgacgcgggagaagagtgatttggcttttgcgcatggtgtaatctgatctgatctaatccgtgcatgaataagtactagacatgcttgtaataactcatgagctaaatatcactcagatgagatctcagatttgagattttcttaaaaaaaaaaaaaaaaaaaaaaaaaaaaaaaanaaaaaa

SEQ ID NO: 19063 - DNA, 610 bp, Oryza sativa
  Clone ID: PAT_MRT4530_24560C.1
ctctcttcgtcgaaattccaaatttgtcttgtatgtatttgtcactttcctatcatagctgtaaactgatattggttgcttgggatgttgggttgtttgtcctactagatcgtggatttattgtgtgttgaattgggtttagtactttggtttgactatgttgaagataaaattttaagatcagagcatgtgttctgcaactagttatacctgttggcctagtttttttttttttttgcatgataatttttttttagcctagcttgttagttgctgcttttgtgcagcttcacttttgtttttgttcctctttcttacttctatagagtaaacaaacaatagcatggatgcatggataaaatcatgttttctctagtccttgggaggcagaggtaatttttcgtgttgatcagactggattaacactatgaggtacatgtaactctcaatacctcccatgtttttgttcctctttcttacttctatagagtaaacaaacaatatcatggatgcatggataaaatcatgttttctctggtccttgggaggcagaggtaatttttcgtgttgatcagactggattaacactatgaggtacatgtaactctca

SEQ ID NO: 19064 - DNA, 389 bp, Oryza sativa
  unsure (1)..(389): unsure at all n locations
  Clone ID: PAT_MRT4530_24561C.1
ggcgaaagggaccccgagccgccggaccaccgagcccaccgaaaccaggggcgagaggacnccgcccgcgacgccgcgaccgcgcccaccgagggaccgccggagaggaagcacgcggaggacaaaaaaagaaaagggcggccccgcagccgaagggaaaaggaagccgcggagcacaaggagacgggaggccagcagccagaagggggggggcggcgccagaaaaacggcggcggccgcggcagcgcggccaccaggaacaggcgcgcaaagcgccacacggagaggacaacgaagcaggagcaggccaagccggcagcccgcgcgaccgacaggccggcccacggaggcgaaaccgggaaggaaccaagcaaagcggggcaggccga

SEQ ID NO: 19065 - DNA, 377 bp, Oryza sativa
  unsure (1)..(377): unsure at all n locations
  Clone ID: PAT_MRT4530_24562C.1
gtaaatacttaatttctactgtcagctttttcatgatttgccaacttgcttgttttcctatggtaatctttagtgtgagaaaactttcattgtcctgtgtcacatttgtcatctactagttctgcagaactaattaatgaagtttgcaatgtttggcctattcgaggctaaagatctggccgtgtagaaaagcagaagagttggcatgcctggtttttcattaagtttgctacccaatttagttaaaatgagctctataaaatccacaatctttagagttctcttgccgaatatttttgtttattaggacctataggattgtccaaattcctttaggtcttttcctactttttacctctttnccaggaaggggtagg

SEQ ID NO: 19066 - DNA, 569 bp, Oryza sativa
  Clone ID: PAT_MRT4530_24563C.1
ttgtatggaatgcaattcaagcaatgcagctcactgtcggccagatagatcacgtcacttggatcctcacaaaccacgggaaatacacggcgggcattggcgtacaaaacttcaaccagtacatactatagagtgatcatttggaagccttgggcacctaaaaagtgtaaaatttttgcctggctggtggtgcaaaatagaattggacatctgactgactggcaactcacggatggccgaacaacacctattgcctgctttgtaggcataccccagagacgatcttctaccttctcatggaatgaaggtacacgacgagaatttggagaacgttgttggcttggacctcccgtgaacatatcataccggaaagttggggcccagctacaacggtacacgaatggtggatagggctagagaccaccaagggggtgccgaaaaaaggattacgtaccctgatcctcctaacggcctgggaagtcttgaaggaacaaaaccagagagtctttaggcacaaagaactcttagcggcaaacgtggtgaccaagatcaaggagaaggccaagact

SEQ ID NO: 19067 - DNA, 157 bp, Oryza sativa
  Clone ID: PAT_MRT4530_24564C.1
caatattataccatccaaaatatttacagaagtagcccctgccgcccaactggagagcggcaaggcccaagttgatgaggccttctcaattctcaacgagaaaggccccagggatatatatggctcctcaaggaaaaggttcactttgctcctttaa

SEQ ID NO: 19068 - DNA, 463 bp, Oryza sativa
  Clone ID: PAT_MRT4530_24565C.1
ggctccaacaccttttattaattgaactgaaccgaggcatttttaagggattccacattacattatccacattttaccacttttaaagtaaacaaaagtttaaacatcagcacttatttttttcccatcaaatcattttttttttattgaatccataacataaaaaaagcgttggggcggcacaaaccccccccccgagggaaacggtgggggaaaggaaattttacattaccattgcagggggggtttgcaattaagggatgtcccatggtttgggcttcggaacggggacaaccattccctggagcttcggtgtgagcacaacctggcacccgagccgcgcgttttttttgagctcccggttccgggacccccgggtgaagacctaacgcttctcttaagaaggaggggggagcttgtcaagccacttctgcgcgatgtggacctcgcacttgggggagca

SEQ ID NO: 19069 - DNA, 589 bp, Oryza sativa
  unsure (1)..(589): unsure at all n locations
  Clone ID: PAT_MRT4530_24566C.1
caacacatggccgccttgttcagcacctttttcctgtgggtgaanacaagggtgctcgccagtgatcccccaggcctcgcctgcctggcttgaaccacacaatgcatggactctttgttgggnatcgaaccctgaagttcgcccccgcaatttactggatatcgtttggtatggcttggagagtccaagagatgggagtattctggacaaatgtcccagtaaagcaacagcttgccagctggttggcatcanctggagcaccatggacanaccgactggaaattaaacgcacaatggtgagatggatgtgacaaacactggatcgagggaggaaccaagggaggatgaagaaagagccaaatctcaaatggtattcaattagtaccaagctcatagggtctgtgtgccacaacaagaagttcactagcctttgagcttctgtgttattcagattctatcttgtgtggagttcaccaagctcaagtaatctcttcnggaatatagatttcccttgtatgttaacacggatctaangggaccttncctaggttaataacatcgccttgtnggtgtaaaaaaaaaaaaaaaa

SEQ ID NO: 19070 - DNA, 266 bp, Oryza sativa
  Clone ID: PAT_MRT4530_24567C.1
tggatatcttggttcccataacgatgaagagcgcagcaagtgcgataacaatgcgaattgcagaattccgcgaatcatcagatccttgaacgcaactggcgctaagatctcctcttagcatgtctgtttcagtgtctgaaaacatcacatctaacttcaatgtggttgacagaggtgaagtattcttactccactccgagtcttccattaaagatgtacgtccgcctttttgaacccctcatcgaattgaaaaaaaaaaaaaaaaa

SEQ ID NO: 19071 - DNA, 264 bp, Oryza sativa
  Clone ID: PAT_MRT4530_24568C.1
atggggtgggcttcctgctgcaagggggtggacggggttctacctggccggaggaagaagaagaaggagacgacatggcggatcttctcgctgaaggagctacagtcagcgacgaacaatttcaactatgacaacaagcttggtgagggtgggtttggcagcgtctactggggccagctctgggatggatcacagaaaaatggcaaagcattggagggacccagtgatgttgatgattgttgtttaactgacatccacttctag

SEQ ID NO: 19072 - DNA, 220 bp, Oryza sativa
  Clone ID: PAT_MRT4530_24569C.1
tcggtgccctcgttggaaacgcggcaagcggcaagaagatttttcggaccaagtgcgcgcagtgccacacggtggagcgcggtggctcgcctagtctgggtccaacctttattggcttatttcgtcgttatgttttactactcctggtttcctctacttcacctctaataaagaacattgtcttcgtatgagtttaaggttttttcttcgactacctttt

SEQ ID NO: 19073 - DNA, 600 bp, Oryza sativa
  Clone ID: PAT_MRT4530_2456C.1
atggcggacgaacggcgggtaacggccgccgctcgccgcgccctccgcctcgacgacatggagccggcggcggcagcgccagaggcctcggtggcggaggaccgcccgccggcgcctaggcgttgctgcgccgtcatgaccaagtcggccaccctggagcgcgccctggggcgtgccgccatcgccgtagacgaggcggcgacgcgccccgtctcgccgtcctcccccgtcgcccgcgagtggcgaagtcgcggaacctccgaccttcctgagcgcctccccccgcccaagatttcggcgagagggggatggtggggtgcgagcccgacggcgcggccggaagtgacctctgacaagcagagcacacgcctcctgcctcgctcgcccgcttttccggtggacgcccatttcaaccttcatttaatggccagcgacttccttgccatacttgcgctgaagtctggaatggatctgactaggactgacataccaactccaggagttagcacgccggctccggctagggacgagagccaggtagctctcatcattccgatgggacggggcgaggcgtgtgacaggccgcctgttgccacctaa

SEQ ID NO: 19074 - DNA, 425 bp, Oryza sativa
  Clone ID: PAT_MRT4530_24570C.1
tttttggggaaacaaacatgggaggacacgatagaattatttgggcacatacacaccagttagaaccaaatttggcaaatattcagatcatcaagcaattccattccatatttggtccaaacaattacgcccaaacaagacattgaagatcccaatgagtatcttgacaattcgtcggaagtattcggtcttttgtttttgcgaggaagaaattcattctggcgtcatgcatgcatggatcgatgagaggtgatgcactttgcagcatctggtgtttgatcaataatcacaaaataggaacccgcaaccacgaatctgcatgattaaataaggccctgtgtttttgtttatgcttaggtgttactatctttcaaaaattaccttcgacgaggaggataggggaggcgaggcgcgtatgcgttggc

SEQ ID NO: 19075 - DNA, 375 bp, Oryza sativa
  Clone ID: PAT_MRT4530_24571C.1
atggttaacgctgttctcagcgctatcccgatctatctgctggttgtgattgatgcacccaagtgggtggtcaagggcatcgacaagatccgtcgcgggttcctttgggcagatgctggaccgctgaccgtctgcgcagtcgagggttgccacacccggatcgttgcgataaggagtccgaactgcttacctgtcaacgagccatccttccacaattggctctgtgatagccgaatgaaaattggggcgcgcaactggtgccagccagagagggggcgagatgaggctggtgggagagggggaaagaagaggccgctgctctcgcccaccgccttcatctccgcctctgctgctgtcgagggcgagggcggctag

SEQ ID NO: 19076 - DNA, 1421 bp, Oryza sativa
  Clone ID: PAT_MRT4530_24572C.1
cgcattccaattccaaaaaaaaaaaaaaagcccatctcaaaattcgattccaattccagttcgtctcgctcgccgccaaatcgccccctcgctgcctccgtctcgcctcgccggcggcaatggagtggctggacgagtacgagaagctggtgatcaggatgaacacgccgagggtggtgatcgacaatgctgtgtgctcgacggcgacgctcgtccaggtggacagcgcgaggaagacgggggtgctgctcgaggcggtgcaggtgctcgccgacctcgacttgtccatcaacaaggcctacatctcgtcggatgggaggtggttcatggatgtcttccatgtgaccgaccgcctcggttgcaagctcaccgacgacagcgtcatcacctacatcgagcagtctctggggacgtggaacgggccggcgcggccggcggcgctcgaggggttgacggcgctggagctgacgggggctgaccggacggggctcatctcggaggtgttcgccgtgctcgccgacatggactgcgccgtcgtggaggcccgctcgtggacgcaccgcggccgcctcggctgcctcgtcttcctccgcgacgaggaggccgacaccgagaggatggcgcgcatcgaggcccgcctcggtcacctcctccgcggagactccaccggcgccggtggcgccgtggccgccgtccccgccgccgccgtcgcgcacgccgagcgccgcctccaccagctcatgtcggccgaccgcgaccaggaggagcgcgcggcggcggcggcggcggcgtccccgacccccgccgtgtccgtccagagctgggcggagcgcgggtactcggtggtcaccgtccagtgccgcgaccgccccaagctgctcttcgacgtcgtctgcacgctcaccgacatggactacgtcgtgttccacggcaccatcgacaccaccggcgaccaagcgcaccaggagttctacatccgccacgccgacgggagccccatcagctccgaggccgagcgccacagagtgagccaatgcctccaggacgccattgaacggagatcactagagggagtgagactggagctgtgcacgccggaccggccggcgttgctgtcggatgtcacccggacattcagggagaacgggttgctggtggcgcaggcggaggtgtccaccaagggcgacatggcctccaatgtgttctatgtcaccgacgccgctggccacgccgtcgagcagagcgccattgatgccgtgaggcagagggttggcatggactgtctcgttgccagggaggagcaccggccgcagctctaccagaaagctgggccgcgcgacgccgtcgatggcaatggcggcggcggcggcattgggctgttctaccttggcaacttcgtcaagaggaacctgctttgctga

SEQ ID NO: 19077 - DNA, 315 bp, Oryza sativa
  Clone ID: PAT_MRT4530_24573C.1
atggcaggcggcgcctcttctcctagggtggtcgcctgcgtcgtggtggcgctgctcctcctgtccttcgccgtggagccgctggaggcggtggccgcggcggcggcgccggcgacggcgacgaagccgatccggtgccggaagtgcgaccacgcgtgcaagaagtcgtgcaagggctacggccgcaactcggactgcagcgtcccctgcggcgacccatccaacaaggccggctgcaagagctgcctccaggcctactactcgaagtgcctcaactactgtggccaggcctgccgcgccgtctgcatcaactga

SEQ ID NO: 19078 - DNA, 504 bp, Oryza sativa
  Clone ID: PAT_MRT4530_24574C.1
atggcgaacgctaagcagctcgcgctgttcgcgatgctcgtgctgctgctcgcgtcgtgcgccgccgcgcggcgccacggcaagccggacccgtgcgacggcggcggcggcggcgtggactcgcatctgccgccggggatgcggcggtgctcgtcgccggcggtgtcggaggacgggacgccggcggtgatgacggtgaacgggttcgaggagggggaggacggcggcgggccggcggcgtgcgacgggcgctaccacagcgaccggtccctggtggcggcgctgtcgacggggtggttcgccggcggccgccgctgccaccgcgggatccgcatcacgagccggcagaacggccgctccgtggtggccaccgtcgtcgacgagtgcgactcccgccacggcggctgcaaggacgacatcgtcgacacctccgccgccgtgtggagcgcgctcggcctcgacaccaacgtcggcgaggtccccgtcacctggtccgacgcctga

SEQ ID NO: 19079 - DNA, 111 bp, Oryza sativa
  unsure (1)..(111): unsure at all n locations
  Clone ID: PAT_MRT4530_24575C.1
ccggataagtcggcggcgtcgggcagccgatccnnttttggcagccgcgccgcagctccgtcatcgcgcgngtggtaacctaaccctagctccagcgccttnccctaccta

SEQ ID NO: 19080 - DNA, 749 bp, Oryza sativa
  Clone ID: PAT_MRT4530_24576C.1
gtggtccatcactgttgtgtatgggcctcaattggaagccgataaaattgcctttctctctgaactcgaaagcttacaaccctccatgaaacgggcttggttgattattggtgattttaacctcatctataaagcttcagataaaaacaaatgaccgcctcaatagaagaatgatgcagcatttccgtggcctcttagacaaaatccgggtgaaggaattgaatcttcctggccgccgtttctcctgggcaggacaagtgcaggattcttggcaaaggccaattctcgccacaaacagcctagccaatttccgcttgaaactacgacgtcttgcccgcgacattaagagatggagccgtaatcaagttggagatatcaagttacaacttgctgttgcatccgaagtgatattccaactagaggtagcacaggaaaccaggaccttgtccaatgaagagcgtcttttgatctctaatctcaaaaccaaattttggctctcttagtcctaaacaaaattcagattaggcagcgctttaggcaaacatggcttaaggagggagatgtccactcaaaattctttcacattaaagtcaacttcaggaaagaagaacttcattccatcgctgcatacaccttccgggatagccatttccaccccagataaagaaggggaattgttccgtttcctcaaggaaagacctgggacatgttttcaaaaaaggccaggaatcaattggaatatgaaggaa

SEQ ID NO: 19081 - DNA, 2070 bp, Oryza sativa
  Clone ID: PAT_MRT4530_24577C.1
atggtgccggccctccgccgtggcggcggcggcccgcggttcccgcagtgcgtcgcgtggatccagcggaaccagcggggcgacgggtcatggcgccacgcggcggcggcgcaccagcagctcggctcctcgccggagatcgtcaccgagcgcgacctctcgtccaccctcgcctgcgtcctcgcgctcgcgcgatgggacgccggcagtgagcacgtcaggagagggctgcagtttatcgggaggaacatgtcggtcgccatggacgatcagacggctgctccggcgtctggttccgtcgtcagtttcgcagcgatgctccggatggcgatggagatgggtttggaggttcctgccgtcagccaagctgacgtccgcgacagagatgctggggtgatctgccacggtggaagaacagaatatacggcttatgtctcagaaggattaggcaatattcagaactggaatgaagtgatgaaattccaaagaaagaatggctcactgttcaactccccttacacaactgcagctgcattagtccacaactatgatgccaaagctctccagtacttagacatgcttctggacaaatttggaagtgcagtgccagcggcctatcctgcaaatattcagtctcagctctacatggtggatgtgcttgaaaagatgggaatatctaggcattttgttggtgagataaagagcatactggacatgacctacagttgctggaaacagagggatgaggaaattgtgcttgacatgcaaacatgtgggatggcatttcgtatgttgcgtatgaatggatatgatgtttcttcagatgagctatctcatttttctgaaccttcaagtttccacaattcacttcaaggatatctgaatgatacaagatctttattagaattacataaggcttcaaaagtcagtatcgcagaaaaggaggttgaatatgctcttgaatttcccttctataccatcttggatcgtctagaccataaaagaaatatcgaacattttgacattacaagcagtcagatgctagaaacagcgtacttgccatgtcattccaatgaagaaatcatggccttgggtgtgagagattttagtagctctcagtttattttccaagaagagctgcagcaactcaacagctgggtgaaagagagcaggttggatcagctgcaattcgcacggcagaagttggactacttctatttctctgctgctgctaccattttcactcctgaactgtcagatgttcgcattttgtgggccaaaaatggcgtgctgacaacggtcgtcgacgacttcttcgacgttggaggatcaaaagaagaactggaaaacctcgtcgcattagttgagaagtgggacaagaatgacaaaactgagtactactctgaacaagtagagattgtgttctctgcaatttatacttcaactaaccagcttggatcaatggcctctgtagtacaaggccgtgatgtcaccacacacccttgtagaaatatggcaagaattgctgaggtctatgatgacagaggtagagtggaggcagagccggtatgtgccaacagcagaggaatacatggaaaatgcagttgtgacatttgcactgggacccgttgtgctcccagcacttgtatcttgttgggaccaaagatgcctgattctgtcataagaagccaagaatgcagcgagttgttccggctaatgagcaaatgtggccgtctcctgaatgatgtccaatcctacgagagagagggcagccagggcaagctgaacagcgtctctctgcttgccctccacagtggaggctctgtctccatggaagaggctgtgaagcagattcagagacccatcgagaaatgcaggagagagttgctgaagctggtcgtcagcagaggaggcgccgttccaaggccatgcagggagctgttctggagcatgtgcaaggtctgccacttcttctactccggcggcgacgggttcagctcgccgacggcgaaggccggcgcgttggacgcggtgatccacgagccgctgaatctgtcttgttctgtgtga

SEQ ID NO: 19082 - DNA, 2193 bp, Oryza sativa
  Clone ID: PAT_MRT4530_24578C.1
atgaatggccgggctcggaggccggcggcggcggcgcacggcgccaaggcggcctccacgaagagcgacagaatgatggagaaggatcagaggaagggcgccatgccggtgaagaagggatcatcggccaacgcggtggacaagctgaagaagaagctgaggcacgaggagaacgtccaccgagccctcgagagggcgttcacgaggccgctcggcgctctgcctcgcctgccgccgtatctgccatctcaaacactggcgcttctcgcggaggtggcggtgctggaagaagaggtcgtcaggctcgaggagcaggtggtcaatttccggcaaggactctaccaggaggccataatcttctcctcggccaagaacacgagcctccccggcggcgagggatgcgtgccggcgcagctcatgccgtcgagcccggtgccgaactcagaggtctctccggcaaattgtcattctcctcctactcgaccttcaatgaacggggtcgccggtgcaaagcaaacgccgagaaagccttctccttcggcggcggtggcgcaagacgaccgctccggcgccgggaaagagaaccagtcgtgcagtaacacaccggctagaaattgtcgccattcgccgctgctgcagaaggcatcaaaatccagactgccgacagcagcagcgcctgagaaacgcagggctactgctcagacgattagcacagtgccggaccgtaaaaggctcgcagacactgtcagcaataattcagaaaaagcttcccaagatgactcgagcgtgccgaacagattgtcggaggaactgttgagatgcctgctcgccatcttctcgcagatgggcggttcatcagcaagcggccaagacgaggagcaggcggcattgtctccttcggtttcaggttcttgcgagagctcagaggacgcataccctcaagatccttatggcatactggaattcggcacaagagacgttgggtcatacaagcgattccatgtaatcgacgccacctcgttcgatcagacggccatggagaacgacaccatgcttacccggaaactcaaggctttgatccggaggctttcatcggttgacctgacggggctctcccatcagcagaagctggcattctggatcaacatctacaattcgtgcatgatgaatgcatttctcgagcaagggatacctaccacccctcatatgctcgtggcaatgatgccgaaggcgacaataaatgtgggtgggcgcacgcacagcgccatgtcgatcgagcatttcatcctgcggctgccctacagcgtgaagcatgtgaatcctggtggagtgaccaagggcgccgccgacgacgtgacgatgcgaggcgtgttcgggctggagtggcctgagcccctggtcaccttcgcgctctcctgcggcagctggtcctcccctgctgtgagggtgtacacggcgcggggagtggaggaggagctggaggcggcgaagagggactacctgcagtcggcggtggtggtgtcggcgccggcgaaggtggcgatcccgaagctgctgcactggtacctcctcgacttcgccaaggacgtggactccctcatggactgggtgtgcctccagctgccgagcgagctgcggcagaaggcgatgaggatcgtggaggacggcagaaggggtgtcgccgccgagtcgcgccgcgtgcaggtcctgccgtacgaattcagattcagggtggctggcgtccttgaaggacaggcagggatgagccagcaagggatctggtatggcgacgtgttcccgttgaccagaagcctcgcggccaagcccatcgtgccgtgggacgcggcgacgatgcagtcggcggagaacctcgtgttggggaagacggtcaagggcggcccggccgccgccatggagtccgcgacgagtcgtaacgaggagatgggcgtcatcggtcatgaccagtccacggacgccaccgctgagcatggcgtcaacatctccgataccctcgtccccggcggcggccgcatcgtcactgagttcgtcccggccaggatgatggcgccgccgccctccgactcccgcaaccctagctccgcgtcgcagaccgccgaagaagcgtgccgcgaccgcaagcgcgccctcgccgtcgccggccggccgggcatgtctccggcatgggggcgttag

SEQ ID NO: 19083 - DNA, 341 bp, Oryza sativa
  Clone ID: PAT_MRT4530_24579C.1
ccggaatacccgtcgacccagcgtccggcccgtcggggaagaagggatcatcggccaccgcggtcaccaaaggcatgacgaacagaatccaagcgaggagagagcggaagctcgcactgcagcaagatgtggacaagctgaagaagaagctgaggcacgaggagaacgtgcaccgagccctcgagagggcgttcacaaggccgctcggcgctctgactcaactgccttcttatgtgccatgtgaaacactggcgcttgtcgcggaggtggcggtgctggaagaagaggtcgtcatgctcgaggagcaggtggtgaattagcgggggggactctaccaggag

SEQ ID NO: 19084 - DNA, 324 bp, Oryza sativa
  Clone ID: PAT_MRT4530_2457C.1
atgggcctctctctgcctaagaagggaaacatgctttttacaatgagggctagtctacagccggaagtgacctctgacaagcagagcacacgcctcctgccctgctcgcctgcttttccggtggacgcccctttcaaccttcatttaatggccagcgacttcattgccatacttgcgctgaagtctggaatggatctgaccgggactaacataccaactccaggagttagcacgccggctccggctagggacgagagccaggaaactctcatcattccgacgggacggggcgaggcgtgtgacaggccgcctgttgccacctaa

SEQ ID NO: 19085 - DNA, 642 bp, Oryza sativa
  Clone ID: PAT_MRT4530_24580C.1
ggtctgggggaaacaccttttatacttcctttcattcattcacatcaccgaagaacaaaactcacaattattggaagcctgtgtacaaggtgcagtaaaacaccctcgaattcactcgctgattgctgctactcactggcctctcttcatgaggccagcaggtacctgaatctgaattcgtacggcaggacctgcacgcggcgcgactcggcggcgacaccccttctgccgtcctccacgatcctcatcgccttctgccgcagctcgctcggcagctggaggcacacccagtccatgagggagtccacgtccttggcgaagtcgaggaggtaccagtgcagcagcttcgggatcgccaccttcgccggcgccgacaccaccaccgccgactgcaggtagtccctcttcgccgcctccagctcctcctccactccccgcgccgtgtacaccctcacctgaaaaaaaaaaacctgaccaagaacaagacacaatcacacaacacctcatcacaaactacacggaatttttacatgctgtaatgctgcaaaaatctgacggaatcatggagatcttacagcaggggaggaccagctgccgcaggagagcgcgaaggtgaccaggggctcaggccactccagcccg

SEQ ID NO: 19086 - DNA, 400 bp, Oryza sativa
  Clone ID: PAT_MRT4530_24581C.1
atgagccagcaagggatctggtatggcgacgtgttcccgttgaccagaagcctcgcggccaagcccatcgtgccgtgggacgcggcgacgatgcagtcggcggagaacctcgtgttggggaagacggtcaagggcggcccggccgccgccatggagtccgcggcgagtcgtaacgaggagatgggcgtcatcggtcatgaccagtccacggacgccaccgccgagcatggcgtcaacgtctccgataccctcgtccccggcggcggccgcatcgtcactgagttcgtcgccggccagtgccacgtcaccgccacgtaggacgcaaaccggccacgtagatgccacatcggccaaaaccaccgtcaaaaccgctgagggacctgctttgcaccggttttga

SEQ ID NO: 19087 - DNA, 2137 bp, Oryza sativa
  Clone ID: PAT_MRT4530_24582C.1
atgaatggccgggctcggaggccggcggcggcggcgcacggcgccaaggcggcctccacgaagagcgacagaatgatggagaaggatcagaggaagggcgccatgccggtgaagaagggatcatcggccaacgcggtcaccaaaggcatcacgaacagaatccaagcgaggagagagcggaagctcgcactgcagcaagatgtactacctgaattctgtcccaaattctcgcaatttgagaagcgcattggttcgtccgagttgtgttttgtgacgcaattcgctgcctggattttacaggtggacaagctgaagaagaagctgaggcacgaggagaacgtccaccgagccctcgagagggcgttcacgaggccgctcggcgctctgcctcgcctgccgccgtatctgccatctcaaacactggcgcttctcgcggaggtggcggtgctggaagaagaggtcgtcaggctcgaggagcaggtggtcaatttccggcaaggactctaccaggaggccataatcttctcctcggccaagaacacgagcctccccggcggcgagggatgcgtgccggcgcagctcatgccgtcgagcccggtgccgaactcagaggtctctccggcaaattgtcattctcctcctactcgaccttcaatgaacggggtcgccggtgcaaagcaaacgccgagaaagccttctccttcggcggcggtggcgcaagacgaccgctccggcgccgggaaagagaaccagtcgtgcagtaacacaccggctagaaattgtcgccattcgccgctgctgcagaaggcatcaaaatccagactgccgacagcagcagcgcctgagaaacgcagggctactgctcagacgattagcacagtgccggaccgtaaaaggctcgcagacactgtcagcaataattcagaaaaagcttcccaagatgactcgagcgtgccgaacagattgtcggaggaactgttgagatgcctgctcgccatcttctcgcagatgggcggttcatcagcaagcggccaagacgaggagcaggcggcattgtctccttcggtttcaggttcttgcgagagctcagaggacgcataccctcaagatccttatggcatactggaattcggcacaagagacgttgggtcatacaagcgattccatgtaatcgacgccacctcgttcgatcagacggccatggagaacgacaccatgcttacccggaaactcaaggctttgatccggaggctttcatcggttgacctgacggggctctcccatcagcagaagctggcattctggatcaacatctacaattcgtgcatgatgaatgcatttctcgagcaagggatacctaccacccctcatatgctcgtggcaatgatgccgaaggcgacaataaatgtgggtgggcgcacgcacagcgccatgtcgatcgagcatttcatcctgcggctgccctacagcgtgaagcatgtgaatcctggtggagtgaccaagggcgccgccgacgacgtgacgatgcgaggcgtgttcgggctggagtggcctgagcccctggtcaccttcgcgctctcctgcggcagctggtcctcccctgctgtgagggtgtacacggcgcggggagtggaggaggagctggaggcggcgaagagggactacctgcagtcggcggtggtggtgtcggcgccggcgaaggtggcgatcccgaagctgctgcactggtacctcctcgacttcgccaaggacgtggactccctcatggactgggtgtgcctccagctgccgagcgagctgcggcagaaggcgatgaggatcgtggaggacggcagaaggggtgtcgccgccgagtcgcgccgcgtgcaggtcctgccgtacgaattcagattcaggtacctgctggcctcatgaagagaggccagtgagtagcagcaatcagcgagtgaattcgagggtgttttactgcaccttgtacacaggcttccaataattgtgagttttgttcttcggtgatgtgaatgaatgaaaggaagtataaaaggtgtttccaccagaccccaaaaaaaaaaaaaaaaaaaactcgagactagttctctctctctctccctcggccgattcctgcagcccgggggat

SEQ ID NO: 19088 - DNA, 483 bp, Oryza sativa
  Clone ID: PAT_MRT4530_24583C.1
atggttgatatgcattttactagaagatatgacatagctcggttacaagtcttagtgctagatccatctttaattcctgatgtggttgatgtgggcattggtgattatttgtacgaactatcttttaaagtgaagcctaaaaatgggcatgatgagcctgaacccatggatatgaaaaatgatggtgatagggatgaggaaaagaatgatgaaggaagtaagatgcatggtttgagtaaggaatcagattttattaattctgacaaaggtaataaggtgaatgttgctggccagtgtagtcagaagagtgctacttctttgcctactactcagactttgttgttgccagagtctaatggtttgaatgtgtcggatgaagaatatgatggtttagtcaaggatacttctatggtggagccagttcagtctcaagacactccaatggagaagttatctgttgttccagagacgtcgtcaaattag

SEQ ID NO: 19089 - DNA, 981 bp, Oryza sativa
  Clone ID: PAT_MRT4530_24584C.1
gcacgaggccattctcccccacccgcaaccgcgtcctcctccatccttcccggcgaagcgatccaccggcggcgaggcgcgtcagctctcacccgaggagctcagccccaccggcgcgggcgcgcgcgcgcgcggcgaggatggactacgactaccggggcaggccgggctccggatcctacggcggcggcgtcggcggcggcggggggtcgtcgtccctctacccgcgcgtcggccagccctcccacggcgtcgccaacgcgcccccgccggagccgccgcgggccgcgccgtaccaccaccatggcccccccaccgtctccgcggctccgcaccccgtccccgcctcgtcctccacatcgatgggcatacaagttgtgataaagccagcatatcggataacccctcctcctcagttgccgccacagcttacagaaattcctcgcagtaccttcaattttgattttgagtatgaaaggaaaattcttgctgaggctgagaaggagaaccccaactggagcaagtttgtgatagagagtcagccaccaccaccaccacagccgccaagaggcccaaaactcacaactcccactacttctgtggctactccaggggatccagttgtggacaagtatatatccatggggcttggacgtgaagctgtctcatttgctgtgttgaactatggagataatccagcgaaggcatgctttttcccttatttatcttgtgatttatcattaccttctttcaacatatcatcaagaacaaaaaccattgctttgataactcaaaaaggttttcaaagcaatttcttcccgccgttgttcagtaagctccgaacgctgtgtgctgcacagcagcagccagattcctgtggcaatttgctggctggagctcactactggatagttcatgtccgtggatgagagtgctagcgattgtacgtgtatttccgctacgagtttcatgaactgacta

SEQ ID NO: 19090 - DNA, 615 bp, Oryza sativa
  Clone ID: PAT_MRT4530_24585C.1
atgggagaatcgccgctgggtgagtcctctgctcctcatcctctctcactctacaagttcgtggaggtgcatgaggaggccgatggactgcagctccgacagcagtgggtccaaggcaacaacgtcactacaagatatgcgtggctttttgacatgggccaacctggtgctagcccaacagcatcgtccccgaaatgggccaaccctcctctcctggcgactccaatctcaacctccgccgccgctgtgcggctcctccgtcatcgtcgcgagcatcactggagcgccgtggtgctcctactcgttgagcgcagttttgaggggtctgccggggtcctcaccggagcgtggggcagcggtttggcgggcgctggcagcggcggatctagcggcgcgctggagaagcgtggggagcggcgcgcggggcaggcgaagaggcgcagccagcggcgcgctggacgggcagagaggcgcggccagtggccgacggtgatgcccgcggccagcctcgagcggagcagcgcgcggcagcggaacggcttagtgagcaggccgtccggcgttgccagcaatgtggctggggctaatctccgtcaagcagcggagcatccttga

SEQ ID NO: 19091 - DNA, 243 bp, Oryza sativa
  Clone ID: PAT_MRT4530_24586C.1
caccattgaaattatatgttaattatgcaatcaaaatataataatgcattttaattacaagagatatccggccggtaaaatctagtatataacaaattatacaatggtagagatagcacgtaagcgctatttaatttattaattaaaatttgatatgcacccacttactaacttttgttatctatatatttattccatgaattatttaaaccacatgcatgatattttatagttgcttacaaa

SEQ ID NO: 19092 - DNA, 339 bp, Oryza sativa
  Clone ID: PAT_MRT4530_24587C.1
atggctgtccttccaagctcaacagcagccgattgcaccatggctcgtatagcctttccatgcgatggaggcaggcaggcaacaagcaggacaccaacacgccagcggcggcggcgatctagcgattgtttcctcctcggatgggagccgccgtttggctgcctcggcgtcgtcgccagcatcggcgctgccggcaccaacgtctacggccggtttgtcacattcactatggacagcaggccggccgactgcctgcatgtggttctcgatggtccagtccccatggcccgcgaggctctacagccacataagaccggtagctccatgctcctccggtag

SEQ ID NO: 19093 - DNA, 339 bp, Oryza sativa
  unsure (1)..(339): unsure at all n locations
  Clone ID: PAT_MRT4530_24588C.1
cgatttctccgagcacatttccctccgtcaccggtgatacggtctacctgggtttcgactgcggcgaaagaacnaaaatcagcgggtaccatgttggggatggaagcatcgaacattcccagttgatcaancatgcgtcgtggtttaagccgtctactctcgtggactgcctctcctggtgcatcaagagcaacggcaagcaacttggttgagtcctgagntgaccacttgatcacgacatctctattcccttgagaccctcgatccttnaaatcctggcntttgaaacagatggaattttgtgtntnaaaaaaaaaaaaaaaaaaaaaaaaaaaaaaa

SEQ ID NO: 19094 - DNA, 222 bp, Oryza sativa
  Clone ID: PAT_MRT4530_24589C.1
gaaactcatccttgctaataaaattggcggtgttcctgtctctctttggagcaaattacacggaaaaatacagaaaaagctgcagctacaacaaccattaccaaaccggggacataacatttgaactcagcattttggactgtcatggacctcctaccaagctaccgctaatctaattattggtatttttcatctgctaacttccttactcattgtagcaga

SEQ ID NO: 19095 - DNA, 324 bp, Oryza sativa
  Clone ID: PAT_MRT4530_2458C.1
atgggtcatacctacctccactccgccggacgcagacgcaatgtgggagcacggttgtctgccgatgacgcgaccggcgtcagaccagtcacaaaccggtcattcttgtccaccacgcgttagtttagcatgccacacgtcggcccttcttcatacaatgacttccttgcaatggttgcgatgaagcctggaatgtatctggccgggactgacgtacctactccaagagttagcacgccggctccggctaggaacgagcgcctggaggctctcatcataccgacgggacggggcgaggcgtgtgtcaggccgcctgttgccacc

SEQ ID NO: 19096 - DNA, 1503 bp, Oryza sativa
  Clone ID: PAT_MRT4530_24590C.1
cgacccagcccccaccacgcgcccgtctctccgtaaccgtgcaccactccaccgcgccgcgctcacgtgggccccgccgcccgaccgagccgccgaatccacgcgcaaaagctgagctgccacgaacgcgccgtcaccatcgcgcatcacccctagccctagccaactactaccttagctcccatgtgcacgcatcgccatggccacgtccgccaccgtcgccggaccctcctccgcgcctcccctgaccgccgccgggtcgccctccgccgccgccggaggaagcagcgcggcgatgccgcctcgcgccgccaccgccgccgccgcctccaaccccaccctcccgcccaccaccgacgtcttggtggccctcacccgcctgcgctcccatccgctaccgccaccatcgtggccctcgctcgactgcctacgttgctgctctagcacccaccaacccgccggccaccgtccactgcccaccactgccaccgccacctccgccacctcgagaggctccgccgtcgccacccccgccaccgcacccaacgacgacgacgacgcacatgctctagtgcgatgcccatattcgccgccacctccgcacccgatggcgacgacctctcgtcctcctccaccttctcctcctcctccgtcgacgacaaccaccaccaccaccacctccttctccagctcctgcctcgcctcctccagctccgccggcacgacgacggcctccttcaccgaccggaacggcgccctcatgtcgatctccgcccgcccaaccaccgtcacgccatcgccgccgccgccgccgccattgccccccccgccaccggatccactaccttcactgttgtggaggaccgcctgagcaccgccgctgccgccggatccgtgtccaccctcccaccaccattgttgccctcctcgctggcctcccccgtcatcgcggtggcggacccagcctcccccatcgtcgtggcggtggatccatccacccccgtcgtcgcggccgacggatccggccccaagctcaccgccgtcgccctcacctcctccaccgagctcctcccaacggccgtcgccatcggatccacatgggggagggcgagctcactgccgccattgccactcccaagcctgccgccaccgctctcgccggctaccgtcatcgccccgagcccgccaccgctactccgcccctcccccgtggccggccgctctcaaacccgccgacggcgctcccgcccatggctggtaatcccgagccacctcgctggccggcctcggcgccgcctacctcaccgtcgtcttcctccgcctcctcccttacctcgccctctacctccgccggcccaaggacctccgccgcctccaccgcgccgccccaaccagccagggtcgccctcgccgcctgcttttgatgccacgccacccccgcctcctgctccgccgccgccgccaccttcaccgcctcccccgccgccgccgccgccgccgtca

SEQ ID NO: 19097 - DNA, 342 bp, Oryza sativa
  Clone ID: PAT_MRT4530_24591C.1
atggcgagcacgcatctaaccacatgtagcgccagcacgaggagctccacgaagcccgaggctgggcatcgtactggaccagctagccccatgcggcagtccacgccggcgaggtgtgctgcgaagtcatgcgagttgacggcgttgacaagagccaacgccacagctgccgtgaacaccacggtcaggagcatcgtcacgaacacgtgcgccccggcgttggtgtacttctatcgagtggcggaggcggcggcagggaggagatactcggcgtcgtctccggatgcaatttgggggagttatgcgattctctttggccgacgtgaggaaagattgagttga

SEQ ID NO: 19098 - DNA, 1455 bp, Oryza sativa
  Clone ID: PAT_MRT4530_24592C.1
atgccggggtcatccggccgcgcgccgctcttcgcgtgccgtggcgccgcggccgtgtcggcgtcctccatgctcggcggcggcggcgcggcgtaccaggccgcggtggtggcgcacgtggcgccggtgccagctatcaggccgtgcgccagctgggtcgtcgaggccatgcgcgcgtcgtcgccgacacggcccgccgccgccgcggtcgacgccgagtacgacgcgtggacgcagaggaagcacccgtcggcgctgggcagcttcgagcaggtggccgcggcggcgagcgggaagcgcgtcgtcgtgttcctcgactacgacggcaccctctcccccatcgtcgccgaccccgacatggccttcatgtccgacgagatgagggcggccgtgcgcgacgtggcggagcacttcccggcggcgatcgtgaccgggcgctgcgtcgacaaggtgcagagcttcgtcggcctcccggagctctactacgccggcagccatggcatggacatcaagggccccagctccaacgaggaagaagacaccaagatcctcttgcagccagctcgcgagttcctcccggtgatcaacaaggcttacaaggctttgatggagaagacgaagagcacgcctggggccagagtggagaacaacaagttctgcctctccgtgcacttcagatgcgtcgatgagaagagatggaatccgttggcagagcaagtgaaggccgtgctccgggactaccccgagctcaaactcacccaaggaagaaaggtcctggagatccggccgtcgatcatgtgggacaagggcaaggcggtggagttcttgctgaaatctctcggattcgacgacgaccgccgcgacgtcctgccggtgtacatcggagacgaccggaccgacgaagatgctttcaaggtgttgagaaagagaggtcaagggttgggaattcttgtctccaagtgtgccaaggagactgacgcctcgtactctctccaggacccagcagagaagtacaccaacgccggggcgcacgtgttcgtgacgatgctcctgaccgtggtgttcacggcagctgtggcgttggctcttgtcaacgccgtcaactcgcatgacttcgcagcacacctcgccggcgtggactgccgcatggggctagctggtccagtacgatgcccagcctcgggcttcgtggagctcctcgtgctggcgctacatgtggttagatgcgtgctcgccatcttagatcgcctgcatgcctgcctaatgtcgccctcgctacagctttcgattgcatctccatgtcatggagttccttgttcgattggtgcagtggaagcttcggcgatcatcgtcagcgatgcgcccgagggtttaattagtacactgacgacggatcatatatactatatgacagtcttccctgctaagctagctctgacttctgaagaagtttga

SEQ ID NO: 19099 - DNA, 135 bp, Oryza sativa
  Clone ID: PAT_MRT4530_24593C.1
atggcgggccaggaagaagaaatcgaagcctcgtggccgatgctggcgccatacatgcaggacgcggtccatttctcatgctgcaagagggcgtacgggtaccaggtttccctcccatcatcccatgtaccttga

SEQ ID NO: 19100 - DNA, 455 bp, Oryza sativa
  Clone ID: PAT_MRT4530_24594C.1
ctgtggctcgggtgcacggtggatgtggtgtttcggcggagttttgtggaaacgaagcggtggccggtgtgtggcaaagagcggcggagccgacggtgcaagcggtgcggcgcagcggcggctacagcgacggcggcgtgcagccggagctcgccggaaaacggcagagcgcgggagcaacgaggggagagcggttgggagtgcagcaggttcgggaaaattggggaaaagggggaggatggcacggggaccatttttataggctcggggaggagaaatcgtggccggacgtggcggatttgaagcggcaacggccggcgacgtgggtgacatcgtgggcgaagtggggctcgattcggcgccaaaaattggggaaaaacgggggaggagttgccggcccgggctggaggttggggatgacaggtggggcccacgggtcccacctgtcggcctga

SEQ ID NO: 19101 - DNA, 256 bp, Oryza sativa
  Clone ID: PAT_MRT4530_24595C.1
aggcgacatctatggagaatatacacgcggcgtgcgcgcgcacgcaagctcgtagcctctattttgggcgccctttatttttttcttggggggttaccatttcattgaggatctattacatttttcaacttttcgagaacaaaaacatggggagcgcggcgtggatcaaccacgccttttataacaacacctacgtttcctacaaaaccgaaccgcttatgcccaggaatacccaggcctgtctacagcatcctac

SEQ ID NO: 19102 - DNA, 185 bp, Oryza sativa
  unsure (1)..(185): unsure at all n locations
  Clone ID: PAT_MRT4530_24596C.1
gttaaccattcttgtgccagctttctatacacatcacaaaagagaacaaaggaagaagcactctgattctttgatttcattcagctccaaaagaataaaaagagcagaatactttgactttgcttgatttagtgcatatctgggggggtgcaagggtgctttcccatganggcatcctagtatgg

SEQ ID NO: 19103 - DNA, 4487 bp, Oryza sativa
  Clone ID: PAT_MRT4530_24597C.1
atggccgaacgggtagtggcgcacaacctctctccgagcgctagcggtgacgacagggagcggaacccgcgccgtcgagctcgtactccaccgtctccctctcgccgaagtcttgggcgggaggaggcgctcgaggggatcgaaagatccgcgacttcgccacccacgggtgatggagaaggacggcgagacggggagcgtcgcctcctcgtctacggcgatggcagcacgccccagggcgcgctccaggctgcgggcgcgctcctgcgtcacccgcccgtcgtccccgatccagagactccagctcgacgttggctggatgatgtggctaacttggtcatgacggcgcagcagcgcctaggcgccggcgggcggtcctacgcccccaaggcctctggcgctgctaccaccggctccgtgtcgtcgaggcggagggcgcggcgaaaggcggccgttacccgccgttcgtctgctattccctcgtcgacgcctccgacccaagaagatgtgcgtggggggccggatgcccgcctcaatattgagcgtcgacgcaatggtcgtcgtgctgcccacgcaacggagggcgcttcctcgtccggagcgccacttcagtttgggcatgggggccagcctcccatgtccccggttggcggtgccggctgtcgagcctttgtggcgagccttcggaacgtccgttggcccccaaggttccggcccaccatcaccgaaaaatacgacggaagcgtcaaccccgccgagtttctccagatctatacgaccgggattgaggctgctgggggtgacgacagggtcatggcgaatttcttccccatggtcctaaaaggtcaggcgtggggttggctgatgaacttgtcacccgcgtcggtacactcttgggaggatttgtgccagcagttcaccatgaacttccagggcacatatccgcgcccaggtgaagaagcggacttgcacgcggtacagcgaggggatgatgagtctcttcgctcgtacattcagcggttctgtcaagtccgcaacactataccgtgcatccccgcacacgcagtgatctatgcgttaagggggggcgtgcggcacaatcgcatgctcgaaaagatcgcctccaaggagccccagaccaccgcggagctttttcagcttgcggactgtgtggctcgcaaggaggaggcctggacctggaactcctccggttccggtgtggcagctccgtgccgcccccgggtccgccgctcggtcagggcgggcgggataggaggaggaagaagagggtcggcccattcagacgaagaggggaacgtactcgccgtcgagggcgcttcgcgggccacccgaaaggggaggcctgcgagcgacagaaagaaggaggccggcgctcccaccagggagcgcccgacccggcaagtggtgctccgtgcacaacacctccctctacgaactcctcggactcacgcgcggtcaaaagtttggctgagaggacgaggaagtgggaggaggagaggaggcaggagcgccgtgagggcaaggccccggcggcacacacaagccgcaaaaccggcgaggtgaggccaagcagaaggccccccccgaggacagtcgacgatggcgacagataacctggggttccaggagcctcaggccacaggttgccaaccgtcgatgggggagcgtgcgctcacacttctctccggagcctcaaggccatgaagcgagagcttctggccgcggcccctacccatgaggcgacgcggcagggcgcgatggtcggaggtggccctcaccttcgaccagacggaccacccgccgtgcgttgcccggggaggacagatcgcgatggtggtttcccccaccatttgcaatgtgaagttggggcgtgtcctcatagacgggggtgcagccctcaacatcctttctcccgcagcctttgacgccatcaaggccccagggatggtgctccggccgtcccagccgatcatcggtgtgacgccggggcacacttggccgctaggtcatatcgacctcccggtcaactttggtggttccgccaatttccgcacggagcgggtgaactttgatgtggcggacctcagtctgccctacaacgcggtcctggggagacccgcgttggtgaagttcatggcggcagtccactacgcctatctccagatgaagatgtcgggccctggtggccccatcaccgtccatggcgacctccaagtcgcgcttgcttgtatggagcagcacgcggaccagctcgccgcggcgtccaagcccgagggtggcgacgagaggctcagcgcctccgtcccggccgccccgaggcagcggatgatcacgtgcgacgaggtcccggaagacgcgctcgtctccttcctgcgggcaaacgccgacgtctttgcctggagaccggcggacatgcccggggtccccagggaggtgattgagcaccgtctcgccgtgcggccgggcgcaaggccggtccggcagaaagtgcggcggcaggccccggaacgtcaagccttcatccgcgaggaggtggcgcgacttctggaggccggattcatctgtgaggtcatccatccggagtggctggcgaacccggtcgtcgtccccaaggcgaacggcaagcttcagatgtgcatcgactacaccgacctcaacaaggcatgtcctaaggacccttaccccttaccacgtatagatcagattgtcgactccaccgcggggtgcgaccttttgtgttttctagatgcatactctggttatcatcagattcgcatggttagggaggatgaggaaaaaactgcattcatcacccccataggaacttattgttatacgacaatgcccttcgggttaaagaatgcaggttctacttttcaacgtactactcgaatttctttgggtagccagttaggacgcaacgttgaggcttatgttgatgacttggttgtgaagacgcgcaaccaagagaccttactcttggatctagcggaaactttcgaaagtctccgctccgcccgcataaagctgaaccccgacaagtgcgtgttcggcgtgcctgcgggcaagcttctcgggtttttggtcactgcccgaggcatcgaggccaaccccgagaagatacgagctatagagcgaatgcgcccccccagcaaacttagggatgtgcaatgcgtcaccgtctgcatggccgccctaagtcggttcatatcgaggctgggagagaaggcgctacccctgtttaagctcctcaaacgttccgggccgtttacctggacggaggaggctgaacgggccctctctcagttgaaggcgtacctcagttctcccccggtcctggtcgccccgaaaccagatgaaccgttgctactttacctggcggcaaccccgcaggtggtcagcgcggcgttggtcgtggagcgcgacgaggacaaccctcgctccgcgcacccccaccctgtgtcggttcgacccgggagagagcagggaggagaggcccccgagccgaacggcggcccgaggcccccgacggccggagctggccctctgcccgcttgtccgacgttgccaggcgcccccgacccacaggatggccccggggccactgcgggaaggccgcgcccgttgccctccgaccccgaggtcgacgacacagaagccgagtgcgccccgcgcggcctctcggacgaaaagcgccctggagatgcggcccctgacgaaggggatcggccccgccgaaaggcgcatcgggtctcggtggttacgtcttaccccctcggccaaatcttgcataaccgagagggtactggacgggtggtgaaatgggcaatagaactctctgagttcgatttgcactttgaaccacgccacgcgatcaagagccaggccctcgccgactttgtggcagagtggaccccagctcccgagcccgtctccgtccccgaggccagctcgggcccctcgcagctgcctcacaccgcctactgggtgatgcagttcaacgggtccttgtctcttcagggtgccggtgcgggagtcacattgacctcaccgagcggagacgtcctcagatacctggtccgcctcgactttcgggcgaccaacaatatggcacagtacgagggactccttgcgggactcagggtggcagctggactggggatccgccgcctcctggtgttaggcgactcccaactggtcgttaaccaggtctgtaaggggtaccggtgctctgacccgcagatggacgcttacgtgcgtcaggtgcggcgtatggagcgccatttcgacgggatagagcttcggcacgttcccagacgggataacgcggtcgccgacgagctctcaaggctcgcttcctcgcgagcccagaccaccccgggcacttttgaagaaaggcttgcccagccgtcggcgcgacccgactgtcacgcccagaaattctcgaaccagaatttctaagctga

SEQ ID NO: 19104 - DNA, 255 bp, Oryza sativa
  Clone ID: PAT_MRT4530_24598C.1
atgtctgcacctggagccactgccgccgccggagccgctgccgccatccctgaagatggcgcgccgggagccggagccgctgcgaacgtcaacgtcaacggaggcaattctgcctcacaatccagtggagggacattctcgggtcgcaattctattgcattcttgattaaaatatgccgatatatgactatatttccaacaatgagaacctactggctgctggcatactgcttgccatgccgatggatggcctaa

SEQ ID NO: 19105 - DNA, 258 bp, Oryza sativa
  Clone ID: PAT_MRT4530_24599C.1
aaaaaaacaatttctacccttttatataaaatttaaccccaaaccttccattttttcaattaaaatttccccaaccaaaaaaattttttttttagcaaaaccccttttttctttattttatagaaaaatctttataaaaaaaaacaaaacctaacctcctctcttaaaataaaaaaccttttaaaaaattggaaacacctaaaaaaaggtggaaaacttcttttattcaaagttcaacatttaaccacgttttttttt

SEQ ID NO: 19106 - DNA, 492 bp, Oryza sativa
  Clone ID: PAT_MRT4530_2459C.1
atggaggcggcagcggcgaccgcgccctccgatcccctccgccagatccggcgggaggggaagcggcagtggggtcggcggcagagggctcgccagcgggaggcggtgatctaccgcagggaggagccctcccctccgccagatctggcgggaagggtggcggcagtcagcgggctcgccgacgggagacggcgcgacgggaggtggcgcgacagctcaaagatgaccaaccatgtgacggcgatgatggtggatctaaagagggtagccttcctcctcgaatccgtgtccggcgagatcagagatagcgctttcgtatctcctgacggtatccggagataccgtaggggaatagccatgcctatccctgaaatcgatatccggcggcgtgtcttggcgtatgtagacttctatgttgtggcttctatgtcgattgtgttgggtgttgatcctgttgattgtctcgttgtggatgtccccctgtcctcctag

SEQ ID NO: 19107 - DNA, 386 bp, Oryza sativa
  unsure (1)..(386): unsure at all n locations
  Clone ID: PAT_MRT4530_245C.1
tcctatactctactatttcagattctattatcccaacgcccaacctgcacacacttcactctcgctgctgcgaaaccagtcacgggccactcacaaccaccaccctaaacgtagctagctattgagagagagatcgaggtgggtgcaatggcggccatggtgagacggcggccgtcgccggcggtgacgacgatgccggtggtcctggtggtggttgtgtttgtcggcgttgtggtggggggagcgagcgcttcggcggggccgctcaaggcacactactaccggcacgtgtgccggcggcggaggcggtggtgcgcgacatcgtgacggcgtgcgtcgccgccgaccccgccgnggtccccgncaaagttgctncgcctcttctt

SEQ ID NO: 19108 - DNA, 477 bp, Oryza sativa
  Clone ID: PAT_MRT4530_24600C.1
cgggctgcaggccaactttgatgagccaattcgttcaccattagcaccgactgttctccttactggggttatacctcaagaatcatctatatttaaaagtgccttgcatcctttgcgccttgcctttaagaccgcaaatgggggaatatcgaagataatttataaaaagggagatgatctccgccaagatcagctggttattcaaatggtctccttgatggaccggctgctcaaattagaaaatatggatttacacctcactccatatcgagttcttgcaactcaaccagatgaaggaatgcttgaatttattccttccagttcacttgcacagattctatcagaacatcgcactattacaagttacctacaaaaatttcatcctgatgaagatggtccctttggtataactgctcagtgcttggaaactttcataaaaagctgtgctggttactctgtcattacatatataatggg

SEQ ID NO: 19109 - DNA, 256 bp, Oryza sativa
  Clone ID: PAT_MRT4530_24601C.1
atggcatcgtggcgtggcgtggctgtgagaccgacaacaatagcttgcgctttgcggcgccctgctcgacatgaatcaggaggtggtccacgttgtgctaaccccaagcgcgcggcgatgagtgcaggaacgacatggaaccacaggcccaggcgcatgggcccttctcgaaaccccctccccccactagacagccacctcaccggaggcgggtgcggttgcagtgtcagaggtgtttgcgagccggacttggtag

SEQ ID NO: 19110 - DNA, 342 bp, Oryza sativa
  Clone ID: PAT_MRT4530_24602C.1
atggccctccccgagacgtggccgggagaggcgggcaacgccggccgacgtgggggagtgggggaggcgagagaggcgggattcgaaaatcgaatcccggccatctcgggcgcgggcgcgagctggagagagaggggagtgggcgcggggaacgcggcgcacgcgcgggcgtggtcgacgtggcccggaggaggcggaggcgtggacgcggcggcggtttcgggcgcgtcggttgctggcgcagcgtcggccggagacgctgcagcttcggaagatccgctctacgtggaggttgaagctgacgtttgggaaagcgagcaaggcaagtcatatcatccttga

SEQ ID NO: 19111 - DNA, 483 bp, Oryza sativa
  unsure (1)..(483): unsure at all n locations
  Clone ID: PAT_MRT4530_24603C.1
ggacccctgggggccggccgggatcgatcaatgggccataggacaactcgacgcaaccaaggccgcgtctaacatatgtacactggtatcataaccatcactagcactctccttcctcgtcctccttggcctagccacttttacaacanccagcggcttagctacgagcaatctatcaccatcgtcggcaccgggtgtatccgcggcctgctgcgccggggaaaggagtgnctacgngcgacctgcactcacaaggcagaaccatgngaactttgctgcgacattatcctnncggacgccagctncttcaatggcagacgaggaaaagatgctggagagtagcncgggcagtgctatcgagcgacaccggggcctcctcgacgagctccgcggcttgaagcccggncccgncgacgtggacgccgagcgccggatgctncgtgatgctgcnggccgactggtggcgggacttcgaccgcgact

SEQ ID NO: 19112 - DNA, 356 bp, Oryza sativa
  Clone ID: PAT_MRT4530_24604C.1
aaaaaaaaaaaaacggggggggggggggggtaaaaaaaaaaaaaaggggataaacgtctgcgggtgggggtccaactaattaccctactgcatctctggctgttttttacgcatctaatttgtatttacctccataacccacatctgggggggtgtggggggtcccttccccaataactttttccaacggtctggcttttccccttcgtcatttggacaggtccgtccgattggtttccccctgttcgccctttaaaggcgattgggtgctgcttctcctgcccctacccttcattgccagttgttggcgccgctttaccgctacattttttttcccctagccccgcccccttctt

SEQ ID NO: 19113 - DNA, 207 bp, Oryza sativa
  Clone ID: PAT_MRT4530_24605C.1
ttaggcgtacccactatgccccgccacgttcacgccgaggtgttgaggatccgaactggcgtagcgatacttgtgtatacctactaccaccttggtgccagcgtcctctctgcctatgcggtgatcgatgccaactaatggcttcgaggaatcgagcacaacctctttatgggcggcaaaaattgcaattagcccattgccgcccat

SEQ ID NO: 19114 - DNA, 716 bp, Oryza sativa
  Clone ID: PAT_MRT4530_24606C.1
aataaagaaaggacaagtagatctatatgaaatgactagccgactgatacaaatttatatgataaagtagcaaagcaaataaggtcataatgcataacataagagtatgccaaggtcaaacaaccgattacataatgccacgtcgtgttggcgatgggtatatacaatcaaacaccgtgtgcgacaactaagcatggactggtatcactttttcctagcattgtcccaagtccatcggagccatgctttacgattctctgcagggtaaatacacctaaaagctgcccatcgtgcagctgacctaaataggtcagtagctatgaaatacaactcagatccttgagccacaccatcctcttctacaagttgcagcaattcttttatctcatcttgctctcccctgagcacactgctttcattcctgcttctttcgagcatactctctgatacgcaccctacatagtactccatatttttactcttcttgggtggtgggcggtcaaccacctgctccttccctgccctttaagccacacggccagcactagacaagccgacattgtcgttagacatcggagtaaggttgtcatcgcttccactgcttggtgttctcttgccaataccacctacgcacaacattgtaccttcttcggtgtccatgcaaccaaaatgagtagtcagctcatcctcatgttcaagcggctttccacggaact

SEQ ID NO: 19115 - DNA, 350 bp, Oryza sativa
  unsure (1)..(350): unsure at all n locations
  Clone ID: PAT_MRT4530_24607C.1
tgttcgaagccggattactgaaactgggtgacagaataatgtaaactaaaggttctatagacaaacgaaaataaactataaaatgagaaaatgttagtgatggagagctgtaatttttcactggagggaggattttatttcttctctggtttttagctgcagaaatttaccagcccatttaccaccttgggcatgtgtatttctgaccctctgaagattcgcagtagaatgtcctgtaccgggttccaggtcttgcataggagttcatcttctgcacattgtaaactcattgcagtgtacttttgctgggactactaaaaagcttaccacttgggagtggagccagnggg

SEQ ID NO: 19116 - DNA, 306 bp, Oryza sativa
  unsure (1)..(306): unsure at all n locations
  Clone ID: PAT_MRT4530_24608C.1
ggcataccatatgggaatggtcttatttattagggggcacatgccgcacattattttatgacaaattttgaaacagtttttacaaaaagcttcttaaaacaacaaggggttataaaaaagctttaacttgtttaacaacacataagtcctagttcaagcagaaaatnnatcattcaacttgggtttcagacccatctttttgtttaaaccgnaaacacatttaaaaaggtgggtccccaattaagctttttaatacgccgcattataaaataaaaccggtggtgcctttcaatttcctttgacccc

SEQ ID NO: 19117 - DNA, 211 bp, Oryza sativa
  Clone ID: PAT_MRT4530_24609C.1
aaaaaatcacagttgagttgaagaggcacgcaacaaaataaactactgttgctacctttcctaccactgtgtacctcttttcataaaaacctgacccaaacattctttaaggtagtaggctttacatttgcacatgatttggtaggaaaaggttgtgatgcaaatggaaatgcaaatggaccgacaaaattataggtccatgaaactccct

SEQ ID NO: 19118 - DNA, 601 bp, Oryza sativa
  Clone ID: PAT_MRT4530_2460C.1
aaaacgaaaaaaattcgatattttcatggaattgtaaataaagatgtccaagtcaagtcctgcataacgaaagctcagattcgttggaaacttcaccgagttaacaaaaactctgttatgctcgcagaacgggagaccgcgcaggcccccctttgccgattcggccgggggcgctaagtgagattcttcgccctcgatctgaggaacgtcagcgagagaggaaatgcgcaagacacgggcgacgtagacaggttcgggccgctgagaagcgtaacaccctactcctgtgttctggtggatcgggactgacataccaactccaggagttagcacgccggctccagctagggacgagagccaggaagctctcatcattctgacgggatggggcgaggcggggtcggggcgccccagccctcggggccgaaatgggagcggcccgacccctctgggagacagagggaggggtggcctcattacttcacgatacccccggccccatgtcaccgacagtagcccccagcgttacgctagggcgaccacccccccgagggaggcgctcgggcgtgatgccactcttaggcccgtgacaggggggccg

SEQ ID NO: 19119 - DNA, 408 bp, Oryza sativa
  Clone ID: PAT_MRT4530_24610C.1
gctgagtccattacccacttgaatgtggttgaggcaaaactggggagttacacacgtgttacatgagaccagatccatactcctccgtgcacatataaatgacccagatgcactaaaccagttggatgtccgttacactcatggcattcgtgaccggaattctattgcgcagagaaacaagacaggttggtctaagggagggctctgttggcaccattacacattgaggatcgtgaccttgacctagacaccaagatcgatggtgaaggaggtgatactgttcacaacatcagtggagcctataacagcggctacccttttgaggaagcggagctcgaatcgatcccatgtggatgctccttgaccggacggacaattgtagttggttatgtggaacaccttgggggg

SEQ ID NO: 19120 - DNA, 2103 bp, Oryza sativa
  Clone ID: PAT_MRT4530_24611C.1
atggttctccggtggctcaccaccgcactaccgctcgccgccgctgccgctcgccacgcggccgcggctccctcctccgcggccacgctcgccgccgccgccgctcgccacgcggccgcggcttcctcttcctccgccgctcgccacgccgccgcggctccctcctccgcggccacgctcgccaccgccgcggctccctcttcctcctccgcggccacgcttgccgccgccgcggctccctcctccgctgccgtggcggttctaccggaggcggcgcggcgagtctccgcggcttccctcctcgaggagttaaacgccttcccggagatgtccctagtggtccggtggctcggcgccgctcgccgcccgggagcggaggtcgtctccaaaattgcggggcgccgccaccacctcaccaccaccgccgccgccgcggctccctcctccgctgccgtggcggttctaccggaggcggcgcggcgagtctccgcggcttccctcctcgaggagttaaacgccttcccggagatgtccctagtggtccggtggctcggcgccgctcgccgcccgggagcggaggtcgtctccaaaattgcggggcgccgccaccacctcaccaccaccgccgccgccgactcgaaccttccaagtcaagcgcccggacgactcgtcaatcgggggggtgctcaagtgatcggcgcgggcgacttcttcggctgggagagcaatgattgcggctgcctcgccgacctcgcgccgttccctcaccgcggcgcgccgttccctcgccgccgctgcggtgctgcatcgccttctcttccctggtggttcgcggcagagcaggtgcgcttcggcgtgggcgaccccttcgagagcgatgatggcggcatactccccgatctcgcggcatttcttcgtcgccgccgccgctgcgcccacagcagaagaatcttcgaattcgagagcacccaccacggctttggcaagagcaacaatggcatgagcggcggttttcgttttatgttggatgacaccgacaagaggtttcgccatgtccgagctcggagaaatcggtggcaacagctggtgataaggaagatgttctcaagttcagggaagcgcagctcgtcgacttcaaggcaacagacgccttcgccgacctctttaccagcggccatccccagccaaccagcagcggcgatttcttcctcttcatctgagactaattcatccagtgagcaggaaaaaggggcttcctcgtcagcatgctacattgatgaatcattcggtaatcaggagataattgacgctgagacttatgtcaaggcaaatcctatgcttgttaaggcgaatgtactgggctcagcgaagacattctggagaatgtcggatatagcagtgagactcattcggcgacttgcgaggattctgaaaattctgcacgaacagaagcgttatctcctggccccgctctcagtgcaaaatctagtaattgtctcgggtgaacttaagctcaggaatgtcacccttgcagatgatgatttcagttttgatcggattaaatgtgattatcagtatatgtccgttgtgctggaagagttgatcatgttatctgtcggacaaaatggattgtccaatatccctcctgattttggcaaatacttgggtttgcttaaaggactagtcaaacctgatgacgaatttctgataaccaaccatgcttcgttattgcccatggcaaacaggacggatgcatttatgatgatgtacaatcatattatgggctatcttggccgcaaagatcctaaaaagaagatatacattctatcacacctgaagtatgacacagactggcttcgcacagcgtcaggaaacagtgagatagggaaatggctttggcgccggagatacggccagactgttaaggagtttctgcacttaaatcggaatatcaggtcccatccatatgaacattccgaggaaaagatcgaagaagctctatacggtgaatggccggaactgctagttgaaatgcaagaaaaactgcacaaagagggtgaattacaaaacactgagatggagtcgaaatttgggcagcagtga

SEQ ID NO: 19121 - DNA, 1728 bp, Oryza sativa
  Clone ID: PAT_MRT4530_24612C.1
atggctggcaatcacattagtttggaggagatcacagagtatgagagtgtgataaccaaggagtttagaagcgaggatgaaggatataagttctataatgattatgcttggtcgaaaggttttagcatcagaaaggacaatgttaggtacaatggagatgaactcggggtcagtggccttcgtacatgcaatataatggacgtcatggagaagaatcatggtggttatgatcaggttgggtttgtgtctcgggacttgtacaacttcgttgctcgttacaagaaagaaagaattgagggtatggacactcaatttgcactgagccttttgaacgaacagaaggaaagagatgcagaatttttctttgagtacaatactgatgccggaggtgttgtggtttttgacgccacttaccgtgtcaaccggtacaaccttccttttgttccttttattggtgtaaaccatcaccgtagcacggttgtctttgggtgttgtctgctctcagatgagacggtttcttcatatgtgtggctgctggagaccttcattaaggcgatgggtggcaagcatcctagatcgtttatcaccgatggggacctttccatggcaaacgccatcgccaaggtctgtcctgatgcagatcatcggttatgtacatggtacattgaggagaacgcaaaacgccatctccatggggatgcgctcaccaaatttcgtagactcgtctacgaagtaatgaaggccgatgaatttgagagacgatggtgtgcctttaagaacagggataatgtgccggagaaggagttatggctagccatgatgtatgcgctaagggaaaagtgggccgcggcgtataccgatgggagatatttcttagggatgaggagcaatcaaaggagtgagggtttgaactcaagaattcatagtcatctcgacaggaaaatgtcactgatcgatgtcatagagcatttcatgtgctgtgtgtcgcgtatgcgtagaaatgaggctgagatggatgctagagcatcacaatcggtaccattcactaaaattagtgctgcacgctttttcacccatgtcattttcagggaggtaagggcagagattcggaagatttgtaaatgggtgattttggaggtgaggcaactggatgaggctcgaaggtacagtattgcttcgaaatatgaccataaagtgcatggtgaagtgagttgtagttttgatggtgcattgttgatgggcgtgaagtgttactgtcagatgatggatagcaaagagataccatgctcacatatatttacagttctgaagtatctccgaattgacattattcctcagtgctgtgttgcggttagatggacattgcaagcgaaggcagcgttcccttcaattagaactgcaaatgtgcatgagtggtccgaacagatggatcagtaccgccttctccgtaacatagctaatgaggctttagtcaaagcttctttgagttttgagaggtcacagcaagtcattgatttctttgaaaattttatgcgggaaggtgccgagaacgagggtagcgttaatgagacaacacttggtcctttgccggcgcacttctcagcgtcgaaccaacccagtggtgagagagtcctcgatccacataagattgttcctaaaggaaggattccttctaagagattgaagccgtgccgtgagtcctacgcaaataagagggcttcacactaa

SEQ ID NO: 19122 - DNA, 938 bp, Oryza sativa
  unsure (1)..(938): unsure at all n locations
  Clone ID: PAT_MRT4530_24613C.1
gatanagtcggattccctcctctctcctccttgcagggcctgtctgtttctcaccatagtaaggaaggaaagaaggaaggaagaggaaaaaaaaggatcatcaaccatgtcgaattcggcgtcgggaatggccgtgtgtgacgaatgcaaactcaagttcctggaacttaaggcgaaaaggagcttccgcttcatcgtgttcaagatcaatgagaaggtccagcaggtggtggtggacaggttggggcagccgggtgagagctatgacgacttcactgcctgcttaccagcagatgagtgccgctacgcggtatttgattttgactttgtcactgatgaaaactgccagaagagcaagatattcttcatctcctgggctcctgatacatcaagggtgaggagcaagatgctgtatgctagctccaaggatcggttcaagagggagctggacggcatccaggtggagctgcaggccactgacccgagtgagatgagcatggacatcgtcaagtcgcgagccctctgagaaacacaggccggttactgcaatccccaggagcgaaaaggcgttaatttgctacagctcctctgcctacaattccttcccgttggcgatggtcaaccattttcttgtcattcttttcctggaagcaaatgtgttgcattctgtatgagactgtattgccgtttttctctttcccccgtcgttggtgccatagtcgtgttactgctgtaaactagaacatgctttcgttttgagacttggatacttttctcatgagtccttccaccatgctggtatgctaaatcagtaaaggccgtggcgtcatatggtgccagttgtgaagcctgttgtacggtgtaccgtagtaaatcactgagttttcacccctttgatttttcacaaaaaaatggatgtagccccaaaacaacaaaaa

SEQ ID NO: 19123 - DNA, 837 bp, Oryza sativa
  Clone ID: PAT_MRT4530_24614C.1
ggccggattcccgggtcgacccacgcgtccgggtcgtccgtgtgtctcgggacttgtacaacttcgttgctcgttacaagaaagaaagaattgagggtatggacactcaatttgcactgagccttttgaacgaacagaaggaaagagatgcagaatttttctttgagtacaatactgatgccggaggtcatctgaagaatatgttctaggccgatgcacaatctcggatcaactatgacgcatttggaggtgttgtggtttttgacgccacttaccgtgtcaaccggtacaaccttccttttgttccttttattggtgtaaaccatcaccgtagcacggttgtctttgggtgttgtctgctctcagatgagacggtttcttcatatgtgtggctgctggagaccttcattaaggcgatgggtggcaagcatcctagatcgtttatcaccgatggggacctttccatggcaaacgccatcgccaaggtctgtcctgatgcagatcatcggttatgtacatggtacattgaggagaacgcaaaacgccatctccatggggatgcgctcgccctttttcgttgcctcgtccttcgttgttttgagggccgcatgctttgggcgccgctggcggggccttttctatcgggcttttgtgccggggtaggtgttgtgggctcccctgtctgcttgccctttgggttcagttgtgtccttggcttttctggtggggggttttttttttgggcttgcggtcccctcccggcgccgccgggtttgccctccccttttgttttcctctttcccggctgtttcccccgcttcctttttttcgataatt

SEQ ID NO: 19124 - DNA, 525 bp, Oryza sativa
  unsure (1)..(525): unsure at all n locations
  Clone ID: PAT_MRT4530_24615C.1
ggcgtttttttcttctggattcaatccttttttaagggnnagggtttttgnggttgattnggattcgattnaaatttttttcggcccaagggttaaaaaagtgttaggttcnccagaatgtttttnccggggcccatgggggttnaanaatggnggggggtangcccccccttnttcaattttttgntttgcctcccccccccngtaataatttggtangggcggtttattgtccgtatgnttcgggcgtgangttatcatgcgcgatgggatcccttgcagttgccggctgcttgaattccatgggaggttggtttatcagagaggacctgtttaggcattttttttntgaattggcccctcccctggctagctttaccgcaggggagctatgcgatttgcttggcctgtgactttgtgacagctttgacggtaattagtacgcgttctaaacagctaatggatgtatggattatttgtgcaacgctcttggaagtacgatttcttaaaaaaaaaaaaaaaaaa

SEQ ID NO: 19125 - DNA, 855 bp, Oryza sativa
  Clone ID: PAT_MRT4530_24616C.1
tctcctgctatataaggaggccgctagtccgatcagaacgattcgcttgctttcctctccctggtgtttttcctcctccgcgcgcgcctgctgcttctattttcgcttcctcacttctgatcgcttgcgcgcacgagagatcggaaggagcagggcctctggaaccacaccttcgcctgagatctgcaccgggtaggcggatgatcaggtttttggggagtgcttcccgcacgactgctctgttcgttgttgtcttgtcgtccaccatgtctgcgcctagaaccgatggcgtgcctggagtcggagctgccgccggcgccggtgctgctgtctctagagatggcacgccgggagccagagccattgcgagcgtcaacaccaacggaggcaattctgcctcacaatccagcggagggccattctcggggtccatccgatgacgtggcatgccacggaggcgcctacgtgtcggtggggaccccacatgtcattcatatgcgatgccgcacccgcctcggcctgggcagcctcagatggccctccgcgtcgagctccgccacctccgccggttgcaccggcttccgtgcaccggcctccgcgccgcaagtgacgccgcactcgcctcgcccgaggccgtttcctcggcacctccgctgtcgacgtcgcgacctcgcgcagctcgccgccgccaccaccacgtgcgactccgccggtcacgcgcggctacgtcgcctccccacccaggcgcgacacggcgaacccctcatgcgaatgcatgtgggtccccaccgaggcgccggcgcggcaaggcggcgttgccgcgcgcggccagctgttaacgaccaaatttggtaa

SEQ ID NO: 19126 - DNA, 539 bp, Oryza sativa
  Clone ID: PAT_MRT4530_24617C.1
ggatccccgggctgcaggtgcttgaatctgaagggatcaaacacatttaacatttgtgtacaggtatgtacatatgctttgcctaagtttgatcatggccctatttcttatagtgggcaatggtatagatgctgggtgtatggcaatacttatcttttttgtggggttagagaactgccttcaatttgtttagtcttaagatacttcagtaagtataagggaactaataaagattgtttcttattatcatgcatcacttattaatgatggctcaattgcattgtgagtatacattttgcttttatgtcagcagaagaagaggttttctattgaatttacctgggtgaattgtaattactcaattaggcctgactagttactgttgataacaagcttatctataaaggacttgcactattgcaggtgcataaaagccataaacttactcttgcaatttacataagatggtattgttggagagagcagactgcaggatgtgtagctcacctagtagttagtaactgagaactcgtaatcat

SEQ ID NO: 19127 - DNA, 1260 bp, Oryza sativa
  Clone ID: PAT_MRT4530_24618C.1
atggcttccactgcccagccgcagcagcagccgcagcagcagcaggagcagcagccggtggcggcggcggcggtgccgactccggctcctccggcttccgaggcgcagccgcagaagccgacgagggtatcgttgtcgtacgaggagatctccaagctcttctcgctaccaatcgcagaggcagcctccatcctcggtgtttgcaccagcgttttgaagaggatttgccgcagccacggcatcgtcaggtggccgtatcgaaagcagttggtggctttaacaatttacaagctgctaacagaactgctgctaagaaacaaaaggccatcatcagaagcttcaatcacagcacctgtggcttttgggatgcacttggtgcgtgccttgattgagaactggaggtggcagcctttgccatggagaaaacagactgaggacatgcttgtatctgggaagtctggtgatgacacaaaaaacgctgaaagagagaaagccaagggacttcttgagatatctaaagttgcaaaacagaaggctctaagcgcatctggtctatcaacagtgattctactgaccatccgctgtctgagtatggatgctggggcagtagagtgggacattgggttggtaccagcaccatatgatgatctattgtcactattgaagcggtttgcagcatttgttctgacacttaaatctggacatattgatagatcaccaggcgctttccaaggagtggcaaaatctcaacagggaagttcgaaggcaggacaagtctcacccccaggaaaacaaaatgtgttgggtggatcagcaatcttgtcctatggtacccaaaccaaaggcatcccaacctacatggacgacttcaagtacggatttccatcatctggcttgtctttgcaaactatgaaatggtgggggactgacagccacacggagaccacacctgcgaaagacgataacggtgaagcccctgaatcagcaaatgaggcttcgaagggtatgaccgacgatgagttggactggggagcagatgaagctgaagccgaagccgatgccgatagtgcgatcacaaccgaaccatctgcacagctgtgctccctgagaaggaaagctgtagacgatgggcgcaagctgctgactggcaagtcctgcgggggactggagctgtgcaggctgaataagaggcagaagatggccctcgcccaggtgttcggagcctcactgccggagcagttgaggagcaagctcgggtga

SEQ ID NO: 19128 - DNA, 411 bp, Oryza sativa
  Clone ID: PAT_MRT4530_24619C.1
gagctaaaaaaaccactttatagattgagacactcgggaagatcatagaggaacaataacacacaccacaagaacacagattgcgattagccagtagatgcatagggcactgtacagttaatgaagcataaaaacactatgtcatggaggcgtgcgcttatttagagagatactatgctgcattgttcaaaaaagagtgacacatgatgctacgatgtcgttgagcagcgcgatcggaacaggctgaacagcacagagagattgagtactctagtcgagtgtcacaccaacacacaacgttgaacgcacatgttgttgtgcgcataacgagcttttgcagcaagagtgctagacctgttgatactctggaagacatagtaaacaatagctggcagaaggtaacggagactg

SEQ ID NO: 19129 - DNA, 327 bp, Oryza sativa
  Clone ID: PAT_MRT4530_2461C.1
atgggtcatacctacctccactccgccggaagcagatgcaacgtgggagcacggttgtctgccgatgacgtgaccggcgtcagaccagtcacagaccggtcattcttgtccaccacgcgtcagtttagcatgccgcacatctgcccttcttcatacaatgacttccttgccatggttgcgatgaagcttggaatgaatatggccgggactgacataccaactccaggagttagcacgccggctccggctagggacgagtgcctggagactctcatcattccgacgggacggggcgaggcgtgtgacaggccgcctgttgccacctaa

SEQ ID NO: 19130 - DNA, 151 bp, Oryza sativa
  Clone ID: PAT_MRT4530_24620C.1
atggcatgtgatggagatattgtgttcgtgtgggatgaggagttaaatttggagttcggtggttcaactggcgggacctcattggtcacactggcggtgggaacaagcaacgatggcgattccgggcggtcaaaccggattactaacaccg

SEQ ID NO: 19131 - DNA, 909 bp, Oryza sativa
  Clone ID: PAT_MRT4530_24621C.1
gcacgaggcacactccttctctctcctcctcctcctccccaccccaacgccatggctgccgcggtcgcctcccatcggttcctctccgtcgccgaggcgggcgccgccttccgctggaccccgtcccagctcgaccccaagatgttgtcattgcaaaacgaaatcttcattacatctggtggagaccgggatttgattaataggattctcagcaaaagcaaaactgaaacggttcctgagaacaaggatgatggtgagtctgatgatgataacgatgaggagggagatgacgaggatgctgaaaatcaaggcgacgatgatgctggtgatgaagatgcctcggaagaggaagggaatgatgaggacgaggacggggaccctgaagccaatggtgaaggagggagtgatgacgacgatggtggagaagatgacgatgacgaggatgaggacggggacgatgatgagggtgagggcgagggcgaggatgacgatgaggatgaggaggaagaagaggaagaggatgacgacgatgacgtcccgcaaccacctgccaaaaagaggaaatgatcaatgagtaacagccctaccttacaagcaagaacgtggctctgttcatcctgtgcttagtggttcactggttactggttagcaggtaggggttttagctcggtcgtcagccatagcctagtttgagaacaggaaaaaagaacacttagttgtgcatgtactatttaaaagattcttttttatcatgtctctcttctgatttgctaccgatttgtgtttgcttagccctttttacattgttgttgtaccctccagacattagacatgaatggatgtacgtaataatgcagcaatgcaagtaagacagcctcgttcttgtgttaaaaaaaaaaaaaaaaaaaa

SEQ ID NO: 19132 - DNA, 288 bp, Oryza sativa
  Clone ID: PAT_MRT4530_24622C.1
atggatatactacacattaggcatgggtatgacaccacctcgataccgcggccgccaccatctcgcagtcaaggttgccgacgcatcggccaccgcctccaccacctcatcaccgcggccgggaccactgcggtccccgccacctcacagcttcggcagccaacgcaccaaccactgccaccaccccaccaccacctcgtcaccggaaccggcaccattgcgcctgccaccaagtcgccgtcacgggatcagctaatttcaacaactgaagcacctcaagttcattaa

SEQ ID NO: 19133 - DNA, 420 bp, Oryza sativa
  Clone ID: PAT_MRT4530_24623C.1
atggtgaagcaatggatgctgcctcttcggcacgtaagttcagtcgatgtagacaacgtgtggaacttgctggatgatgaggtcgaggttggtgatgatgagtcgacgataagcggtgaagatgagcttggtggagttggtgataagcaccaacaggccagcagcacaagcggattggtgtcaaccatggtcgaagagagcatggcatgcaccaaccaggttgacgtcgaggcagctcaccatataaactggaagttcaggaagtcagcacgaggagttaagaccccatttgaacaggcagagaagagtgaccaggcgaccttcaagtacagtgcgatgcagggcgaggagatcttgaagtactgcgcctccttggaggtggagaccttgaatcactcttctttggaggaggtgacctag

SEQ ID NO: 19134 - DNA, 2703 bp, Oryza sativa
  Clone ID: PAT_MRT4530_24624C.1
atgaggtcgagacctcatgttttcctcttcatatctaaggttcctgcgtttttcctccgcgcccgccgcctccggagatgtactccccgcgcccacgccgccgactcggactccgagggatccctcctctccgacgtctccgcctccccgccacgccgccgctcgcctcctcgcccggcgccgcctcctcctcctcctcctcctccgcccaagcaccgtactaggcccgccgcccccaccaaacccaagctcaagcccacgccgcccgctgcctccgcgcccgcgcccgccccgccgcctccgcctacgctccgcgccgccgcgctctccgatccgcacggcctcgccgcgcgcatcgccgccggctctgctctcaccgcggcctccggcactgcctcgtcgtcctccttccgccgtctcgtccagtcgcgcaacccttccttcgatccagccaccgccttcacggctcccgcttcgtccgccccctccgaggttccgagcgccgctccgcggccgcccccgaccgccgccaccgacgcgccgccgcagaccaggcccaagcgggtgcaccccaactccgtgtcggaggtagcggccgcgtcggcggcggcggagcagccgaagcgggcaagagggggatccgagggcaacttcgtgcggctgaacatcaacgggtacggcaggaggaggacgttcaagaattcgcaggccaagcgctcgacgaaatgtcgatcctggcggcggcagcgcgccgccggtgcaacaccccgttctcagggcgacgaggaaggggatctcgtggcggaggccctgctggagcgggagaagcaggcagctagcgatagtgttctggaggctgtcgagagtgtgagggaggacccatcggagcaaaatctcaagagcttgctgaatgcagcatatgggcacgattcgttccgccaggggcagcttgaggcgatccagcaaattgttgcaggggagtcaacaatgcttgtgctgcccaccggtgcgggcaagtcgctatgctaccaggtgcctgctatgattttgcctggactgacactggtggtgagtccactgctttccttgatggttgatcaattgaggaagctccctgcatttctgccaggtggccttcttgcgagcagtcagacatcggatgagtttcatgatacactacaaaggctgcgtgcaggggaaataaaggtgctttttgtttcccctgagagattcttgaacgaagaattcctcctgatatttagggacacactaccaatatctcttgtggcgattgatgaagctcattgcatttctgaatggtctcataattttagaccttcatatctgagactccgagcgtcactacttaggagaaagctcaatgttcaatgtattcttgcaatgactgcaactgcaacgacccaaaccttggaggagataatgaatgccttagaaataccatctgataatctcattcaaacatctcaaataagagaaaatctacagctgtctatcagcacaagtgataacagactgaaagatttgatgttattattgaagtctcccccttttgttgacatgagaagtattatcgtctactgcaagtttcaggcagaaactgacttcgtctctaagtacttgtgtgataacaacattactgccaagagctaccatagtggacttctgattaagaacaggagccgtgtacaggagctattttgctctaacaaaataagagtgttttcctataatttcaccgagcaaccttttcttggcagtgatggtgtcgatggatatgcaatgagcaaatttctttaccagatattttcctctgagaacacaactgggtgcattggttcattggctaaagagttgacctcacgcaagtttgatataaaagaagaggtgcttttgacaattctcacacagctggaaattggtgatcaacaatacatccgtttacttcctcagttcagtgttacctgcacactgtattttcacaagacatcaccacaactgcttgctgacaaggatatactaattagatcggttttgaatagatcagagatgaaggatggacattatgtctttgacataccaagaatagctaatgatctgaagatcactatgaatgaagtatttgatcacctacataaactaaagttttcaggagaaatatcatttgaattgaaagatcctgcttactgttatgtgatcttgtggaggccagatgacttcaatgctctttcagcaaatctcacaaaatggctttctgaagtagaaagctcaaagatcagtaagttagatgctatgtttgctcttgcaaactttgctgtcaaagggtgtaaaaggacgggaggatgctctggttcccagcacactccgtgcattcagaagaagattatggagtacttcagcaaggacgatggcacctcagagaatgattgccgcactcagctgcagaagagcagcccattcttgcaagccgatataaaggtgttcattcaaagcaactcattcgcaaagttcaccccgagggctgttgcgaggattatgcacggcatctcgagccctgcttttccatctgtcacttggtccaaaaatcacttctggggacgttatgtggaggttgattttccactggtcatggaagcagccaaagctgaactggttaaacttgtcggaaaaggggaacagtgctag

SEQ ID NO: 19135 - DNA, 441 bp, Oryza sativa
  Clone ID: PAT_MRT4530_24625C.1
atggcggcggcggctggatggatgcggcagcggcggcaggatggaataggggagggagaggggtggggcggcggacagagagggaggggaaaggctcgccggtcgacgccgagctccgctgccacgcgagtcgagcccgttgatgccgagctccaccgccttggccaggtcgctccgccgcttcttcgaggacgctgccgcagctcagccttgaggacgacgccgctgcacggtccggaggatagcgccgccgccgctcggcccggaggacgtcgccgccgccgctcggcccggaggacgacgccaccgctcggcccggagaagatgagagccggccgacgccggcggagggagaagaggagccggcgaagggaggaggggatagccagcggcaggggcggaggcggcgggggaatgggcgatggaggagggttgagctga

SEQ ID NO: 19136 - DNA, 623 bp, Oryza sativa
  Clone ID: PAT_MRT4530_24626C.1
ggtccacttatcatccccaacccttgtcgctggcgccggctgtctatgcagccgtccctgctcgtcttcggaatcgtcgcacggtggccgaggcattgactgacagaagatggatccgggacatcagttcggtgttgggtattcaagcgattctggagtatttcaagctttgggattgccttcggtcagtgcagctttccgaagaaccggactctctatcttggcgcacaagccaattttgcaatctttggcgccccctcgttgtcgctacttcctttggttggtcgcccttaaccgttgctagacagtgaaccggccttcagagtcgtggtttgtcatatctggatcgatgtgttctttgggatcaatgcgaagagacgattgataatctcttggtcgcatgcccggagtcgcgacaactgtggtgggttgcgctcagagctatcggcgggcattctcaatgcttaccgctcaatgaacactctttcttttcatggttgtgcgattgtcgtaagaagatgatcaagaaacatcaccaggattttgacaccatcgcaacgttggttgcagggagttgtatagtactaagaaatagcatttttctcacctcaaagcctaggcgg

SEQ ID NO: 19137 - DNA, 163 bp, Oryza sativa
  Clone ID: PAT_MRT4530_24627C.1
accagaaatgtatgaagtagccatcagcaagaacgtcatcaggcatccattcacatcgtctggtaatgtcgggcgatctgcttcacctgcattggtgctcagaaactgggatgtgtacaagggcaacggcacaagaaagctttatgaaaaacatgcgttgtaa

SEQ ID NO: 19138 - DNA, 1173 bp, Oryza sativa
  Clone ID: PAT_MRT4530_24628C.1
atgcgccacatagacatatacactctttgtttggaccggttcctctatcctaggaaaaccaggggagatagcttgactctgactggtatgttgatggatgctgatgaatcctcagcgtatcagcctgacgacaagggttctttccccatccatgtcgctgcagcagagggtaatgatggcacgatcaacatactgctcaataagagccccaattgtgccaccttgcgcaatgcccagggaagaacatttctgcatattgctgttgagaacggaagacacacaatcataatgtttgttcgcaggagaagaaggctggcagctaaaattatgaatttgcaggacaacgatggaaacaccgccctacacttggctatacaagatggggatctgcatgctgttttatgtctattgatgaacccagtagtaaaagttgattgtctgaacaaggagggtctaacacctctagatatatcaaggaagctgataccagaagggcttcttcatggatcgaagtgcatttgccgaacggtccgtgaggaaagagattctaaaatagttgaaaaagatgacgatgaacaagaagattcaaagacaattacggagtctacacaagttatggccgtctgctccacactcattgcaactgtggcattcgcagcagcttttacattgcctggaggttatagagcagatgatcacaccaatggcggcacgccgacattcgtcggaagctacggtttcgatgcattcgtcttggccatcacatttgcattcgtctactccttgttggctacatttagcctcgtgtattcaggaatgaccaaagttgactacagcatccgcttggagcaccttaactcggccaatagcttggtctggctatcaatcaggtgcttgctagctgcatttgcattaggtttatacgttgtcctggcaccagttgctcacaagactgccttgcttatctgcctcatgtgttccgttgggttattgcacgggcatacgtcaatgaagacacagatccgcatggccgtgctcttacagggaaggattgggtttaaggtgtggtggattttgggcaggaagatacttcgaaactttctgcactcattttggcccttcctgattatctttggttggccagcttatctgaaatggaggcaccaacagtag

SEQ ID NO: 19139 - DNA, 1254 bp, Oryza sativa
  Clone ID: PAT_MRT4530_24629C.1
ctactgttggtgcctccatttcagataagctgcccaaccaaagataatcaggaagggccaaaatgagtgcagaaagtttcgaagtatcttcctgcccaaaatccaccacaccttaaacccaatccttccctgtaagagcacggccatgcggatctgtgtcttcattgacgtatgcccgtgcaataacccaacggaacacatgaggcagataagcaaggcagtcttgtgagcaactggtgccaggacaacgtataaacctaatgcaaatgcagctagcaagcacctgattgatagccagaccaagctattggccgagttaaggtgctccaagcggatgctgtagtcaactttggtcattcctgaatacacgaggctaaatgtagccaacaaggagtagacgaatgcaaatgtgatggccaagacgaatgcatcgaaaccgtagcttccgacgaatgtcggcgtgccgccattggtgtgatcatctgctctataacctccaggcaatgtaaaagctgctgcgaatgccacagttgcaatgagtgtggagcagacggccataacttgtgtagactccgtaattgtctttgaatcttcttgttcatcgtcatctttttcaactattttagaatctctttcctcacggaccgttcggcaaatgcacttctcttgacgatggtcaagggaagggttagcatgatgtgcattcgcaagatgtagtgacctctttatccaaattcgttgatgcgatccatgaagaagcccttctggtatcagcttccttgatatatctagaggtgttagaccctccttgttcagacaatcaacttttactactgggttcatcaatagacataaaacagcatgcagatccccatcttgtatagccaagtgtagggcggtgtttccatcgttgtcctgcaaattcataattttagctgccagccttcttctcctgcgaacaaacattatgattgtgtgtcttccgttctcaacagcaatatgcagaaatgttcttccctgggcattgcgcaaggtggcacaattggggctcttattgagcagtatgttgatcgtgccatcattaccctctgctgcagcgacatggatggggaaagaacccttgtcgtcaggctgatacgctgaggattcatcagcatccatcaacataccagtcagagtcaagctatctcccctggttttcctaggatagaggaaccggtccaaacaaagagtgtatatgtctatgtggcgcat

SEQ ID NO: 19140 - DNA, 421 bp, Oryza sativa
  unsure (1)..(421): unsure at all n locations
  Clone ID: PAT_MRT4530_2462C.1
ggagtccatggcgaaaggaccacttcgtccccctccacaacaactccgccgctccggagaagcaagataacccgatcgaccatgcttctcacccgtctcgatccgtacccggagcgattccgagaatgagtgaaatcgatgtctgggcactcnctcaatggcttcgtcgtcatggtcgccatcatcaccaatatgaccgccggcttccttcgacgaggacctcaagaactccaagtccgttcagtcgcaccagaaatactgatctgatccgcgcctccatggtgaaggaacagctgatataggctaagacttaagtatgtactatattactggtccaaaagaacctaccgtatgtactggtgatccatttagatggacaaccgctccatgtgcatctaataagaggagtctgaatctttgg

SEQ ID NO: 19141 - DNA, 477 bp, Oryza sativa
  Clone ID: PAT_MRT4530_24630C.1
ggtgtttttttattttttgttgttttttttttttttttttttttttttttttttttttttttgggtttttttttttttttttttttttttttttttttttttttttttttttaacccaggcaacgggcccaaaaaaacgtggggggaaaaaggcccgcccacggcccaaaaaaaaagggcgggccgaatttgataacagcctaaaaaaaacagaaaaaccgtgaacgggtaaaaaaaaaaaaactacccctttaaagggggctaaactttgaagggccctaaaaggggggaaaagcatcataaccatactgtccggggggaccccaaaaaaaccggaaaaaaaccccccctattgcagacgggggggggcaaactttatcaaaggggggtggaaactcaaaaactgtacaacccgtgcaaggccgcacttaaggggggccccatacaaccttgcgggggcccaaagaaaaagcacta

SEQ ID NO: 19142 - DNA, 1008 bp, Oryza sativa
  Clone ID: PAT_MRT4530_24631C.1
atggcagcttctcaaccgagtgttcatggtgaaaatcatgatgagcccgacagccctatcacacgggctgaggtgcagcaaatagggaataatcttcttcaagcgatggaacatttgctaaatgcacgccttccggctgctggaggtggagcggttcagccaccgtttggtgatcccaaggatgatattgtggatgcacaatcggcggatgttgctgattcagaactccatggcccgcctaatggtggaggtcgtggttttgtagctgctggagcacgaggaggagagaatgatttggagcagcagcatgcccgtccttgccgaggtgctgtccttggtaatggagaacatcatcgtggtcaccatgatcgtgatgactcggataatgttgctcggatgtttccatacaacactttgcaagatcttcttgaccaagctcagtgcacggaaagatccattcagcaagaatggcgtaattggttctctagtggccgctccaatgcagctccatggcgtcgcacacagcaagccaccacttttgttggcaatcattctcagggagcctctacacgagcctctccacctgctgctacagccaagccgcaaccatcttcggcatcatctccagctgcatgcacagagtctcgtcggcctactgctcccacaccaacatcttcatcgcgtagccgcgatattgtgtgtcacaaatgtcaaggtcatggccacattgctgctgagtgtcctagtaggaggaccatgcttgtaactgagacgggtgaatgggaatctgcaagtgagaccaaggatgatagtttacgtgaagacgagatggttaacaagcaagcggatagtgatgctattcaagtagataatggagacaataattgcttcatctctcgtcgagtgcttagtgtgcaagttgcaaaggaagacaatggtcagcgacacaatatttttcacactcgagctgcaacaacattgctagtttggagttggtggaaagattag

SEQ ID NO: 19143 - DNA, 6093 bp, Oryza sativa
  Clone ID: PAT_MRT4530_24632C.1
atggctgagcaaacaaaggcacccgacctctctcccagtgtgagtggcgacgacggggagccgaatccacgccgtcgagctcgcactccaccgccccctcctcgccaaagtcctaagcagggggaggcgctcgaaagggtcgaaagatccgcggcttcaccgatcgcgggcgatggaggagaacggcgagatggggagcgtcgcctccttgtctacggcgacggcagcacgccccagggcgcgctccaagctgcgggcgcgctcttacgccacccgcctgtcgtccctgacccggaatctccagcccaacgatggctggacgacgtggccaaattggtcatgacggcgcggcagcgcctagatgctggtgggcggtcctccgccaccaagacctctggtgctgctaccactggctccgcgtcgtcaagacgaagggcacgacgagcagcagccgctgttcgccgttcggtagccactccctcatcgactccttcgacccgagaagatctgcgtagggagcagggcgcccgcgccagcctcgagcgccggcgtaatgaccgaagtgctgcccacgcaatggaaggcgcttcctcgtccagagtgtcacctcgacacggacctgggaatcagccctccgtgcccccggttggtggtgttggctgtagagccttcgtggcgagtcttcggaatgtccgttggcccccaaggttccggcccaccatcgccgaaaaatatgatggcagtgtcaaccccactgagtttctccaggtctatacgaccgggattgaggccgctgggggtgacgacagagtcatggcgaatttctttcccatggccctgaagggacaggcgcggggttggctaatgaacctgccacctgcgtcggtccactcttgggaggatttatgccaacagttcaccatgaactttcaaggcacttatccgcgcccaggcgaagaagcggacttgcacgcggtacagcgaggggatgatgagtcacttcgctcgtacattcagcggttttgccaagtccgcaataccataccatgcatccctgcacacgcggtgatctacgcgttcaggggtggtgtgcggcacaaccgcatgctcgaaaagatcgcttccaaagagccccagactaccgcggagctttttcagctcgcagaccgagtggctcgtaaggaggaagcatggacctggaacccctccggttccggagtgacagcttcggccgcccccggatccgccgctcagacagggcagcgtgacaggaggaggaagaagaggtcggtctattccggcgacgagggtcatgtcctcgccgtcgagggcgcttcacgggccacccgaaaggggaggccttcgagcgataaaaagaaggaggccagtgttcccagcagggagcgccctaccggcaagtggtgcaccgtccacaacacctccctccatgaccttgcggactgtcgcgcagtcaaaagcttggctgagcggacaaggaagtgggaggaggagaggaggcaggagcgccgggaaggcaagtccccggcggttccttccggccgtcggcgaagtgaggccaagcagaaggcccccgccgaggacatcgatgatggcgataatgacctaggtttccaagagcctggagctaccatagccactgtcgatggaggagcgtgtgcgcacgtttctcgccggagcctcaaggccatgaagcgagagcttctggccgctgcccctactcatgaggcgacgcgccgggcgcggtggtcggaggttgccctcactttcgaccagaccgaccacccaccgtgtgtcgcccggggagggcagattgcgatggtggtttcccccaccatctgcaacgtgaagttggggcgtgtcctcatagatgggggagcggccctcaacatcatttctcccgcggcttttgatgccatcaaggccctggggatggtgctccagccgtcccaaccgattatcggtgtgactccggggcacacatggccgttgggtcacatcgacctaccggtcacctttggtggatcaaccaacttccgcacggagcgggtgaacttcgatgtggcggacctcagtctgccctacaacgcggtcctggggaggcccgcgttggtgaagttcatggcggcggtccactacgcctacctccagatgaagatgccgggccccggtggccccatctctgtccatggcgacctgaaagtcgcgctcgcttgcatggagcagcgcgcggaccacctcgctgctgcgtccaagcccgagggtggtgacgagaggcttggcacctccgcccccgccgccccgaagcagcggatagtcacgtccgatgaggtcccggtcaaggaggaagacgcgctcgtctccttcctgcgggcaaacgctgacgtcttcgcatggagaccggcggatatgcccggggtccccagggaggtgatcgagcaccgtctcgccgtgcggccgggcgcaaggccggtccggcagaaagtgcggcgccaggccccggaacgtcaagccttcatccgcgaggaggtggcgcgacttctggaggccggattcatccgcgaggtcatccacccggagtggctggcgaacccggtggtcgttcccaaggcgaacggcaagcttcggatgtgcatcgactacaccgaccttaacaaggcatgtcctaaggatccttaccccttgcctcgcatagatcagattgtcgactccacagcggggtgcgaccttttgtgttttctagatgcatattctggttaccatcagattcgcatggctagggaagatgaggaaaaaactgcgtttattactcccataggaacttattgttatacgacaatgccctttgggttaaagaatgcaggtcctacttttcaacgtactactcgaatttctttgggtagccaattaggacgtaatgttgaggcttatgtcgatgacttggttgtaaaaacgcgcaaccaggaaacgttgctttcagatttagcggaaacttttgagagcctccgctccgcccgcataaaactgaaccccgataagtgtgtgtttggtgtacctgcgggcaagcttctcgggttcttggtctctgcccgaggcatcgaggccaaccccgagaagatacgagctatagagcggatgcgcccccccagtaaacttagggatgtgcaatgtgtcaccggttgcatggccgccctaagtcggttcatatcgaagctgggagagaaggcgctacccttatttaagctcctcaagcgctccaggccgtttacttggacgaaggaagctgaacgcgccctcactcagttgaaagcatatctcagctctcctccggttctagtcgccccggagccaaacgagcccctgctactctacttagcggcgaccccccaagtagttagtgcagcgttggttgtggagcgcgatgagggcaatcctcattccgcgcacccccaccctgtgctgacttggcccgggagcgagcagggaggagaggcccccgagccgaacggtggcctaaggcccctgacgaccggagtcggccctctccccgctcgtcagacggtgctgggcgcccccgaccctcaggaaggccccgaggccactgcgggaaggccgcacctatcgccctttgaccccgaggctaaccctgtaccgattcgacccgggagggagcagggagaagaggcccccgagccgaacggtggcctaaggcccctgacgaccagagttggccctttgcccgcttgtccgacgacgccaggagcccccgacccccaggacggccctgaggccactgtgggaaggccgcccctgtcgtcctccgaccccgaggtcatcggcacagaagacgagtgtgccccgaggggccacttggatgaggagcgccccggggatatggcccttagcgaaggggatcggcccccaccgaagggtgcagcggcccgtctactttgtagcgaggccctccgagacgccaagacccgataccctcaggcccagaagatgctttacgctattctgatggcctcgaggaaactgcgccattattttcaggcgcatcgggtcactgtggttacgtcttaccccctcggtcaaatcttgcataatcgagagggtacaggacgagtggtaaaatgggcaatcgagctttctgagttcgatctgcactttgaaccacgccacgctatcaagagccaggccctcgccgattttgtggcagagtggaccccggctccagagaccgtctcaatccccgagggcagcacggacccctctcagctgcctcacaccgcccactgggtgatgcagttcgacggttctctgtctctccagggcgccggtgcgggggtcacattgacctctccgaacggagacgtcctcagatacttggtccgtctcgactttcgagcgactaataatatggcagagtacgagggactccttgccggactcagagtggcagctggactggggatccgccgcctcttagtgttaggcgactcccagctggtcgttaaccaggtctgtaaggagtaccggtgctctgacccacagatggacgcttacgtacgccaagtgcggcgtatggagcgccattttgacgggatagagcttcggcatgtacccagacgggataacatggttgccgacgaactctcacggctcgcgtcctcgcgaacccagaccccaccgggcgcctttgaagaaaggcttacccagccgtcggcgcgacccgaccccttaggggagacggatgcgcctgaccggcccccgaggcccgtcggagtccaggcctcgggacccgaagggagcgctccaagctcccttagattgattgcttggatctctgagatccaagcatacctcacagataagactctacctgaggaccgtgaagggagtgaacgcgtccaacgcatttccaaacgctacgtgctggtagaagggaccctctatcggcgcgcggctaatggaatcctcctgaagtgcattcctcaggaacaaggtgttgagcttcttgccgatatccatgaaggcgagtgcggagcccattccgcctcgcgcaccttggttggcaaggcctttcgtcaagggttctattggccaacagctctcaatgatgcagttgatctggtccggcgatgcagagcgtgtcagtttcacgccaagcaaatccatcagccggcccaggccctgcagatcataccactttcgtggccatttgctgtctgggggctcgatatcctgggaccgtttaagcgggccccgggcgggtttgagtatctgtatgtcgcgatcgacaagttcactaagtggcccgaggcttatccggtcgtcaagatcgataagcactctgcacttaaattcattaagggcatcacggcccgttttggggtgcctaaccgtattattacggataatggcacccaattcactagtgaactcttcggcgactactgcgaagacatgggcatcaagctctgcttcgcctcacctgcccaccccagaagcaatggccaagtggagcgcgccaatgcagaaatcctcaaaggccttaaaaccaagactttcaatattctcaagaagcatggcgattcgtggatcgaggagttgccagcggtgctctgggcaaaccgaaccacaccaagccgagcaaccggggaaacgcctttcttcctcgtctacggcgcagaagcggttctcccatccgagctcaccctgaggtctcctcgggccaccatgtactgcgaagctgatcaagatcagcttcgcagagatgacctcgactacttggaagagcgaagaaggcgcgcggccctccgagccgcgcgctaccagcagagcctgcggcgctaccatcagcgccacgtccgggcccgatcactctgcgtcgacgacctcgtcttacgccgcgtccaaacgcgtgctggattgagcaagctctcaccaatgtgggagggtccgtatcgagtgatcggtgtcccccggccgggctccatacggctggccacgggcgacggcactgagctgcctaacccgtggaacatcgaacaccttcgtcgcttctacccctga

SEQ ID NO: 19144 - DNA, 6093 bp, Oryza sativa
  Clone ID: PAT_MRT4530_24633C.1
atggccgagcaagcaaaggcgcacaaccactctccgagtgtgagtggcgacgacggggagccgaacccacgccgtcgagctcgtactccaccgccccctccacgccaaagtcctaagcggggggaggcgctcgagagggtcgaaagatccgcgacttcaccgatcgcgggtgatggaaaagagcggcaagatggggagcgtcgcctcctcgtctacggcgacggcagcacgccccagggtgcgctccaagctgcgggcgcgctcttacgccacccgcctgtcgtccctgacccggagtctccagcccaacgatggctggacgacgtggccaaattggtcatgacggcgcggcagcgcctagatgctggtgggcggtcctccgccaccaagacctctggtgctgctaccaccggctccgcgtcgtcaagacggagggcacgacgagcagcagccgctgttcgccgttcggctgccactccttcgtcgactccttcgacccgggaagatctgcgtggggagcaggacgcccgcgccagcatcgagcgccggcgtaatgaccgaagtgctgcccacgcaacggagggcgcttcctcgtccagagtgtcacctcgacacggacgtgggaatcagccctccgtgcccccggttggtggtgtcggctgtagagcctttgtggcgagtcttcggaatgtccgttggcccccaaggttccggcccaccatcgccgaaaaatatgatggcagcgtcaaccccgccgagtttctccaggtctatacgaccgggattgaggccgccgggggtgacgacagggtcatggcgaatttctttcccatggccctgaaggggcaggcgcggggttggctaatgaacttgccacctgcatctgtccactcttgggaggatttgtgccaacagttcaccatgaacttccaaggcacatatccgcgccccggtgaggaagcggacttgcacgccgtacagcgaagggacgatgagtcacttcgatcgtacattcagcggttctgtcaagtccgcaataccataccatgcatccctgcgcacgcggtaatctacgcgttcagggggggcgtgcggcacaaccgcatgctcgaaaagatcgcctccaaagagccccagactaccgcagaactttttcagctcgcggaccgagtggctcgtaaggaggaggcctggacttggaacccctccggttccggtgtggcagcttcggccgcccccggatctgccgctcagacagggcggcgtgacaggaggaggaagaagaggtcagtccgttccgacgacgagggtcatgtcctcgccgtcgagggcgcttcgcgggccacccgaaaggggaggcctgcgagcgacaaaaagaaggaggccagtgctcccagcagggagcgccccaccggcaagtggtgcaccgtccacaatacctccctccatgaccttgcggactgtcgcgcagtcaaaagcttggctgagcggacaaggaagtgggaggaggagaggaggcaggagcgccgggaaggcaagtccccggcggttccttccggccatcggcgaagtgaggccaagcagaaggcccccgccgaggacatcgatgatggcgatgatgacctaggtttccaagagcctggggccaccattgccactgtcgatggaggagcgtgtgcgcacgtttctcgccggagcctcaaggccatgaagcgagagcttctggccgcggcccctactcatgaggcgacgcgccgggcgcggtggtcggaggttgccctcactttcgaccagaccgaccacccaccgtgcgttgcccggggagggcagattgcgatggtggtttctcccaccgtttgcaacgtgaagttggggcgtgtcctcattgatggaggagcagccctcaacatcctttcccccgcagcctttgatgccatcaaggccccggggatgatgctccggccgtcccagccaatcatcggcgtgacgccggggcacacttggccgctaggtcatatcgacctcccggtcaccttcggtggacccgccaatttccgcacggagcgggtgaacttcgatgtggcggacctcagtctgccctacaacgcggtcctggggaggcccgcgttggtgaagttcatggcggcggtccactacgcctacctccagatgaagatgccgggccccgatggccccatctctgtccatggcgacctcaaagtcgcgctcgcttgtatggagcagcgcgcggaccgcctcgccgtcgtgaccaagcccgagggtggcgacgagaggcttggcacatccgcccccgccgccccgaggcagcggatagccacgtgcgatgaggtcccggtcaaggaggaagacgcgctcgtctccttcctgcgggcaaacgctgacgtcttcgcatggagaccggcggatatgcccggggtccccagggaggtgattgagcaccgtctcgccgtacggccgggcgcaaggccggtccggcagaaagtgcggcggcaggccccggaacgtcaagccttcatccgcgaggaggtggcgcgacttctcgaggccggattcatccgtgaggtcatccacccggagtggctggcgaacccggtggtcgttcccaaggcgaacggcaagcttcggatgtgcatcgactacaccgaccttaacaaggcatgtcctaaggatccttaccccctgcctcgcatagatcggattgtcgactccaccgcggggtgcgaccttttgtgttttctagatgcatactctggttaccatcagattcgcatggctagggaggatgaggaaaaaactgcgttcattacccccataggaacctattgttatacgacgatgcccttcgggttaaagaatgcaggtcctacttttcagcgtactactcgaatttctttgggtagccaaataggacgtaatgttgaggcttatgtcgatgacttggttgtaaagacgcgcaaccaagagactttactctcagatctagccgaaacttttgaaagtctccgctccgcccgcataaaactgaaccccgataagtgcgtattcggtgtacctgcgggcaaacttctcgggttcctagtctctgcccgaggcatcgaggccaaccccgagaaggtacgagctatagagcggatgcgccccctcagcaaacttagggatgtgcagtgcgtcaccggttgcatggccgccctaagtcgtttcatatcgaggctgggagagaaggcgctacccctatttaagctcctcaaacgctctgggccgtttgcttggacggaggaagctgaacatgccctcactcgattgaaggcatatctcagctctcctccggttctggtcgccccggagccaaatgagcccctgctactctacttagcggcgaccccccaagtagttagtgcagcgttggttgtggagcgcgatgaggacaatcctcattccgcgcacccccaccctgtgctgacttggcccgggagcgagcagggaggagaggcccccgagccgaacggtggcctaaggcccctgatgaccggagtcggccctctgcccgctcgtcagacggtgctgggtgcccccgaccctcaggaaggccccgaggccactgcgggaaggccgcacctatcgccctctgaccccgaggctaaccctgtaccgattcgacccgggagagagcagggaggagaggcccccgagccgaacggtggcccaaggctcccgacgaccggagatggccctctgcccgcttgtccgacgacgccaggagcccccgactcccaggacggccccgaggccactgtgggaaggccgcccctgtcatcctccgaccccgaggtcatcggcacagaagacgagtgcgccccgaggggccacttggacgaagagcgccccggggatatggcccctagcgaagaggatcggccccaccgaaaagtgcagcgacctgtctactttgttagtgaggccctccgggacgccaagacccgataccctcaggcccagaagatgctttacgctattctgatggcctcgaggaaactgcgccattatttccaggcgcatcgggtcactgtggttacgtcttaccccctcggtcaaatcttgcataatcgagagggtacaggacgggtggtaaaatgggcaatcgagctttctgagttcgatttgcactttgaaccacgccacgctatcaagagccaggccctcgccgattttgtggcagagtggaccccggctccagagaccgcttcagtctctgaggccagctcggacccctcgcagctgcctcacaccgcccactgggtgatgcagttcgacggctccctgtctcttcagggcgccggtgcgggggtcacgataacttctccgagcggagacgtcctcaaatacttggtccgtctcgactttcgagcgaccaataatatggcagagtacgagggactccttgccggactcagagtggcaactggactggggatccgccgcctcttggtgttaggcgactctcagctggttgttaaccaagtctgcaaggagtaccggtgctctgacccgcagatggacgcctacgtacgccaagtacggcgcatggagcgccattttgacgggatagagcttcggcacgtgcccagacgggataatatgatagccgacgaactctcacgactcgcgtcctcgcgagcccagaccccaccgggcgtctttgaagaaaggcttgcccagccgtcggcgcgacccgaccccttaggggagacggacgcgcctgatcggcccccgaggcccgtcggagcccaggcctcgggacccgaggggagcgctcctagctcccttagattgattgcttggatctctgagatccaagcatacctcacagataagactctacctgaggaccgcgaagggagtgaacgcgtccaacgcatttccaaacgctacgtgctggtagaagggatcctctatcggcgcgcggctaacggaatcctcctgaagtgcattcctcaggaacaaggcattgaacttcttgccgatatccatgaaggcgagtgcggagcccattccgcctcgcgcaccttggttggtaaggcctttcgtcaaggattctattggccgacagctctcaatgacgcggtcgacctggtccggcgatgcagagcgtgtcagttccacgccaagcaaatccatcagccggcccaggccctgcagaccataccactttcgtggccatttgctgtctgggggctcgatatcctgggaccgtttaggcgggccccgggcgggtttgagtatctgtatgtcgcgatcgacaagttcactaagtggcccgaggcttatccggtcatcaagatcgataagcactccgcacttaaattcattaagggcatcacggcccggtttggagtgcctaaccgtattattacggataacggcacccaattcactagtgaactcttcggcgactactgcgaagacatgggcattaggctctgcttcgcctcacctgcccaccccagaagcaatggtcaagtggagcgcgccaatgcagaaatcctcaaaggccttaaaaccaagaccttcaatattctcaagaagcacggcgattcatggatcgaggagttgccagcggtgctctgggcgaaccgaaccacaccaagccgagcaaccggggaaacgcctttcttcctcgtctacggcgcggaagcggttctcccatccgagctcaccctgaggtctcctcgggccaccatgtattgcgaggctgatcaagatcagcttcgcagagatgacctcgactacttggaagaacgaaggcggcgcgcggccctccgagccgcgcgttaccagcagagcctgcggcgctaccatcagcgccacgtccgggcccgatcactctgcgtcgacgacctcgtcttacgccgcgtccaaacgcgtgctggattgagcaagctctcaccaatgtgggagggtccgtatcgagtgatcggcgtcccccggccgggctccatacggctggccacgggcgacggcactgagttgcctaacccatggaacatcgagcaccttcgtcgcttctacccctga

SEQ ID NO: 19145 - DNA, 378 bp, Oryza sativa
  Clone ID: PAT_MRT4530_24634C.1
atggcaaggcccggcgctgtgaagaatattgaaagctgggacgagtttacaaagcattttgtgaaatcagaggacaagctggtggtgctggtattcatggcgccgtggtcggagccgtggaagctgatgaggccggcggtggagaagatggcgtcggggctgaagagcgaggaggccgaggtgtgcacgatcagcgtcgaccggttcaacacgctggggcggctgctgcgggtggaggcgctgccgacgttcgtgctggtgaagaggcaccgggcggtggctcgcgtcgtcggcgtcaaccgggacgatcttcacagcagcatcaacaagcacctcgcaccaccctcttcttctccacaacccattaatatttcttag

SEQ ID NO: 19146 - DNA, 6093 bp, Oryza sativa
  Clone ID: PAT_MRT4530_24635C.1
atggccgagcaagcaaaggtgcacgacctctctccgagtgtgagcggcgacgacggggagccgaatccacgccgtcgagctcgtactccaccgccccctcctcgccaaagtcctaagcagggggaggcgctcgaaagggtcgaaagatccgcggcttcaccgatcgcgggcgatggaggagaacggcgagatggggagcgtcgcctcctcgtctacggcgacggcagcacgccccagggcgcgctccaagctgcgggcgcgctcttacgtcacccgcctgtcgtccctgacccggaatctccagcccaacgatggctggacgacgtggccaaattggtcatgacggcgcggcagcgcctagatgctggtgggcggtcctccgccaccaagacctctggtgctgctaccactggctccgcgtcgtcaagacgaagggcacgacgagcagcagccgctgttcgccgttcggtagccactccctcatcgactccttcgacccgagaagatctgcgtagggagcagggcgcccgcgccagcctcgagcgccggcgtaatgaccgaagtactccccgcgcaacggagggcgcctcttcgtccagagtatcacctcgacatggacgtgaggaccagccctccgtgcccccggctggtggtatcggctgtagagcctttgtggcgagtcttcggaatgtccgttggcccctaaggttccgtcccaccatcaccgagaagtatgatgggagtgtcaaccccaccgagtttctccaggtctacacgaccgggattgaggccgccgggggtgacgacagggtcatggcgaatttctttcccatggccctgaaggggcaagcacggggttggctaatgaacttgccacccgcgtctgtccactcctgggaggatttgtgccagcagttcaccatgaacttccaaggcacgtatccgcgccccggtgaggaagcggacttgcacgctgtacagcgaagggacgatgagtcgcttcgatcgtacattcagcggttttgtcaagtccgcaataccataccatgcatccctgcacacgcagtaatctacgcgttcagggggggtgtgcggcacaaccgcatgctcgaaaagatcgcctccaaagagccccagactaccgcagagctttttcagctcgcggaccgagtggctcgcaaggaggaggcctggacttggaacccctccggttccggagtggcagcttcggccgcccccggatccgccgctcagtcagggcggcgtgataggagaaggaagaagaggtcagtccgttccgacgacgagggtcatgtcctcgccgtcgagggcgcttcacgggccacccgaaaggggaggcctgcgagcgacaaaaagaaggaggccagcgttcccagcagggagcgccctaccggcaagtggtgcaccgtccacaacacctccctccatgaccttgcggactgtcgcgcagtcaaaagcttggctgagcggacaaggaagtgggaggaggagaggaggcaggagcgccgggaaggcaagtccccggcggttccttccggccgtcggcgaagtgaggccaagcagaaggcccccgccgaggacatcgatgatggcgataatgacctaggtttccaagagcctggggctaccatagccactgtcgatggaggagcgtgtgcgcacgtttctcgccggagcctcaaggccatgaagcgagagcttctggccgttgcccctactcatgaggcgacgcgccgggcgcggtggttggaagttgccctcacttttgaccagtccgaccacccgccgtgcgttgcccggggagggcagattgcgatggtggtttctcccaccgtttgcaacgtgaagttggggcgtgtcctcattgatggaggagcagccctcaacatcctttcccccgcagcctttgatgccatcaaggccccggggatgatgctccggccgtcccagccaatcatcggcgtgacgccggggcacacttggccgctaggtcatatcgacctcccggtcacctttggtggacccgccaatttccgcacggagcgggtgaacttcgatgtggcggacctcagtctgccctacaacgcggtcctggggaggcccgcgttggtgaagttcatggcggctgtccactacgcctacctccagatgaagatgccgggccccgacggccccatctctgtccatggcgacctcaaagtcgcgctcgcttgtatggagcagcgtgcggaccgcctcgccgtcgtgtccaagcccgagggcggcgacgagaggcttgacacatccgcccccgccgccccgaagcagcggatagtcacgtctgatgaggtcccggtcaaggaggaagacgcgctcgtctccttcctgcgggcaaacgctgacgtcttcgcatggagaccggcggatatgcccggggtccccagggaggtgattgagcaccgtctcgccgtgcggccgggtgcaaggccggtccggcagaaagtgcggcggcaggccccggaacgtcaagccttcatccgcgaggaggtggcgcgacttctggaggccggattcatccgcgaggtcatccacccggagtggctggcgaacccggtggtcgttcccaaggcgaacggcaagcttcggatgtgcatcgactacaccgaccttaacaaggcatgtcctaaggatccttaccccttgcctcgcatagatcagattgtcgactccacagcggggtgcgaccttttgtgttttctagatgcatactctggttaccatcagattcgcatggctagggaggatgaggaaaaaactgcgttcattactcccataggaacttattgttatacgacaatgccctttgggttaaagaatgcaggtcctacttttcaacgtactactcgaatttctttgggtagccaattaggacgtaatgttgaggcttatgtcgatgacttggttgtaaaaacgcgcaaccaggaaacgttgctttcagatttagcggaaacttttgagagcctccgctccgcccgcataaaattgaaccccgataagtgtgtgtttggtgtacctgcgggcaagcttctcgggttcttggtctctgcccgaggcatcgaggccaaccccgagaagatacgagctatagagcggatgcgcccccccagtaaacttagggatgtgcaatgtgtcaccggttgcatggccgccctaagtcggttcatatcgaagctgggagagaaggcgctacccttatttaagctcctcaagcgctccgggccgtttacttggacggaggaagctgaacgcgccctcactcaattgaaagcatatctcagctctcctccggttctagtcgccccggagccaaacgagcccctactactctacttagcggcgaccccccaagtagttagtgcagcgttagttgtggagcgcgatgagggcaatcctcattccgcgcacccccgccctgtgctgacttggcccgggagcgagcagggaggagaggcccccgagccgaacggaggcctaaggcccctgacgaccggagtcggccctctccccgctcgtcagatggtgctgggcgcccccgaccctcaggaaggccccgaggccactgcgggaaggctgcacctatcgccctctgaccccgaggctaaccctgtaccgattcgacccgggagggagcagggagaagaggcccccgagccgaacggtggcctaaggcccctgacgaccagagttggccctttgcccgtttgtccgacgacgccaggagcccccgacccccagaacggccccgaggccactgtgggaaggccgcccctgtcgtcctccgaccccgaggtcatcggcacagaagacgagtgcgccccgaggggccacttggacgaggagcgccccggggatatggcccctagcgaaggggatcggccccaccgaagggtgcagcggcctgtctactttgttagcgaggccctccgggacgccaagacccgataccctcaggcccagaagatgctttacgctattctgatggcctcgaggaaactgcgccattatttccaggcgcatcgggtcaccgtggttacgtcttaccccctcggtcaaatcttgcataatcgggagggtacaggacgggtggtaaaatgggcaatcgagctttctgagtttgatttacactttgaaccacgtcacgcaatcaagagccaggccctcgccgattttgtggcagagtggaccccggctccagagaccatttcagtctctgaagccagctcagacccctcgctgttgcctcacgccgcccactgggtgatgcagttcgacggctcattgtctcttcagggcgccggcgcggggatcacgttgacctctccgaacggagacgtcctcaaatacttggtccgcctcgactttcgagcgaccaataatatggcagagtacgagggactccttgccggactcagagtggcagctggactggggatccgccgtctcttggtgttaggcgattcccagctagtcgttaaccaagtctgtaaggagtaccggtgctctgacccgcaaatggacgcttacgtacgccaagtgcggcgtatggagcgccattttgacgggatagagcttcggcatgtgcccagacgggataacatgattgccgacgaactctcacggctcgcgtcctcgcgagcccaaaccccaccgggcgcctttgaagaaaggcttacccagccgtcggcgcgacccgaccccttaggggagacggatgcgcctgaccggcccccgaggcccgtcggagtccaggcctcgggacccgaagggagcgctccaagctcccttagattgattgcttggatctctgagatccaagcatacctcacagataagactctacctgaggaccgtgaagggagtgaacgcgtccaacgcatttccaaacgctacgtgctggtagaagggaccctctatcggcgcgcggctaacggaatcctcctgaagtgcattcctcaggaacaaggcgttgagcttcttgccgatatccatgaaggcgagtgcggagcccattccgcctcgcgcaccttggttggcaaggcctttcgtcaagggttctattggccgacagctctcaatgatgcagttgatctggtccggcgatgcagagcgtgtcagtttcacgccaaacaaatccatcagccggcccaggccctgcagatcataccactttcgtggccatttgctgtctgggggctcgatatcctgggaccgtttaagcgggccccgggcgggtttgagtatctgtatgtcgcgatcgacaagttcactaagtggcccgaggcttatccggtcgtcaagatcgataagcactctgcacttaaatttattaagggcatcacggcccgttttggagtgcctaaccgtattattacggataatggcacccaattcactagtgaactcttcggcgactactgcgaagacatgggcatcaagctctgcttcgcctcacctgcccaccccagaagcaatggccaagtggagcgcgccaatgcagaaatcctcaaaggccttaaaactaagaccttcaatatcctcaagaagcatggcgattcgtggatcgaggagttgccagcggtgctctgggcaaaccgaaccacaccaagccgagcaaccggggaaacgcctttcttcctcgtctacggcgcagaagcggttctcccatctgagctcaccctgaggtctcctcgggccaccatgtactgcgaaactgatcaagatcagcttcgcagagatgacctcgactacttggaagagcgaaggaggcgcgcggccctccgagccgcgcgctaccagcagagcctgcggcgctaccatcagcgccacgtccgggcccgatcactctgcgtcgacgacctcgtcttacgccgcgtccaaacgcgtgctggattgagcaaactctcaccaatgtgggagggtccgtatcgagtgatcggtgtcccccggccgggctccatacggctggccacgggcgacggcactgagttgcctaacccttggaacatcgagcaccttcgtcgcttctacccctga

SEQ ID NO: 19147 - DNA, 253 bp, Oryza sativa
  unsure (1)..(253): unsure at all n locations
  Clone ID: PAT_MRT4530_24636C.1
agaatcgataaatctgcttgcagattttgaatgagaaannaaatctagggtgtgtttagttcacgtcaaaattaanagtttggtngaaattagaacgatgtgacagaaangttagaagtttgtgtgtgtagtaaaattttgatgtgatggaaaagttgaaagtttgaagaaaaattttagaactaaactcagccctagtgaagggctaacagaatacagaactgaattttgtttcaaaaaaaaaaaaaaaaaa

SEQ ID NO: 19148 - DNA, 213 bp, Oryza sativa
  Clone ID: PAT_MRT4530_24637C.1
cccctgaagatcgacgcagacccatttatatagaagaggatatttatatagatgtgtgtgtgagaatcaacccatatgacctaccaaaaagaaaagactgccaaaggaaggtgggcatgccaaacactcctctcctccttcacatgaaaaaaaccattatcatagaccatccatttgctgcgcctaaaacagctctcaaccaattccaagtcc

SEQ ID NO: 19149 - DNA, 258 bp, Oryza sativa
  Clone ID: PAT_MRT4530_24638C.1
atagcccataactataccaactaagatgatcaacaaaaacttgtcatgcccatatctggttacgacacgccatctttcctcattacatacacacacatgactgggaaagatggtctatatcatgcgtcacaccccactgattaaaaagagcaaaggcattttgacgacttatctacctaggatgcattcgttgatcttgacagcatgagatcacacactcttgcaacacaagcaggcaacctccttgctgcactactt

SEQ ID NO: 19150 - DNA, 1017 bp, Oryza sativa
  Clone ID: PAT_MRT4530_24639C.1
gtggttttcaagtcaatctcattgatgcagagatggaaggtgctgctaagagaaaaagatcacgaggctttgaacgcactgcttgagaagctgaagagtaagatggaggctctgcgtcctgtggatgttttgccggacaatggcgtcgcctccacgcgccaccctgctcgcgtccccgaccatcaccacgccaccccgtctccctcctcccaccactctccaccgccgcgccacgccgtctccgccgcacgccgtgcccgccgcgccgcgccacgccacgccgtctccgccgcgccacggtgcccgccgcgccacgccgacgccatggtgcggatgaaagcgaaactcgtctacaacatggacgagctgcggactatggtgcgggacgcggttgggcagcgccacgtcgacgtacgctccctcgaggcacttcgagacgcgcccgccgtattcgacatcctccatgacttgtcatcgaccgccggctacgggtggaaagtacggaacatccagcccatgagcgatctctccgagctcgttgggttactccaactgatgaagtgggtgaacattccccagttgctgattcacctctgcaacctcgatcaacgccgagagatgctactggcgttaggggggttccaggtcaggggatcactctccgtgcaggtactcgctcaagacctgatcgaccgagttcctgcctcaaatcctcgtgcgcattggtcgagggagatgtctgcgaccactctcaagtccaggctggaggaagcaactgccaccgcggtgaacacccttcttaacaattcgatccgcgccgagacacttgctcgccagggaggaggcaccgtgatggcacgagttcgtgagcttcggcgactcctgcgccaaatttccaacgcagttctcgccgcggaccatctgccacctacaataggatcagacttggagcaagcgatcgccctcatcagaaacatcctccagctcccggttcaagtccgtgacgcctctatgtag

SEQ ID NO: 19151 - DNA, 363 bp, Oryza sativa
  Clone ID: PAT_MRT4530_2463C.1
aaaaatgaaagacaactttttttttatttatatcacccaaaggttcacatgtcacatatgaagataaatgggccccgttttaacttacgaaccattatcctggtaaaacttattacaagacacccccaagggtggcaatgggactgggtgcaccataggacctagggtcgataccatatttagagggggcggtaaaagccaaaaaattttgagctggggccatattccgatcaaagtacagataaccaaactggtggagttgtagctcctttgctttggcccgaacaaaggtaatgccctgatagcgagaatgacccgccaccaaccccgacgggggggcccacccgggaattgccgaccggg

SEQ ID NO: 19152 - DNA, 338 bp, Oryza sativa
  unsure (1)..(338): unsure at all n locations
  Clone ID: PAT_MRT4530_24640C.1
cacccctacctaancttgtatgctgtagagacacccccttttttccttttttttaaaatattcaaaattaatctttttccttcntatctcatattctccaactctatgcgtctgagtaaacaatcagcataatctttacattcctaattaccatcccaaacaaaattctccctctgtcaacatctgattcctcccccccctaaatttctaaacaggtaggaaataaaaatcgtaaaaattaaaatcacaaaaacaatgctacattactacaatacgcatgcaactcccacttttcctttcaccaattcaacaaccatcacttttatccctccatccct

SEQ ID NO: 19153 - DNA, 1063 bp, Oryza sativa
  Clone ID: PAT_MRT4530_24641C.1
atgattgggagaagataacatgatgcaaattattactgaaggctaatgatcagcactattatggactgttcaagttttcaaccatctgcacatgcacgcagaattatctccagggtttttattgaagttatgtttgactatctacatataccatgttccatgtacatgccatctttcagatctgtagcagctgtctgcactttgtggtgttctaagggatcatgcttcagactttcagtacagagctttgtagattcctcagcttcggcttgagcttgtgttatttatatacaccttgtatgcaaactatgtaagattgacagaacattgtcagatatgcgcgcgtgtagctgtgtatccgtggaagggcattgatttagtgtcatgaatggatagatctcctgatgggactctgcaaaattcatcagttatcgtcttcgatgtggctggtctccaagacatagtccctcatgagctttgtgttggcctcatcaaccatcttgaaagataaccttttcagattatcccactcgaaatcatgcttgacataagcagatcggacctccaagatcctcattgctagctgcttgtgccttggagactcgcggatcaacttcttgcagaaagtatcagcgtcgttgagggagtttcggttcacgaaatccatcagctcaccatatgcttcccggttgtaactctcaagctgtgtgagcacaaccctgacagcaatgtagttgaagaagtgctgcaggtttcttgctgccttcttctccggcgatccctctccgaagccgggtacgtacatcttgctgcaccgcggcggcgtctcgaggctcgagaaacgccggcgccggcgccggcgcacctcagtcccccacaacggccgctcttggtcgaggaggaggacacgccggcgagctccgccgccggcggcgactccggcgggatggaggagggcgacggcggcgcagcgaggagacgccatggcgggcagtcgcgtaacgatgctccctccccgcgcagtagcggcgcccacgcgtccgcggccgcgtgggtgcccgcg

SEQ ID NO: 19154 - DNA, 115 bp, Oryza sativa
  Clone ID: PAT_MRT4530_24642C.1
ccttgcgttggaagcatattggcacccattctatgccaattgtactctcctgaggctcccatcgacaactggagatctcatgaattcagcatatggtgttcttataccttattaa

SEQ ID NO: 19155 - DNA, 480 bp, Oryza sativa
  Clone ID: PAT_MRT4530_24643C.1
atggcggtgctcggctacctcatgtacggcgacggcgtgctgtcccaggtgacgctcaacctcccgtcggcgaggctcagctccaaggtcgccatatacacgacgctgctcaacccggtcaccaagtacgcactggtggtgacgccgatcgctgccgccgtcgaggagaggatccgcggcgccgccggcaagggagcgcgcgccgtctccgtggcggtgaggacgctgctggtgctcagcacggtggccgtggcgcttgcgctgccgttcttcgcggacctcatggcgctggtgggatcgatgctcaacgtggccgtctgcatgctgctgccctgcgcctgctacgtcaggatcttcggggcgccgtcgatgagcagcgtggaggccgtggcgatcggcgggatactggtgctgggctcgctggtggctgtcacggggacttactattccctgatgaaaattatccgtgagttggtgtga

SEQ ID NO: 19156 - DNA, 416 bp, Oryza sativa
  Clone ID: PAT_MRT4530_24644C.1
tttttgtttttttaaatttttgggtttttattttttttttttttttttttttttttttttttttttttttttttttttttttgggatttgtaaaaggggatctttttaaaaatcaaaggaaatttgttaaaaattaacaaccccttttgttttagggctaaaagtgggtatttttttaaacaaaaaacgaaaaaaataatccctaaatccaatatatcaaaaaattgggattttttggacataaaaccgggtcacttttttttttttaaaatgaaaaaaaagggccacaaattacaggttttccttgctaaaaaaaatccctgagaattgaactcaattaaatcctctgaaacggaaaccaatgggcataaacccctatccaagggggggagtggataaaaaattggccagattgg

SEQ ID NO: 19157 - DNA, 253 bp, Oryza sativa
  Clone ID: PAT_MRT4530_24645C.1
ggcggacggagggagggacggcgccgctcgggagagggagcgggagcgcgtgcgtcgccggtggccgagccgagccgagctgcgtcgcggtggtgctctccgcgggcggcgagattcagccctgacccgaggaaggagtcagtcatcacgatacttgatggattgtaccgtgaccgcaactacgctagatttttcgtcttggagacgattgctagggtgccgtattttggtgaggatctcgtggtccatgctc

SEQ ID NO: 19158 - DNA, 231 bp, Oryza sativa
  Clone ID: PAT_MRT4530_24646C.1
gggaacaagaaaaaggtcggatcgatcgagtttttgggtgaaaatcggtgatcaaatacaaaggcacaatcgccaagggcagattttatcgatgaaaatctgccccaacccagggggggggggtttaaaattgaatcaagggggaacgtctttcaccatgagaccaaaagctcgggtccatggatgcccccttaccccggggagaccatatccctcgagattatccatttt

SEQ ID NO: 19159 - DNA, 1555 bp, Oryza sativa
  Clone ID: PAT_MRT4530_24647C.1
atggcaacccttcgagtcgacgaaattcataaaattctccgcgaacgtattgaacaatataatagaaaagtagggattgagaatatcggtcgcgtagttcaagtgggggatgggattgctcgtattataggtcttggtgaaataatgtcaggcgaattagtcgaatttgcagaagggactaggggtattgctctgaatttggaatccaaaaatgttgggattgtattaatgggcgatgggttgatgatacaagagggcagttttgtaaaagcaacaggaagaattgctcagatacccgtgagcgaggcttacttgggtcgtgttataaatgctctggctaaacctattgatgggagaggcgaaattgtagcttcggaatctcgcttaattgaatctcctgctccgggtataatttccaggcgttctgtatatgaaccccttcaaacggggcttattgctatcgattcgatgattcctattgggcgcggtcagcgagagttaattattggggacagacaaaccggcaaaacagcagtagctacagatacaattctcaatcaaaaagggcaagatgtaatatgtgtttatgtagctatcggtcaaagagcatcctccgtagctcaagtagtaactactttccatgaagagggggccatggaatacactattgtagtagctgaaatggcggattcccctgctacattacaatacctcgctccttatacgggagcagccctggctgagtattttatgtaccgcgaacggcatactttaataatttatgatgatctctccaaacaggcacaagcttatcgccaaatgtcccttctattaagaagaccccccggccgcgaagctttcccaggggatgttttttatttgcattcacgccttttagaaagagccgctaaattaaattctcttttaggggaaggaagtatgactgctttaccaatagttgagactcaatctggagacgtttccgcctatattcctactaatgtaatctccattacagatggacaaatattcttatccgcagatctattcaatgccggaattcggcctgctattaatgtgggtatttccgtttccagagtaggatccgcggctcaaattaaagccatgaaacaagtagctggcaaatcaaaattggaattagctcaattcgcggagttacaagcctttgcacaattcgcctctgctctcgataaaacaagtcagaatcaattggcaaggggccgacgattacgagaattgcttaaacaatcccaagcaaatcctcttccagtggaagagcagatagctactatttatatcggaacaagaggatatcttgattccttagaaattggacaggtaaagaaatttctggatgagttacgtaaacacctaaaagatactaaacctcaattccaagaaattatatcttctagcaagacattcaccgaggaagcggaaatccttttgaaggaagctattcaggaacaactcgaacggttttcccttcaggaacaaacgaaatatctaatccaaatgctgatcttgtttctga

SEQ ID NO: 19160 - DNA, 369 bp, Oryza sativa
  Clone ID: PAT_MRT4530_24648C.1
atggcgctgtttgggtttatcaagcaattgattggatacaacatcattgctttttgccacccctccacagtcttcatatttggtaaaagtctcaggggctactgtggagattatgggtaccccatacccacacggcatgctcggtggagccacgggagctccctcaaccacgataggctggccagcgtgaagggtgacgagaatggctcgtcggctgacaacaggtggcttcggcaggatacactggagctgctcacgatccgacccgagatggacacggtgttgcaggaagcgaccctcaacggggccatttgggaggaaatctccaggatctgtgatgtattttttgttggagattttgtgatgtga

SEQ ID NO: 19161 - DNA, 622 bp, Oryza sativa
  unsure (1)..(622): unsure at all n locations
  Clone ID: PAT_MRT4530_24649C.1
tatgtatgcctatcttttcaggtaatatttattgttctctctaatatatatattttttttcccgcgcagcgtagcgcgcgaacccattctagtgtaatttatgttcatagagtagtgcaggtacagcgagacgaccaccggagagtactggccgggccatggaatttcaggttaaggcaggcatgcagaggcaagttttgacctgtaatttcatttcacggccaaatattactactatactataccagctgcccacgggttggtgcgggcgggcgaggattcagccatccatcgaggctgtttccccaacttcttggcagtggcttccccttgcgcccggcggccggagagacanagttgagacttgagagggagagaggaggaaggagaagatgaccatgacacactgggtcctacttattttttttttctaattgtaagcatcaaatagccgctccgtaggttgacgaaggtgtcaaacatgtcatgtggacgttaaatcagccaaacccccgttaaaatcaccgagggatttaatttgcncctagttttagaagtcnacctcattgttatttgagggatataaaatgagcttgtccttgttactaaaaaaaaaaaaaaa

SEQ ID NO: 19162 - DNA, 919 bp, Oryza sativa
  Clone ID: PAT_MRT4530_2464C.1
agaagtatcagcagtgaccatgttagtatccatgtggcagaaaagaagaaaagtagaagtacatctcatgatggaaagaccaaggaaaagggcaatggggaaatctcgtttgcgtgctctttcctgatcctcccagatactgcatgcaacaacggactttcccacaacacatgccgtatctcatgacatctcgtacgtactccttttgatgtggggcagctagaactaggactaggcacagcgacaagaggccaggtacagtcgcggcaagctgcatctcatgccatatgtgcggcacatcaatgcacgggtcgatctagaggccgaagctgcaaagcctgagctccagcggcggatcccggccggcagcgacgtcgaagaacgagatctccctgcactgctcgccaccgccgcccctcacataccggaccttgtccacctcgaggtcatacgacttgagtgggaacagctccagcgtttccacctccctcgtcggccgctcccacatcgcttccgtctccaccacatccctcacgtagcatgtcatgagccggtgatgatggccgtagcttctggcctcccgcttgctctcaggaggctgcaggacgaggtcggcgtcgccctcgtgggctgcggcgcggccatcgtcatcgttgctgccgctgtcgggggaggaggcgccgcggcggcgcttcttgtggtggtggcgctcgcgggccttgtggttctggaaccagtagaagacgttcttgctctccaccttgccgaatgcgctgaggtgagtggagatgcgctggatctgctccgtgctcggcgtccgcaaccccgctcggaacagctccgtcaggaccttcacctgctccgccgtcgggttccaccgcccacacttcacccccactcgcccgctaagagcctccat

SEQ ID NO: 19163 - DNA, 475 bp, Oryza sativa
  unsure (1)..(475): unsure at all n locations
  Clone ID: PAT_MRT4530_24650C.1
atgtctctatcttcgtgcgggggagaaaccttntataccccaccgctcnaataccggtagtatgaccgagtgaggcccagtgtttgtaaattttaggataagcactatggaactctgttaagatagtggaatacctcgtgttctctgtctttctgcctcgtnaagcgccgnatatggctcttggtgtctttgtgtggctggtgtaccactacgcnctctgtgtgaggactcgagctggactccagctctngagcgttggggcctcttatgctcgcaccccacactggtgttttaaggcttgcttttgntgttccccctgtctgggtgttgtaggcactccccacggagttggtggttctggagtntgtggtggctgtttctnaggaggagagtgtttgcccctcggccctgggcccaatgcgggccngnngattttaaaaaaaattggggtntttaaaaaaaaaaaaaaaaaaaa

SEQ ID NO: 19164 - DNA, 1165 bp, Oryza sativa
  Clone ID: PAT_MRT4530_24651C.1
tgtcaaataaccgtggaggatatgatgtttgcacaactatcggaagagtatctaaatctcatatatctctaattgatgatattaatcctcagaagggtgttgttgtcaagatgttctcatcaaagtgctctatctctgtttacatctattgtgattcaactgtagcccatgtatcggatcaatttgtactatcaggaagttgtgactatgctacaacacttagacatccttctggttgtgcacaatccatgtctgcttctggaaatggatggggctggttagccacttcatttgtaacaattctgtgccttctcggagggtacattttgattggttcaatctatagatattatttccttggcattcattctgtagaggccataccaaacctggaattttggatcagcttgccacaaactataaagagcatgttattacctgcagcacgaggtcgtaacagacagagtagagatacatatgctcctgtagaccattgagaaataggcatccaatggaactgtactgctcaccgtacagttgacaaacatatatggactgggaaggagaaatttttatatgccattatgtcaggaagatgacattgcaatcttcatcaacaatcattttgttcagaggaatttatacagatatgtagcagtacgttttttacagttgtgggcaactgcttgtgctgtacgcgtgggcaagagaaaagataagattgggacctccaatggcttgttataaatttgttctattataacgtgtggaagccacacacttttgccttggccacaactttttggcagatacattgtgaagtctagaaatcagtgcatagaggacggatgaatcactcttgtgaggacatagtgaagtagcatgatgtgactgtattctcagtagtggaccagattatcagagaaggatggtaattttcttccttccttgtcattcctttagcttggaaagtgatgcaattatttttcgtgaactagcacgatgtggctgctttctcaggtgtggtcctcccccttttattgtctatctttcaagcttggagcttgccttttcgtttagataaagatgcttgcttctactattgtgatatttgtgcattggttgttttcagaatatatgaacactcaaaaaaaaaaaaaaaaaa

SEQ ID NO: 19165 - DNA, 608 bp, Oryza sativa
  Clone ID: PAT_MRT4530_24652C.1
atgcatgcctcgctgcgccgcagaggtcacctctggatcgagcaccctcctcctctggagcaaaccacgttcggtcatccggcgcggccgctcgatcgcccgctcctgccgtgcaacggtgcagggctgcagcctgcaggccacgcgctagctggcttacaccggccagcgcgagcgcgctgcaggctgcaggacgccgtgcgcgaccgcgagcgcgagcgggcgcgcgcgtccggggttaggaggacaccggggttctcgctctcggcaccgcaccgatggatggaggagtacgcgcgcgtcgtcgtggcctcctgggctcctggctggttaccgcggcggccgcgccgcggtgagcggggagggagtacgtacgtacgtacgtgcagcggtgcagcaggggggtgcgtgtgtgcatgcgcgcccacgcgcactctgtgtcatgtggcctgcaggacgccaggtcgtaccagactgcaccaatcacgcacggaattaaagctagccacggacacggtaaatggagaataaaactgatcaaggaccacaccgaggtagctagcgtgccaaatttgttaatgcgtgagcgcagcgctggctctggcaag

SEQ ID NO: 19166 - DNA, 317 bp, Oryza sativa
  Clone ID: PAT_MRT4530_24653C.1
ttttgggttttttggcgaacaagggtttcaaactcttttattcctcctggttttatcttagatttcattccgggggaataaaccccgcgggataaacaccataacccaagcggactcaattcatggtaacatgacgtacgaagaacacctaaaactggttggatggatagagggctgatagactagagagcgccactgggcacggatagcgacttaccggggtgataaaacgattttgagacggcttgttaagggcaactgggcacacaggaccctacctatctgttacttcatttcccgtcagattcgtcggcgta

SEQ ID NO: 19167 - DNA, 312 bp, Oryza sativa
  Clone ID: PAT_MRT4530_24654C.1
atggtgttcatgtgtttttctgaaaagtgtgagcagactaagaatgaccccagcagtttagtgagcaacttgcccccaaacgtacacagggcacaagcagaagccttcagaagacgatggatacaaaggaccagctgtggtgcgaacatgctaggatggcccgatcttcacgatagtaggttgacgattgacagacaacaatcaggagaagctgtggtcgaaatacatccacagcacggcacaggacagcccagagggtgcaaatattacctgtatctgtctgcattgcagcttgcaataatgtttaagtga

SEQ ID NO: 19168 - DNA, 189 bp, Oryza sativa
  Clone ID: PAT_MRT4530_24655C.1
atggagcagccggtggacggcgatatccaccagatgatggacagcatcaccgcctgcgtcgactctgtttggctcgtatacctgcctcgtctcctcgccagcaaggtgctgccgagctgcacactgcactgcattgcggctgatggccacagccgaggaaatggctactggagtattactccatgctag

SEQ ID NO: 19169 - DNA, 1296 bp, Oryza sativa
  Clone ID: PAT_MRT4530_24656C.1
atgtacgaagattcaaaagaatttgccagaagatgcacaagctaccagaggcaaggaggaatcactgctcgcgatgcaatgccccttacatacaatttgcaagtcgagatattcgatgtttggggtatagacttcataggacctttccctaagtctcgcaactgcgagtacattctagtggcagtcgactatgtctccaagtgggatgaggctatgccgtgcagcgcatgcggatgcgaggcatgccaagaagatgttcacagaaatcatcttcccaagatttggtacccccaggatgcatacaagacacccattggaatgtccccatatcagatagtctacgggaagtcatgtcgactactcgtagaacttgagcacagagcatactgggccatcaggaattggaacatggattttgagggagcaggagaatggagaaaaatgcagattgctgaacttgaggaatggagagaaagggcttaccacaacgtgaggatatgtaaagaaaggaagaagcgttggcatgacaaaaggataaaaatcaagaaattcaagccaggagacaaagtactgatgttcaactccagggttaagcttttcggccacagaaaattatgcagtaaatgggaaggaccgttcgacgtcatcgacacctcttcgcacggggcaatcacactccgtgacaaattagttaacatatttaagggggattcgcctgcaagatggcagactacgggagagctcggcttgttaaaggcacaacgccttttccaagatgacgggaatgccgcggcgcctctcgccgagcgttatgtgggcaccctgttcaccaaggcaggggatgaggtgctccacaagtacaccacacccaccgctactccatctactcagaaggaggagcgattccgtattcagggagtgcgaactcccggcggtgggtatggtaagggtttactccggcctttgacggcatcggagaaggagggggcagcggtatcctgtagccctccacctaggaaggtgaagcatcacttgacgccccctccaattgtgagggctcccggccaattccaagaagacgaggtgaaatcgccggagccctcgatccataagctcgctgcgcaagtaaagaaactccgcaaggagaacatagagcttagggatcgcaatgcggagctaggggtagagcttgctgaaattagaaataattttgatacccttagtcgcggtttgtgcgctaagatcaagcgtgcattcatagagatgggaaaggaaaataagtattatgctaattag

SEQ ID NO: 19170 - DNA, 1257 bp, Oryza sativa
  Clone ID: PAT_MRT4530_24657C.1
atggagcaacctctttttgagctgtctgctcctcggggcgaattctatgagccacctccttcatcggagcccatttatacaactggctatgaaattcgtcccgaactaattacttggtccagattcactaatttagtccagtccggaccaaccctgtccttacccgagtatgtgcttctcccacatttccatacgagtttggataaggagtctgcattctatttggacataaccgctggaggatcattcatacacaaaatgccgtcacaaggaaaaacgattttggatcgcattctagaaaacacttccttcatgacgcagtccaatgaaccccagtcggaggcatccgtgtccaagatagaggaacctctaacgatcgagccacttgctgaaccatccacttttgctagctcggttgatgagaaggttcctgagcagccgtccgtcgagaatgaagaaattcagactctggatagtgccgcaattctgtttagggacggttttgacgaagaatacggcaataccataaactattttagtaagaggaaaccacccgttcccttgtcacctcccgatcctatggaactcgggttcctacgagaaactgtccgggagttgacatccataatgagcgatgaatggctaagggaggcagagctttcatccgaaggaacgacctcgtctctgagtccaactgtcggggccaacctcgtctctgagtcttttgcattcgcttatttaatcgacaaggcagtgaccccgacaaacaaattcttcaagcatccaaacggaaatatcatcgaaggatttgggattgtgcaagatgtgcctgtctgctttgaaaacagggaggcgatcttagatttccacgtctttgaaatccaagactttgatatcctaatcgggctgcccattgagcaacttatcatcaacacaccccgatttggtagcctcaaaataatactaggagagaatgaattctcaattccattctcgcgggcaaggatcaccttgaccgaccctctcccagaaattgagtcagtggaagaggttaccgcagttcctcctcatgagtctcccgaggcccttctggaagatgaggtccccccgatttcatcaaagaggaagcggatcccggcgagactctcgacctgccaatcatggaaccaccatctcgacctccgcttgagcttaaacctctacctccaggcctacgatatgccttcctacacaatgacagagaggctcctgtcataa

SEQ ID NO: 19171 - DNA, 225 bp, Oryza sativa
  Clone ID: PAT_MRT4530_24658C.1
atgacaaatgagatatcaagtacagaggacaaagagaaaaattgtatcagtagtaagaagaaaaattcatcaaactatcaaaatatagtggaagataagcaacttcaaagcacaggattcaaagatgggaataatgaagatagcaattcaagagtgacaaaacatgtaccaagttcaggtatatcacaaagcttttatcagaagaagaaattaacatggacatga

SEQ ID NO: 19172 - DNA, 390 bp, Oryza sativa
  Clone ID: PAT_MRT4530_24659C.1
atggaggtcgtcgacgcggaggagctcgcggccctcgacggcaacgcctacagtgcggagtttgccggcgcggggagcagcaggcggcgactgccgtcctccccgcctcgcacagccctccgcctgctccgctcttccctcctcgccgaaccgatggcgccggctgtcgtcccctacctcacggacggcagggcaccgggaaggactgatcgtgccgatccgacctctccgacgggaagggaggggccatatggctgggctgcagtcgattcgtgggaacgacggcgaggccggagaaccaaagcaggaaagtgtgtgcatcatttctacattactgctactgaagatttagataaccattacaatcttgaggttgaagatgatagttga

SEQ ID NO: 19173 - DNA, 396 bp, Oryza sativa
  Clone ID: PAT_MRT4530_2465C.1
atgggcatggcaccgtttgccgctgtgctacgaggccattcacagagctcgacggcactgggccacccgctcccccgctcccgcgccaccgacgcgttcgggagaggagaggaggggtggacgacgtggagaggagggcgccaccgtggagctcgtcgcagcccccgcttgcgcgacagcctccgcttgctgccggctgcgccactggagcttgccagccacacgccccccgatccgcgacgacctccgctcgctgccggccatgccagccctcgattcgcggtggccggaagaggaggacgggagggcggctccggccacgccgcgccctcgatctacttgtcggagagggagggggagatgaggttgaggtcggcgagaggggagaggcggtga

SEQ ID NO: 19174 - DNA, 1599 bp, Oryza sativa
  Clone ID: PAT_MRT4530_24660C.1
atgccggggaacggtttgattcctgagcagccatccgtcgagaatgaagaaattcagactctagattgtgccgcaataatgttcagggaaggttttgacaaagactacgggaacgatgtcggtattatctacagtccaactgtcgaggccaatctagtctctgagtcttttgcattcgcttatttgagtgataaggcagtgaccccgacaaacaaattcttcaagcatccgaacactgggctaatcgggctgcccattgagcaacttctcatcaacataccccgattaggtagcctcaaaataacactgggagagaatgaattctctattccattctcgcgggcaaggatcaccttgaccgatcctctccaagaaattgagtcagcggaagaggttaccgcagttcctcctcatgagtctcccgaggcccttctagaagatgaggtccccgacttcatcaaggaagaagcagatcccggcctacgatatgacttcctacacaatgacagagaagcccctgtcataatcagtgacaagctttctgaagacgagactcaacatcttctcaccgtgctgcaaatcactaacaagcaggaacagccgatcaatgatttcttaagagatgacatgctgatgactgttcgcgactccaacccgtgctatgccaacatagtgaactatatggtatccaagtacataccaccagggaaaaatcaacaaaaattgaacgccgcggatgcgaggcatgctaggaagatgttcacagaaatcattttccctagatttggtacccccagaatggtcataagtgacagaggttctcatttcattgacaaaaccttccgagacctcctacgagaaatgggagccaaacacaatgtggccactccttaccatccacagaccagtggtcaagcagaaacatcaaacaaacaaatcaagaatattctgcaaaagacggtcaacaaaatgggaacaggatggaaggatagattgccggacgcactgtgggcataccggacagcgtacaagacacccattaggatgtccccatatcagatagtctacgggaagccatgtcgactacccgtagaacttgagcacagagcatactgggttaagcttttcggccacggaaaactgcgcagcaaatgggaaggactgttcgacgtcatcgacacctcttcgcacggggcaatcacactccgcgacgaatcaggtaacatatttaaggccgcaccgcctcccgccgagcgctatgtgggcaccctcttcaccaagggagtgcgaactcccggtggtgggtatggtaagggtctactccggcctttaatggcatcggagaaggagggggcagcggaatcccgtagccctccacctatgaaggtgaagcgtcatttgatgccccgtccaattgtgagggctcccggccaattccaagaagacaagtacgttgaggtgggtgtagaggtggtgacagccctcaagatcactgaagtcctccctgtccggcgggcaggcagccagcggccgggcggggctgcgccctgcgggtataggaccgcaggtggcaggtgccggccgtgcgagcagcggtag

SEQ ID NO: 19175 - DNA, 638 bp, Oryza sativa
  unsure (1)..(638): unsure at all n locations
  Clone ID: PAT_MRT4530_24661C.1
gccaacctctatgtacggttgaaagagctggccgcgagggttcgcatcggtggtgcggctgtgggcgaaagcgacttagccgttcgcctcgtgtctgccgaactcactgtctctgacatgcattgtgcgctgtattcttccatcggggaggccgagtccctccgctttgtgggcgagatggtgcccgacatgctttgttactcggttctccgtatggatcgcgccggtcggcaagcgtgcctctggaaaggccagacgaggacgctctcttgcaatctggaaggcctcgctcctctcctcaacaggatggcctgngtcctcgaacgactccccgaggagctcgagatgaccatcaagtcatcctcgatggaccttgctcggggggctggncgaactcgtgctagcgagttaccaggcccgttaccccgatttctctccctggatgtgcgctggaggagttccctcccgggaccgaggtcgacgctcgctcgcgggtcggngatgctgccgaccacatcgttaatggcttcgaggggtctgccctctcgctcgcgttcgtctccagctccgacgaggagggcgacgtcatcggtgtggatgacggtggcgacgaggccggctacccttgctgcatcgna

SEQ ID NO: 19176 - DNA, 3519 bp, Oryza sativa
  Clone ID: PAT_MRT4530_24662C.1
atggagcaacctctgtttgagctgtctgctcctcggggcgaattctatgagccacctccttcatcggagcccatttatacaactggctatgaaattcgtcctaagctaattagtatggtcagggaaaatcctttttctagctttgatttagaaaatccctaccatcatctgcgagactttgaacaagtttgctcatgccttaagattcgtggcatgagacaagaaattgtgctgtggaaattgttcccgttctctcttcaagagagagcaaagcaatggtacacctctaccgttggatgtgtaaacggtagctgggaaaagctgcgagacagattctgtcttgccttcttcccagttacccgtattactactcttcgagtagaaattctcagtttcaagcagatcgaaaacgaatcaatcggtgcagcttggtccagattcactaatttagtgcagtccggaccaaccctgtctttacccgagtatgtgcttctccaacatttccatacgggtttggataaggaatctgcattctatatggacataaccgctggaggatcattcatgcacaagacaccgtcagaaggaaaaacgattttggatcgcatcctagaaaacacttccttcatgacgcagtccaatgaaccccagccggaggcatccatgtccaagatagaggaacctctaaccatcgagccacttgctgaaccatctacttctgctagctcgattgatgagaaggttcctgagcagccgtccgtcgagaatgaagaaattcagacttttgattgtgccgcaattatgtttagggaaggttttgacgaagactacggcaataccctaaactactttagtaagaggaaaccacccgttcctttgtcacctcccgatcctatggaacttgggttcctacgagaaactgtccgggagctgacatccataatgagcgacgaatggctaagggaggcagagcgttcatccgaagatcaccttgaccgaccctctcccaaggcccttctagaagatgaggtccccgacttcatcaaggaagaagcagatcccggtgagactctcgacctgccaatcgtggaaccgctacctcgacctctgcttgagcttaaacctctacctccaggcctacgatatgccttcctacacaaagacagagaggctccggtcataattagtgacaagctctctgaagatgagactcaacgtcttcttactgtgttggaaaagcatcgttctgttcttagctactcgcttcaggaccttagggggattaatcccgcactttgcacccatcgtattcctattgaccctgagagtactccctctagggaacctcaacgacgactcaataatgcaatgcgagaggttgtaaagaaagaggtcttgaaactgctgcatgccaggattatctatcccgtaccatacaggatagttcttgggcatcgagtgtccgaacaaggaatcgaagttgatcatgctaaaattgatgtgatagatcagcttcctcctcccgtgaacatcaaaggtatccgcagcttcttgggtcatgtcggcttttatagaaggttcatcaaggacttctctacaatcgccagacccctgaccaatctgctagccaaggatgtgccctttgagttagatgacgcgtgcctaaaatctttaaaaattatgtgtgatgcaagtgacttcgctgttggtgcggtcttgggccaaaccaaagataaaaagcatcatgcaatctgttacgctagcaaaactctaaccggagcccagttgaattatgcaactactgaaaaagagctgctcgcggttgttttttctatcgacaagtttagatcttacttagtaggagccgaggtgataatttatactgatcatgctgctttgaaatacctgctcactaagaaagatgctaaacctcgtctcttaagatggattttgctactccaagaatttgacttagaaattaaagatagaaagggagtagaaaattctgtagcagatcatttgtccaggctgcagatcactaacatgcaggaacagccgatcaatgatttcttaagagatgacatgctgatgacggttagcgactctaacccatggtatgtcaacatagtgaactacatggtatccatgtacataccaccaggggaaaatcaacgaaaattgaagtatgaaagtcgccgtcacatatgggatgagccatacctgtatcgggaagactcaagagaattcattagaagatgcaccagctgccagaggcaaggaggaatcactactcgcgatgcaatgcccctcacatacaatttgcaagtcgagatattcgatgtttggggtatagacttcatgggacctttccctaagtctcgcagctgcgagtacattctggtggcagtcgactatgtctccaagtgggttgaggctatgccgtgcagtgccgcggatgcgaggcatgccaagaagatgttcaccgaaatcatcttcccaagatttggtacccccagaatggtcataagtgacggagaacttgagcacagagcatacttggccatcaggaactggaacatggattttgagggagcaggagaatggagaaaaatgcagatcgctgaacttgaggaatggagagaaaagacttaccacaacacaaagatatacaaagaaaagacaaagcgctggcatgaaaaaaggataaaaattaagaaattcaagccaggagacaaagtactgatgttcaactccagggttaagcttttcgaccatggaaaactgcgcagcaaatgggaaggaccgtttgatgtcatcgacatctcttcgcacggggcaatcacactccgcgacgactcaggtaacatatttaaggaaaaatttggtggcctgccggacccaccagggtttggccgacctgatggtttggccgaaccggggcggcccccgatcggccccaattttgaatggcagtctcccccgctcatcctgagtctgtttagatgcgagttaggagccccttgcaacagtgccaggctccgtagcaaatttggagcccgtcggcgagctccctggttcggccgaaccaggggttcagccccccgttcggcagcgcgatccctctcccctcgacatgtcgcaagaatgaaaatccggggggattcgcctgcacgatggccgactatgggagagctcggcttgttaaaggcacgatgccttttccaagatgataagaaggccactacgcctcccgccgagcattatgtgggcaccctcttcaccaaagcaagggatgaggtgctccacaagtaccccacacccaccgctactccatctactccaaagggggagcgtttctgtattcagggagtgcgaactctcggcggtgggtatggtaagggtctactccggcctttgacggcatcagagaaggagggggcagcggagtcctgtagccctccacctgtgatggtgaagcgtcatttgatgccccctccaatggtgagggctcccggctaa

SEQ ID NO: 19177 - DNA, 2478 bp, Oryza sativa
  Clone ID: PAT_MRT4530_24663C.1
atgacgcaatcaattgaaccccagccggaggcatccgtgtccaagatagaggaaccactaatgatcgagccacgtgctaaaccatccacctctgttagctcgattgatgagaaggttcctgagcagccgaccgtcgagaatgaagaaattcagactccggatcatgccgcaatcctgttcagggacggctttgacaaagactacggcaataccctgaactattctagcaagaggaaaccactcgttcctttgcaacctcccgatcctatggaactcgggatcctacgagaaactgtccgggagttaacatccataatgagcgatgaatggctaagggaggtagaactttcatccgaggtaatttggataaataccactccccgagtcattccttgccatctggaagggaacgatgtcggtattctctacagtccaactgtcggggccaacctcgtctccaagtcttttgcattcgcttatttaagcgataagctagtaaccccgacaaacaaattcttcaagcatccaaacggaaatatcatcgaaggatttgggattgtgcaagatgtgcctgtctgctttgaagacagggaggcgatcttggatttccacgtcttagaaatccaagactttgacatcctaatcgggctggccattgagcaacttctcatcaacacatcccgattgggtagcctcaaaataacactgggagagaatgaattttcaattccattctcgcgggcaaggatcaccttgactgaccctctcccagaaattgagtcagcggaagaggttaccgcagttccccctgatgagtctcccgaggccctcctggaagatgatgtccccgatttcatgaacgaagaagcagaccccggtgagactctccacctgccaatcatggaaccgccacctcgacctccgcttgagcttaaacctctacctctaggcctacgatatgcttttctacacaatgacagagaggcccttgtcataatcagtgacaagctctctgaagacgagactcaacatcctcttaccgtattggaaaagcattgttctgttcttggctactcgcttcaagatctcaggggaattaatcccgcgctttgcacccatcgtattcctattgaccccgagaacttcatgggacctttccctaagtctcgcaactgcgagtacattctggtggcagtcgactatgtctccaagtggattgaggctatgccgtgcagcgccgcggatgcgaggcatgccaagaagatgttcacagaaaccatcttcctaagatttggtacccccaggatggtcataagtgacggaggttctcacttcattgacaaaaccttccgagacctcctacgagagatgggagccaaacacaatgtggccactccttaccatccacagaccagtggtcaagcagaaacattgaacaaacaaatcaagaatattatgcaaaagacggtcaaaaaaatgggaacaggatggaaggatagattgtcggacgcactatgggcataccggacagtgtacaagacacccattggaatgtccccatatcagatagtctacgggaagtcatatcgactacccgtagaacttgagcacagagcatactgggccatcagaaactggaacatggattttgaaggagcaggagaatggagaaaaatgcaaatcgctgaacttgaagaatggagggagaaggcttaccacaatgcgaagatatacaaagaaaggacgaagcgctggcatgacaaaagaatcaaaatcaagaaattcaagccaggagacaaagtactgatgttcaactccagggttaagctcttcggccacggaaaaccgcgcagcaaatgggaaggaccgttcgacgtcatcgatacctcttcgcacggggcaatcacactccgcgacgactcaagtaacatatttaaggcacgtcacctttttcaagatgacgggagggccgcgccgcctcccaccgagcgttatgtgggcaccctgttcaccaaggcaggggatgaggtgctccacaagtacaccacacccaccgctactccatccactccgaaggaggagcgatttcgcattcagggagtgcgaactcccggcggtgggtatggcaaaggattgctccggcctttgacggcatcggagaaggagggggcagcggaattccgtagccctctacctctgaaggtgaagagtcacttgatgccctctccaattgtgagggctcccggccaattccaggaagatgaggtgaaatcgccggagccctcgatccataatcttgccgctcaagtgaagaaactccgcaaggagaacatagagcttagggatcacaattcggagctaggggtagagcttgctgaaattagaaataatttcgatacccttagtcgcggtttgtgtgctaagatcaaacgtgcattcatagagatagggaaggaaaataagtattatgctaattag

SEQ ID NO: 19178 - DNA, 1108 bp, Oryza sativa
  Clone ID: PAT_MRT4530_24664C.1
ttaatcgccgacttggagtcgccggcgaaagccgattagggatttccccaaaaacactagctggctgagcgcgtccctccacgtcatgccgcacacggataccccgacgagaagccgcgccctcctgaacgcacgccggccaccccgcctccatggctgcacccgcgccgtcactggccgccgtgccactgcaacgagagcacgcagcaagcccatgctggatgcgtgtgcgacactgtttggccgccatggcagcaccaccaaggaaggagagagagaagaaatgaaacaagaaaagtgcaagaaaggggaaaatggcgcgtcacgccgtcggccacaccagcgagcaccccgcagcctgactgtgccaacggccgcgccatcgagccgcatccgcaccaggtcgcgccaaagcacacgcacagcgctaggccgcgccgcctacatcggccgcatccacgacgcatgcgccattaggaagaagaagagaaagaagaaatcgaaaaaaaaattaaaaaaacggaaaggagagaaggcgacgctggccacgccgagactaccgcgacccgcgctaccgccgcacggcaacgcggacgccacgggccatgctcacaccaagcccccgcgcctgccgcgagcggcgagccgcatccgcaccggagtggactgccgcacgcgcgccatgcatcctgaccgtccgccggtcgccggccacaccaagccgcgtctcgtgcggtcgtgccgcccctcttggccgcagcacctcgcctccggccgcttcgccgcctcgctgctccggccgccccgggccgccggacggccgtccccaccggccagcgccctcgccgcacagccgcgccctgcacggccgcgccgctgccgaagccgcgcaccgccctgcctcgccgcgcgccacaccgcctgccgcgcgttgcgccaggccgccgtgcgctgcgccgcgccgcttggccgccagcgccacctgaccaccccgccgccgcgccacctcggcatcccggccaccgcacatggcaggtgcggagtcaacgggagtggagaaaagaagttaaggagaagacaaggaaagaaaaaaatggaaagaaaatag

SEQ ID NO: 19179 - DNA, 2614 bp, Oryza sativa
  Clone ID: PAT_MRT4530_24665C.1
tctatcctagcctatcaattgcttggtgtccttggatgaaccggaggaagatctgaccacacacattcccttggattcgatacccttggaatactccgtaggggaagtgctacatcggtatatccgtgcgcttgcggattttatccgtaactgtatcaaataccaacaagcatttctggcgtcgttgccgaggaacggttgttgatcatttccgaacctaactcgtggcatgagacaagaaactgtgcggtggaaattgttctcattttctcttcaagagagagcaaagcaatggtacacctctaccgttggatgtgtaaacggtagctgggaaaagctgcgagacagattctatcttgccttcttcccagttacccgtattactgcccttcgagtagaaataaggagtctgcattgatcaaaaacgaatcaatcggtgcagcttggtccagattcactaatttagtccagtccggaccaaccctgtccttacccgagtatgtgcttctcccacatttccatacgagtttggataaggagtctgcattctatttggacataaccgctggaggatcattcatacacaaaatgccgtcacaaggaaaaacgattttggatcgcattctagaaaacacttccttcatgacgcagtccaatgaaccccagtcggaggcatccgtgtccaagatagaggaacctctaacgatcgagccacttgctgaaccatccacttttgctagctcggttgatgagaaggttcctgagcagccgtccgtcgagaatgaagaaattcagactctggatagtgccgcaattctgtttagggacggttttgacgaagaatacggcaataccataaactattttagtccaactgtcggggccaacctcgtctctgagtcttttgcattcgcttatttaatcgacaaggcagtgaccccgacaaacaaattcttcaagcatccaaacggaaatatcatcgaaggatttgggattgtgcaagatgtgcctgtctgctttgaaaacagggaggcgatcttagatttccacgtctttgaaatccaagactttgatatcctaatcgggctgcccattgagcaacttatcatcaacacaccccgatttggtagcctcaaaataatactaggagagaatgaattctcaattccattctcgcgggcaaggatcaccttgaccgaccctctcccagaaattgagtcagtggaagaggttaccgcagttcctcctcatgagtctcccgaggcccttctggaagatgaggtccccccgatttcatcaaagaggaagcggatcccggcgagactctcgacctgccaatcatggaaccaccatctcgacctccgcttgagcttaaacctctacctccaggcctacgatatgccttcctacacaatgacagagaggctcctgtcataatcagtgacaagctctctgaagacgagactcaacgtcttctcaccgtgttagaaaagcatcgttctgttcttggctactcatttcaggaccttagggggatcaatcacgcgctttgcactcatcgtattcctattgaccccgagagtactccctctagggaacctcaacgacggctcaataatgcaatgcgagaagttgtaaagaaagagatatcatcaaattcccatccatccggaggaccagagtctttcataggtcatagactgccctcacagaccaacacatgtctcctggagttctttggagattgacttccggacatgatcgaagatatcatggatgacttctcagtttatggaaagaatttcgaacttcctcctcccgtgaacatcaaaggaatccgtagcttcttgggacatgccggcttttatagaaggttcattaagaacttttctgcaattgccagacctctgaccaattgttagccaaggatgcgccctttgagtttgatgatgcgtgcctaaaatcttttgaaattctcaaaaaggcactcgtctctgctccaatcattcaacttcctgattggactctgcccttcgagatcatgtgtgatgcaagtgactttgctgttggtgcggtcttaggccaaaccaaagataaaaagcatcatgcaagctgttatgctagcaaaactctaaccggagcccagttgaattacgcaactactgaaaaagggctgctcgtggttgtttttgctatcgacaagtttaggaggagccaaggtgataatttatgctgatcatgctactttgaagtacctgctcactaagaaagatgctaaacctcgtctcttaagatggattttgctgctccaagaatttgacttagaaattaaagatgaaaagggagtagaaaattccaacctgtggtatgccaacatagtaaactacatggtatccaagtacgtaccaccaggggaaatcaatgaaaactgaagtatgaaagccgccgtcacatatgggatgagccatacctgtatcgggtctgctccgatggcttactacgaagatgtgtgccaactgaagaaggacttaagatcatagaacgatgccatgcctcaccctatggtggccattacggtgcattccgcacccaggccaagatttggcaaagtggc

SEQ ID NO: 19180 - DNA, 421 bp, Oryza sativa
  Clone ID: PAT_MRT4530_24666C.1
aattcatgcaatggcttctaaacataatgttacttgataactaggatataaattaataattacatggaagaactaatttatatctataagttgctttcaattttaccatgagttagtatgtgctaccataatccttggaattggagggtttgtagcagatctcatcagttgtaaggaaagtggaaaaagtttatttggtcagtgttaagctatcttaccgtgcaatgtacattaggtaatgtatgctgttaacagttatttttgttgttaaatccaatccattttcttaaattcaataaagtattgatgaaacaacttagatgcatccaaacaatgctagcaatgctcttaatggggagcaagcaacctgagggtagagtcacccatatattctggtatattttttataaatggaaatgtg

SEQ ID NO: 19181 - DNA, 753 bp, Oryza sativa
  Clone ID: PAT_MRT4530_24667C.1
atgaaacaagaaaagtgcaagaaaggggaaaatggcgcgtcacgccgtcggccacaccagcgagcaccccgcagcctgactgtgccaacggccgcgccatcgagccgcatccgcaccaggtcgcgccaaagcacacgcacagcgctaggccgcgccgtctacatcggccgcatccacgacgcatgcgccattaggaagaagaagagaaagaagaaatcgaaaaaaaaattaaaaaaacggaaaggagagaaggcgacgctggccacgccgagactaccgcgacccgcgctaccgccgcacggcaacgcggacgccacgggccatgctcacaccaagcccccgcgcctgccgcgagcggcgagccgcatccgcaccggagtggactgccgcacgcgcgccatgcatcctgaccgtcgtacgccgccgcaccgagcagcactgcctagctgcccggctgccgcgcagcgccggtcgccggccacaccaagccgcgtctcgtgcggtcgtgccgcccctcttggccgcagcacctcgcctccggccgcttcgccgcctcgctgctccggccgccccgggccgccggacggccgtccccaccggccagcgccctcgccgcacagccgcgccctgcacggccgcgccgctgccgaagccgcgcaccgccctgcctcgccgcgcgccacaccgcctgccgcgcgttgcgccaggccgccgtgcgctgcgccgcgccgcttggccgccagcgccacctga

SEQ ID NO: 19182 - DNA, 2974 bp, Oryza sativa
  Clone ID: PAT_MRT4530_24668C.1
atggagtctgacagagaagcaaaaaggactggaatcgagattgttccatctatcaattactcaagatgtaattgttgcaacttctttttgagctgtctgctcctcggggcgaattctatgagccacctccttcaagagagagcaaagcaatggtacacctctactgttggatgtgtaagctgtagttgggagaagttgcgagacagattctgtctttccttcttcccagttactcgtattactgcccttcgagtagaaattctcagtttcaatcggtgcagcctgtccagattcactaatttagtgcagtccggaccaaccctatccttacccgaatatgtgctactgcaacatttccatataggtttggataaggagtctgcattctatctggacataaccgtcggaggatcgttgatgcacaaaacgccgtcggaaggaagaacaattttggatcatattctagaaaatacttccttcatgacgcaatctgatgaaccccaaccggaggcatacgtgtccaaaatagaggaacctctaacgatcgagccgctcactgaaccatccacttctgctagctcgattgatgagaaggttgctaagcagccgtccgtcgagaatgaagaaattcagactccggatcgtgccgcaattctgttcagggacgattttaacgaagactatggcaataccctgaactattttagcaagaagaaatcacttgttcctttgccacctcccgatcctatggaattgggcttcctaagggaaactgttcagagttaacatccataatgagtgacgaatggctaagggaggcagagcttttatccgaagtaattcggataaataccgctcccgaatcattccttgccatctggaagggaacgatgtcggtattctctacagtccaactgtcggggccaacctcgtctctgagtcttttgcattcgcttatttaagtgataaggcagtgacctcgacaaacaaattcttcaagcatccgaatggaaatatgatcgaaggatttgggattgtgcaagatgtgcttgtctgctttgaagacagggaggcgatcttggatttccacgtctttgaagtccaagactttgatatcctaatcgggctgtccattgagaaacttctcatcaacacaccccgattaggtagcctcaaaataacactgggagagaatgaattctcaattctattttcgcgggcaaggatcaccttgaccgaccctctcccagaaattgagtcagcggaagaggttactgcagttcctcctcatgagtctcccgaggcccttctggaagatgatgtccccgacttcatcaaggaagaagcagatcccggtgagactctcgacctgccaatcatggaaccgtcacctcgacctccgcttgagcttaaacctctacctccaggcctacgatatgccttcctacacaatgacagagaagcccctatcataataagtgacaagatctctgaagacgagactcaacatcttctcaccgtgctgcagatcactaacatgccggaacaaccgatcaatgatttcttaagagatgatatgctgatgacggttcgcgactccaacccgtggtatgccaacatagtgaactacatggtattcaagtacataccaccagggaaaaatcaacgaaatctgaagtatgaaagtcgtcgtcacatatgggatgagccatacctatatcgggtctgctccgatggcctactacgaagatgtgtgccaactgaagaaggactgaagatcatagaacgatgccatgcctcaccttatggtggtcattacggtgtattccgcacccaggccaagatttggcaaagtggtttcttctggccaacaatgtacgaagactcaaaagaattcgtcagaagatgcaccagctgccagaggcaaggaggaatcactgctcgcgatgcaatgcccctcacatacaatttgcaagtcgagatattcgatgtttggggtatagacttcatgggacctttccctaagtctcgcaactgcgagtacattctggtggcagtcgactatgtctccaagtgggttaaggctatgccgtgcagcgctacggatgcgaggcatgccaagaagatgttcatagaaatcatcttccctaaatttgatacccccagaatggtcataagtgacggaggttctcacttcattgacaaaaccttccgagacctcctacgagaaatgggagccaaacacaatgtggccactccttaccatccacagaccagtggacaagcagaaacatcaaacaaacaaatcaagaatattctgcaaaagacggtcaataaaatgggaacaggatggaaggatagattgccggacgcattgtgtgcatactggatagcatacaagacacccattagaatgtccccatatcagatagtttacaggaagccatgccgactacccgtagaacttgagcacagagcatactgggccatcaggaattggaacatggattttgagggagctggagaatggagaaaaatgcagatcgctgaacttgaggaatggagagaaaaggcttaccacaacgcaaagatatacaaagaaagaacgaagcgctggcatgacaaaaggaaaaagatcaagaaattcaagccaggagacaaggtactaatgttcaactccagggttaagcttttcggccatggaaaactgcgcagcaaatgggaaggaccgtttgacgtcatcgacacctcttcgcacggggcaatcacactccgcgacgaattaggtaacatatttaaggggcaacatgatcaaattgttaggatgaatgctaaggcaaaggttgcaacacagccagtctcagctcaagaaccagcaaagaagaaaacatctgctgggcctgctccatccaagaaggccaagactccaggatcaattctcatgctgccaccatgggaatctgacaaactttga

SEQ ID NO: 19183 - DNA, 2739 bp, Oryza sativa
  Clone ID: PAT_MRT4530_24669C.1
atggagcaacctctgtttgagctgtctgctcctcggggtgaattctatgagccacctccttcatcggagcccatttatacaactggctatgaaattcgtcctgaactaattagtatggagtctgcattctatctggacataaccgctggaggatcgttcatgcataaaacgccgtcagaagggaaaacgattttggatcgcatcctagaaaacacttccttcatgacgcagtccaatgaaccccagccggaggcatccgtgtccaagatagaggaacctctaacgatcgagccacttgctgaaccatctacttctgctagctcgattgatgagaatgttcctgagcagccatccgtcgagaatgaagaaattcagactccggattgtgccgcaataatattcagggaaggttttgacgaaaactacggtaataccctgaactactttagcaagaggaaacaacccgttcctttgtcacctcccgatcctatggaacttgggttccttccaactgttggggccaatctcgtctctgagtcttttgcattcgcttatttaagtgataaggcagtgaccccgacaaacaaattcttcaagcatccaaacggaaatatcatcgaacgatttgggattgtgcaagatgtgcctgtctgctttgaagacagggaggcgatcttggatttccacgtctttgaaatccaagactttgatatcctaatcgggctgcccattgagcaacttctcatcaacacaccccgattaggtagcctcaaaataacactgggagagaatgaattctcaattccattctcacaggcaaggatcaccttgaccgatcctctcccagaaattgagtcagcggaagaggttaccgcagttcctcctcatgagtctcctgaggcccttctggaagatgaggtccccgacttcatcaaggaagaagcagatcccggtgagactctcgacctgccaatcatggaaccaccacctcgacttccactcgagcttaaacttttacctccaggcctacgatatgccttcttacacaatgacagagaagcctctatcataatcagtgacaagctctctgaagacgagactcaacgtcttctcaccgtgttagagaagcatcgttctgttcgtggctactcgcttcaggaccttagggggattaatcccgcactttgcacccatcgtattcctattgaccccgagagtactccctctagggaacctcaacgacggctcaataatgcaatgcgagaggttgtaaagaaagaggtcttgaaactcctacatgccggaattatctatcccgtaccatacattgagtgggttagcccagtacaggttgtgccgaagaagggaggaatgacggtcgttgcaaatgctcagaatgaattaattccgcaacgaaccgtaaccggatgcaggatgatgtcctttggactgtgcaacgcccctgcatctttccaaaggtgtatgatgtctattttctcggacatgatcgaggatatcatggaagtcttcatggatgacttctcggtctatggaaagactttcggtcattgtctgcagaatctagacaaagtcttacaacgatgccaagaaaaggacctggtgcttaactgggaaaagtgccatttcatggtccgtgaagggatagttcttgggcatcgggtgtccaaacgaggaatcgaagttgatcgtgccaaaattaatgtgatagatcagcttcctcctcccgtgaacatcaaaggaatccgcagcttcttgggtcatgccggcttttatagaaggttcatcaaggacttctctacaatcgccaaacctctgaccaatttgcttgccaaggatgcgccctttgagttcgatgacgcgtgcctaaaatcttttgaaattctcaaaatggcacttgtttttgctacaatcattcaacctcctgattggactctacccttcgagattatgtgtgatgcaagtgacttcattgttggtgcggtcttgggccagaccaaagataaaaagcatcatgcaatctgttgcgctagcaaaactctgaccggagcccagttgaattatgcaactactgaaaaagagctgctcgcggttgtttatgctatcgataagtttagatcttacttagtaggagccaagatcactaacatgcaggaacagccgatcaatgatttcttaagagatgacatgctgatgatgcttcgcgactccaacccgtggtatgccaacatagtgaactacatggtatccaattacttaccaccaggggaaaatcaacgaaaattgaagtatgaaagttgccgtcacatatgggatgagccatacctgtatcgggtctgctccgatggcctactaagaagatgtgtgccaactgaagaaggactaaagattgtagaacgatgccatgcctcaccttatggtggccattacggtgcattccgcacccaggccaagatttggcaaagtggtttcttctggccaacaatgttcgaagactcaagagaattcgttagaagatgcaccagctgccagaggcaaggaggaatcactgctcgcgatgcaatgcccctcacatacaatttgcaagtcgagatattcgatgtttggggtatagacttcatgggacctttccctaagtctcgcagctgcgagtacattctggtggcaatcgactatgtctccaagtgggttgaggctatgtcgtgcagcgccgtgggttga

SEQ ID NO: 19184 - DNA, 608 bp, Oryza sativa
  Clone ID: PAT_MRT4530_2466C.1
gcgtatttttcaatggtaaaccccttctttttcaagtgtctgtagtccagtcgctgcaggggacagtgaacctgaataaatcgtcataatctctcgtcataaaaaaaaaaaaaaaaaaaaaaaaaaaaaaaaaaaaaaaaaaaaaaaaaaaaaaaaaaaaaaaaaaaaaaaaaaaaaaaaaaaaaaaaaaaaaaaaaaaaaaaaaaaaaaaaaaaaaaaaaaaaaaaaaaaaaaaaaaaaaaaaaaaaaaaaaaaaagggggggcccttttaaaaaaacaaaatttaaaaacccggggagggaaaaaaaaatttttttttaagggcccccaaaaataaaacccggggcccggttttaaaaaagggggaaagggaaaaacccggggggacccaaaattaatccctttggaaaaaaacccctttttccaaggggggaaaaaaaaaaaaaggcccccacaaacccccttttcaaaaaattgcccaccccaaaggggaaaagggcccccccctttaaggcccaataaaagcgggggggggggggggtttcccccaagggaacccttaattttgggaagcccttaagccccgggttttttgttttttcccctt

SEQ ID NO: 19185 - DNA, 915 bp, Oryza sativa
  unsure (1)..(915): unsure at all n locations
  Clone ID: PAT_MRT4530_24670C.1
atggtgcgcatggctggtgtagacctggagtggttacacagcatggcacatgcgctgtcattggacacatgggcgtggccaagagaggacgttcctggcctaggggttaaactcttcggccacggaaaactgcgcagcaaatgggaaggaccattcgacgtcatcgacacctcttcgcacggggcaatcacactccgcgatgacttcgttgtgcaagnctcccctgcaattttggagccgatcgacgagctccctggttcggccgaacccttctcagccccgttcggcagcgtgtccctctccccctcgccatgtcacaaggacaaaatctggggggattcaccttacgcgacgccgacaacgggagaactcggcttgttgaaggcacgacggcttttccaagatgacgggaaggccggcgccacctctcgccgagcgctatgtgggcaccctgagggggcagcagaatcccgtagccctccacctatgaaggtgaagcgtcatttgaagccccctccaattgtgagggctcccagccaattccaagaagaggaggtgaaatcgccggagccctcgatccataagctcgccgcacaagtgaagaaactccgcaaggagaacatagagcttaaggatcgcaacgcggagctagggagagatcaggcgctagagtggttcggccgaaccaccaggttcggccgaaccaagtctggccccaatccctctcaactttcacaggtaagcaggtatgtcacagtttatccctaccaagctccacatatcagccttctaatagggatgaattatggcacattttgccttgggaagcaaggactggaatcaagatcgttctatttctcaattactcaagatgatgaaaaccctgaagttgggaggaaaatcagactaaagtga

SEQ ID NO: 19186 - DNA, 221 bp, Oryza sativa
  Clone ID: PAT_MRT4530_24671C.1
tcgagcatcagtgaagccaagagctcaggctgatagcgcagcaatctcactaccactgcatacgcaggcaggaaggctgactgttcatcatctccagctagcaaaggtacgagttgactactgtgaccagactcaagcacaagctcaaggtttgctggagttaaacttgccatccatatgtggcctctattctatctactacattgcgccgacgaacattg

SEQ ID NO: 19187 - DNA, 670 bp, Oryza sativa
  Clone ID: PAT_MRT4530_24672C.1
atgagtgcctttttgagaatttcaaaagattttaggaacgcgtcatcgaactcaaagggcgcgtccttggctagcaaattggtcagaggtctggcaattgtagagaagtccttgatgaaagccagcatgacccatgaagctgtggattcctttgatgttcataggaggaggaagctgatctataacatcgattttagcacgatcaacctcgattcctcgttcagacactcgatgcccaagaactatcccttcacggaccatgaaatggcatttttcccaattaagcaccagacaatgaccgaaagtctttccatagaccgagaagtcatccatgaagacttccatgatgtcttcgatcatgtccgagaaaatagacatcatacatctttggaaagatgcaggagcgttacacagtccgaaggacatcctacgaacctggactgggctaacccactcactgtatggtacgggataaataatcccggcacgcaggagtttcaagacctctttctttacaacctctcgcattgcattattgagccgtcgttgaggttccctggagggagtactctcggggtcaataggaatacgatgggtgcaaagcgcgagattaatccccctaagatattgaagcgagcagccaagaatagaacgatgcttctccaacacg

SEQ ID NO: 19188 - DNA, 228 bp, Oryza sativa
  Clone ID: PAT_MRT4530_24673C.1
atgtcgaggccgccggtgcctcacatcgtgatctcgtccttctcgtctgcactgcctcctcggagacttagtcgatactttagccataagttcacaccacaggacgaagatgaggaaacattaattggagccccgtgccccctccgcggtcacctaatcctcatcaccggccgccactcccttctctcccgtcagatccgacgacgagttggccgcatcatgccctag

SEQ ID NO: 19189 - DNA, 153 bp, Oryza sativa
  Clone ID: PAT_MRT4530_24674C.1
atgaagcctcggaggatccctatgcctactaccaggagggagatgaagacgatggcgctcagtagggacgctccagatcctctcctgatgacgattgcaggggactcggcagtcaggggtggcttctcgaagtaccatgagggcatcggatag

SEQ ID NO: 19190 - DNA, 1315 bp, Oryza sativa
  Clone ID: PAT_MRT4530_24675C.1
tttttttttttccaacttttttttacattgatgatcacaagaggaattgatataatgacatagtttataacattacataacacaaacaacataattaacccttacaaaacaccacatggacacagacaaaagaccatcacttattcagacacaaaatcatcatcagaagagtagtagaagaagaccatagagcagcagcagattaaagccttgaaattctcaaagcagccaagagaagaaaaaagatgaagacttcttgatgccaaccacagcttagctcagagctcactctcccatggcgcggcgttcgttcagtactggagcatgtgcgcggcggcggggcaggggatctgccatggccggagcagcgggtcgtcgggggggcactcctcctggatgtccatggcgacgccgctgaactcctcgacgacgcggagcacctcgttgacgctgcgcagcctgtcgccgagctcggcggcgcgcgcccggagcaccgtgttctcctgctccacgcgcgcgtactgcccggcgatttcgctggcgcgcgccagcacgcgcgcgttgtccgcctgcagcctcgccacctcctgcaccagctcgtccaggtgctgctgcttccgcagccgcgaccgcctcgccgactccctgttcgacagccgccgcttctccctccggtggtccgccgccaccaccacccccgccgagtccccgtccgacgaccccgccggcgacagcgacgacgacgacatttccacaaacaccttgtctacaaacagctgcttcttctgctgctacgattatttaatcaaccgaagaagaacacgaagaagaagaacaacaacaagagagctctactactactagtaacaatggcggattgacgcggagaagatgattcccccagaattatgagatcacataaaaccagtagaggaagacaaccgagaaggagtggaggaagcaggagcggcgcaggtgagtggcgatcttcataaagctcagagatttcttctctgctcgcctcggcaaaccatggccagcgagctcaactcctccctccagcgcaaacaattcctcccaaatcccaacaacaaaaatcacgatctttctcaccaccaagatccaacccaagaacagcaaccacaaccaaaattcgacaccgattcgatcagcgggagctgatctgctcgaagaggacggaatcgagctgattggagaagaatttggggggagaaatggatcgagagatggagatgaatggcaaccacccaaatcaaaggatgagccccggggtggggcagcccggggatccact

SEQ ID NO: 19191 - DNA, 2205 bp, Oryza sativa
  Clone ID: PAT_MRT4530_24676C.1
gcagcgagagacgcttcgatggacgcctcctcctccgcctccgccggcggcgaggccgacgcgatggcgctcgtgcaggggtacaacgccgacgagctcgccatcgccggggagttcctcaccacgtggctccccttcctctccgcgggcctctgcgcctcctgcgccgactccctccgcagccgcgtctcctccctgctgcccccgcaagccgaggaatccccgtcgtcgccgccgccgcggatcgatcagattgagccctcggggtgggagtccgatccggctacggctcacccgcagcatctgccgttcgagccgagcggatgggactcggatccgccgcagctgccaccggagcaggagcagcagaagcagaagccgcagccggcggagaagccgcggaagtcgtgggcagacatggctcaggaggacgagctcgccgccgcggcagaggaggacgcggcggcagccgcggctgatgacggcgaggaagggagcgaggctggtaggccgggtgtgcagctgacgagggagcagcgggagctgaggcggttccggaacgtggtgcggaggaaggatttcatctgttttgagagggtcaatggtcggctcgtcaatatcctcgctggcctggaacttcattgcggtgtgtttagcgcggccgaacagaagcgtattgtcgactacgtatacgatcttcaggagatgggcaagcacggggagcttggagctacaaacttttttggtaattattctactaaatcattggatctacctaccacaagtagcagattagcttttgtgatttcaagcaggaagataaatatggacaagaatggaaacccaccaggcattattcgaactattgcttctgatccgatgcctagcttatttaagatcatgatcaagagattggtacggtggcatgttctaccaaagacttgcataccagacagttgtattgtcaatatatatgaccctggagattgcatcccaccacatattgatagtcatgattttgttcggccattctgtactgtttcattcctcagtgagtgcaacattctttttggatctactctgaaaattgctggccctggagagttcactggttcacttccaattcctctgcctgttgggtcggtgcttatcctaaatggcaatggtgctgatgtagcaaagcattgtgttcctgcagttccgaccaaaaggatatccattaccttcagaaagatggatccagcgaagcgtccgttcaatttccgagatgatccagaattgcttaacataattcctctagaaacagctgtacaagaaactggcagatcatcagatgaaggtaagggcaagcagcctgacatacagatcagaaatccgagcaaagcacacaggaacaagaaatctaaagtaagaacatctcctggaaagggtggacggggcggcattctcggagatggacctcctcaatatgcacaagctcaagtcactggcatttcgtcacagcaaaacttccatggccagcctaccatctctggttcaagtgctgagagagaaagacgccctgttggtccattgagagagtcaagatatcagcaggatgcacctggcatgcaatctaacatggatggtatcagagagcgggcaaattggttggctcaagagaggatgcatggtaacagcatgaattcgattgacgatggcacggaatctcaggaaaggaggcagcgaatggagcacagacagatattgatgatcaaccgcacgatcaacgatgatatggattccctttcaatcgggagccatgaatctgaccagactcgtgtaagcgtacgaacactatacaacaagccaaggaggaccagggtaaacctggatgagtaagcaagcaagccaagcctgtactcaaatctgtgaacttgcttttgctaaaaaagaaaaaaaaaactgtgaacttgctgttgggaatgttgatacctgaaagcatacttgcgctgtatatttcaggaggtgtgaccagaacaccagcagatataacttactaaaacacttagtattgatttgatgaaatttgtcagctgatagtcaggcccctattctgtagataagagtattttttgggaatgctgtaattgtgacttaatatggatgcatttctcgttgatgaatgaggacctctcaaaaaaaaaaaaaaaaaaaaaaaaaaaa

SEQ ID NO: 19192 - DNA, 195 bp, Oryza sativa
  Clone ID: PAT_MRT4530_24677C.1
ccatagaattccaagtgacacactcgtgtgctttgtatgtcccggtgctcaagagacgcagtcgagtggatgaataaccctgccaatggctggatgccctggcggacacgtgtgtggtgcagaaacaatgcgatgaatggaagctgatcaaagagcaagctgacagacccttgcaaatggcccatgactggtgca

SEQ ID NO: 19193 - DNA, 373 bp, Oryza sativa
  Clone ID: PAT_MRT4530_24678C.1
ttaaatcgtacccatatttttttccgaaggaacgtagctccaaccatacaatccctgagaagatgaacctgctacaccaaagcacgaaaacgctgactctatcacaagggtgtcatcgttgctctcccacacccaagtgtcctgagctagcaaaacaggaaggaaaaaactcgaaggcaatgcccccaagaaggtaacgctcagcgcccacaggcttggcattgaggttggggaggtcagcacagatgcgggtggtgacctttgccacgtcagcttgtatgcccaatctcctgctcgacagcctgtgacggtcgtcactacctcagcgctaagcagcgtgctagagctcagtgccatcggccctagcgctgag

SEQ ID NO: 19194 - DNA, 536 bp, Oryza sativa
  unsure (1)..(536): unsure at all n locations
  Clone ID: PAT_MRT4530_24679C.1
ctaattggcgtatatattccccttgtccatggcgttgcggtttgttccctcatcaacctcaccaccattattttcttctctcctcttctcttcttcctcctctcctctcctctcctcgctctccatccatctcgtcttcttcttcctcctcctcagcttcgagatttcagcttctccaaacccccattcttcccgccacaagctctgctctgtgctttgctcgctcgcctttcccgccattggtgtgcttcgctttcttggcttcaaagatccgacgagctctgtgatagctggggagaagaagaggaggagaggaggatgctgggagcgagccctaaggccaagaaaggcgcgacggtgaagttcgggtcgatgaagaatcctcctcctcccccggtggttgagagccgccgccggagcagcggcgcgcggcgggtgggaangtgccggcggaggaggtgtgggaggtgcggncaggcgggatgctggtgcagaagaggggcggcggcgcgacgaggagcccgtcaacgtgaanc

SEQ ID NO: 19195 - DNA, 1458 bp, Oryza sativa
  Clone ID: PAT_MRT4530_2467C.1
atgccaggaaactatgtcgtcgtcgtcgtccttagcagcctggctgcactagtgctgctgctgccgccgttgtttgctgctgtggatgatgggatgaggagcggcggcaagtgcaccaacagctgcggcaacgtcggcttcgagtacccgttcggcgtggaggacgggtgctaccgcggcggcggcttcaacctcacctgcaaccacacgtaccagtcgcccaggctgttcctcggcgatggcagcgtgcaggtgctcgacatctccgtgccacacgggtgggcgctgatcaacaacaccggcatggtgttcaactccaccgagacgcgggtcgtcctcaacagaacatgggatcagctggtgggaggcccctactccttatcgggctcaaacaagatagctctggtaggctgcaatgccagggttgatcttcgcgcccgggtaaaagtaaaacacggcggccgcggcggcgacgacgatactggaagtaatctgatcagctcatgcactgccgtctgcccattagacctcgaggacatgactccggttttcgccatcggttctggcggtagcagcgcagcgtgctccggggttggctgctgccaagcagacatcaacttagacatcccctcttcgtacacaatccagatccacaacttgcaggagctgggaggctccatcagtccaacggatctagtgttcatatcgaaagaggagttcagctacaccaatgacatggctttcggcaacaacatcccacaggcgctcccagccctgctagattggtatataagcagtgacccatcagagtgtacgtacgaatcagcccccgattgtctcagcgccaacagcttctgccacgcttacgaccttgggtacaagtgccactgctccgatggttaccaaggaaatccatacattcgcggtggatgccatgatatcgatgaatgcaagtccccccaagattattcatgttacggcaactgcaacaacacgccaggatcgcacatttgcgactgtcctcgtggctacgagcgcaatgcttccacaccaaatggatgcaaagttggtgctcccttcctatcaaggaaaatgaagggaacgatcggttacttagatcccgagtattattatacaggccatttaatggacaaaagtgacgtttttagctttggagttcttgtaatagaacttcttactcggaaaagacccacctataggactgatcagggtgatagtttagttttgcattttgcatcactactgagacaaggacagctggttgggatactggatcctcaagtcctgaccgagggaggtggagaagtcatggaacttgagatgatcgtccctggcgtggggctggatgcgtcgaccgattgctggctcaccgccagcatgacgcccaataacagcagtgccaccaagcccaacctcgtgctcatcttctccatttga

SEQ ID NO: 19196 - DNA, 485 bp, Oryza sativa
  Clone ID: PAT_MRT4530_24680C.1
ccaatcctggtctctcgccctcctcttccccaccaacctgttccccgacaaacatcaaattgtccatggtgaacatgatgatcctcacatgatacgatatatttggtaccttagcacgagcgcaggatttcggtggggctctggccagtgttctgcaccttcttgttcaagaaagcatggaggatcgcctactttcagcttaatgatcagatatatgacaagatctatgtgcaaatggctatcagtaaggctgctttgataagaaaattctgatgaggaaccctggagttttttttcccacctgcacttcctttcatactctttgtgctgtttgtgaagttttaataaatgtgcccctctgggtggcataacagtgtgtaacagactaattacagtaaactaaagagagatcgatattgtaaacaggctagtcgtttaatattacctttgccactcatgtactttaaaaaaaaaaaaaaaaaaaa

SEQ ID NO: 19197 - DNA, 311 bp, Oryza sativa
  Clone ID: PAT_MRT4530_24681C.1
acctatcaattaacgattaaaccatgatgaatggaccattttaacacaacagggactccaccccatctttaaggaccaatcgaggcggaccacacacacaaaacaaaagcaaaaaaaagcccattgagcaacgagccaatagaagtgggaacaataacaaagatcacatttcacaagcattttactagacgaaggccttgatatactcgttgaacacgggcaggaggaagttcttgacgcaatggggggtgaaccaggcgccgggcttgcacaccgcgaggggcaccgatgacggcgacggtcatgaacgg

SEQ ID NO: 19198 - DNA, 244 bp, Oryza sativa
  Clone ID: PAT_MRT4530_24682C.1
atgaccgtcccccttcccaccacccgccgccgatggcggcatcgacgattacaacctgcgattaccgtcatgtcgtgcggttcgttcgtctccccctccgcggcgacgcctcgagcagtcaccttcttcctcaccgcaatggctggtgccttatctgctcgtcatggaggctggtgcctggtggagtacgatgcctcttagggcacagaagtatagaacacgtgggcgggaggatgccgcctag

SEQ ID NO: 19199 - DNA, 409 bp, Oryza sativa
  unsure (1)..(409): unsure at all n locations
  Clone ID: PAT_MRT4530_24683C.1
aagttgcaattagccgtgtttaaatatttcctcgaacttggtattttcttttctgagaattacacatgttccaggcaacacgggcgaaaatataatgcaatgtcgtgcttacgccaacaaatggtgctcctggcgggacaaagtagattgtttctcctcggctcgctggcgtccgccaacacgcggacagatcgatgcgccccacctcaacctgctagccggaggcggtggatccgggggttggggattggggaagaaacaaaaaaccaagaccctatacagtcttctcaaaaaaaaaaaaacctatacagagttcggtgggacccacggcatgtattctggggcgccagcagaaagtgatacgagcggngcagttacgtgtacgttcgaatctcaaagcatatcctgc

SEQ ID NO: 19200 - DNA, 156 bp, Oryza sativa
  Clone ID: PAT_MRT4530_24684C.1
atggaggaatgggatggactatgtttgcatcttcatccgttcccggtgacgtgcttgaaggcggtgaccaacgcgggtggaggagctttgcgagtagcggcgattggaaaggagcgcacgctgcacaagcaacgacgagcaaaagggagctcgtga

SEQ ID NO: 19201 - DNA, 545 bp, Oryza sativa
  Clone ID: PAT_MRT4530_24685C.1
ggacgttggttgtgggcgtgcgggcggacgccgcgagccggacgctgctcacgtggacgttcatcaatgtcgccgcccccggcgaccgcatcgtcgccgtccacgtcgtgctcgcctccgcgcccgtggccgccgccaccaccgccgtcgacttcgacaccatgctcgccgtctacgagggcttctgcaatctcaagcagatcaatctaaagctcaagatttgcaaggactcctcggtccgcaaggcgctagttcgtgaggccaacctgtttggggcatccaaggttatcgtcggcatcgccaagaagaagcgcgggatttcgtccctgcactccgtcgccaaatactgctccaagaagctgccggccaagtgcgcggtgctcgccgtggacagcggcaagatcgtgttcaggagagaatccaatgtccactcaggcaaggtctccgcggagattcctggatgtggtgataatgagttgtattgcgaggtgccgttcctagcccgtcagtgtaaagaggaacctttacctttacatgaaccaccc

SEQ ID NO: 19202 - DNA, 1048 bp, Oryza sativa
  Clone ID: PAT_MRT4530_24686C.1
atggagcaactgctttttgagctgtctgctcctcggggcgaattctatgaaccacctccttcatcagagcccatttatacaactggctatgaaattcgtcccgaactaattagtatggttagggaaaaacctttttttggctttgatctagaaaatctctaccatcatctgcgatacttttaacaagtttgctcatgccttaagattcgtggcatgagacaagaaactgtgcggtggaaattgttcccgttctctcttcaagagagagcaaagcaatggtacacctctaccgttggatgtgtaggcggtagctgggagaagttgcgagacagattttgtcttgccttctttccagttactcgtattaccgcccttcgagtagaaattctcagttccagcatattaataaagaatcaattggtcaagcctggtccagattcactaatttagtgcagtccgaacgaaccttgtctatacccgaatatgtgcttttgcagcattttcatacgggtctagataaggagtctgcattttatatggacataactgcatgaggatctttcatgcacaaaactccgtcagaaggaaaaataattctagatcgaattctagaaaatacttccttcatgatgcaatgtgatgaaccacctccagaggcatctgtgtctaagatagaggagccatcgatagtcgaattacaacctaaaccttccacttcaaccaattcaactgacgaactagctcctgagccatcatccgttgaggacgaagaaatttggactccggatcaagctctagttttatttagggatggtttcgatgaagactacaacaacaccctgaattatttcagtaaaaagaaaccacttgttcctttgccacctcctgatcctacggcaacatccataatgagtgacgaatggctgagtaggtagagctttcatcggaagtaatttggataaataccgcccccgagtcattccatgtcatttggaaggaaacaatgtcggtattctttatagtccaactgtcggggctaatctcgttt

SEQ ID NO: 19203 - DNA, 240 bp, Oryza sativa
  Clone ID: PAT_MRT4530_24687C.1
atgtcccaagaagctgtgaattcctttgatgttcacaggaggaggaagctgatctataacatcaattttaacccgatcaacttcgattcctcgttcggacactcgatgcccaagaactattccttcatggcccatgaaatggtcgagagtctcaacgggatctgcttcttccttgataaaatcggggacctcatcttccagaagggcctcgggagactcgtgagtggggagctgcactaa

SEQ ID NO: 19204 - DNA, 359 bp, Oryza sativa
  Clone ID: PAT_MRT4530_24688C.1
caccgacttcctcctccatcatcattatcatcccccaactgtttccccccacgccaccgagaaggacacgccgactccaactcctccgccgacggcgccgacgccgacgcaatcgtcgccgacggagaactgggacgcgctcgacgccctcgtgactcgacttagacagatccgaccggctcctcctcccgccggcctcccagtcgtcgtcctcctgcccgtcctcgtcctccaccatcaccgacaccttctcctcctcctcggagccctcgccgacctccttctaccggtcgggccaggtcatacgccgagcccggaccgagctcgaggagggaggacgttgacgcacgtgctcgcgc

SEQ ID NO: 19205 - DNA, 420 bp, Oryza sativa
  Clone ID: PAT_MRT4530_24689C.1
gtatggcctgattaatgcctgccgatatgggacgtttcagcgggtcgggctaacttagaagcatgggatttctctacaccattttgtcggtgagcaccaagaaatgcaatggtatttctacctacgtacaagccattggggtatcgggtaaagatataaaaaactgcctcaatttttgtctaccttgacgatcatgcagcaaaagcataaaacatttcaacagaagacctttgatacagattgaacattagatgtacatttgtagggacatgtggatccataccctagggatgccgaccaggtggatctcctgcttccacattgggggaaaaattgcacattcaacacacgatacctggaatagacgcaaaagtcagtccgacaaaatcatgtgacttgcatatgcaatgccaaaattga

SEQ ID NO: 19206 - DNA, 474 bp, Oryza sativa
  Clone ID: PAT_MRT4530_2468C.1
cccacgcggccgagaaaacgaatcacccttcgccgatggaacgagcatcaggatcatactgctgtccttggtatcgctgaagcccatgcctatgctcaaggtgaagcttatcgtcacaattatgggcactatcacggtgctgcagcgacatactggtaccacagcacgagcttgagccatattgtgagttccaacgggaactggctggcatattggtaaacccactcgtggaccaagctactatccaacaggtaaacaaccacctttcgcaacaacgtgacgcgcttgactcaacaatacatttatttggacattgacatagctcatgacctacagcaacagctcacactgcacacctagttgatctgtaccttgatcaaacacaggctaaagctatcactctcgtggcacatagattgccatgtacatgtgcgaactaccctaggccctatggcacacccatcttcattacca

SEQ ID NO: 19207 - DNA, 627 bp, Oryza sativa
  Clone ID: PAT_MRT4530_24690C.1
atggagcaacctctttttgagttgtctgctcctcggggcgaactctatgagccacctccttcatcggagtcaatttatacaactggctatgaaatttgtcctgaactaattagtatgctgggaaaagctgcgagaccaaccctgtccttacccgagtatgtgcttctccaacatttccatacgggtttggataaggagtctgcattccatctggacataaccgccggaggatcgttcatgcacaaaacaccttcagaaggaagaacaattttggatcgtattctagaaaatacttccttcatgacgcagtccaatgaaccccagcaggaggcatccgtgtccaagatagaggaacctctaatgatcgagccacccgctgaaccatccacttctgctagcttggttgatgagaaggttcctgagcagccgtccgtcgagaatgaagaaattcagactctagattgtgccgcaattatgtttagggacggttttgacgaagactacggcaataccctgaactattttagcaagaggaaaccacccgttcctttgtcacccccccgatcctatggaactcgggttactttgagaaactgttcgggagttgacatctgtaatgagcgatga

SEQ ID NO: 19208 - DNA, 755 bp, Oryza sativa
  Clone ID: PAT_MRT4530_24691C.1
atggagcaacctcttttttagctgtctgctcctcggggcgaattctatgagccaccttcttcatcggagcccatttatacaactggctatgaaattcgtcccgaactaattagtatggttagggaaaaatcttttttctggctttgatctagaaaatccctaccatcatctgcgagactttgaacaagtctgctcgtgccttaagatgcgtggcatgagacaagaaactgtgcggtggaaattgttcatgttctctcttcaagagagagcaaagaaatggtacacctctaccgttggatgtgtaaacggtagctaggaaaagttgcgagacagattctgtcttgccttctttccagttactcgtattactgcccttcgagtagaaattctcagttttaaacagatcaagaacggatcaattggtgcagcatggtccagatttactaatttagtgcaatccggaccaaccctgtccttacccgagtatgtgcttcttcaacatttccatacgggtttggataaggagtctgcattctatctggacataaccgctggaggatcggtcatgcacaaaacaccgtcagaaggaaggacaattttggatcgcattctagaaaatacttccttcatgacgcaatccaatgaaccccagccggaggcatccgtgtccaagatagaggaacctctaacgatcgagccactcactgaaccatccacttctgctagctcgattgatgagaagtttcctgagcagc

SEQ ID NO: 19209 - DNA, 3182 bp, Oryza sativa
  Clone ID: PAT_MRT4530_24692C.1
atggctaaaggaggcagagctttcatccgaagtaattcagataaataccgctccctgaatcattccttgccatctggaagggaacgatgtcggtattctctacagtccaactgtcggggtcaacctcgtctctgagtcttttgcattcgcttatttaagcaataaggcagtgaccccgacaaacaattcttcaagcatccgaacggaaatatcatcgaaggatttgggattgtgcaagatgtgcctgtctgctttgaagacagggaggcgatcttggatttccatgtctttgaaatccaagactttgatatcctaatcgggctgcccattgagcaactagtcatcaacacaccccgattaggtagcctcaaaataactctaggagagaatgaattctcaattccattctcgtgggcaaggatcaccttgaccgaccctctcccagaaattgagtcagcggaagaggttaccgcagtttctcctcatgagtctcccggggcccttctggaagatgaggtccccgacttcatcaaggaagaagcagatcctggtgagactctcgacctgccaatcatggaaccgccacctcgacctccgcttgagcttaaacctctacctccaggcctacgatatgccttcctacacaatgacagagaagcccctgttataatcagtgacaagctctctgaagacaagactcaacatcttctcaccgtgttagagaagcatcgttctgttcttggctactcgcttcaggaccttagggggattaatcccacactttgcacccatcgtattcctattgaccccgagagtactccctctagggaacctcaacgacgactcaataatgcaatgagagaggttgtaaagaaagaggtcttgaaacttctgcatgttgggattatctatcccgtaccatacagtgagtgggttagcccaatccaggttgtgccgaagaagggaggaatgacggttgttgcaaatgctcagaatgaactaattccgcaacgaaccgtaaccggatggaggatgtgtattgattacaggaagctcaacaaggctacaaaaaaggatcatttcccgctacccttcattgatgaaatgttggaacggctggcaaatcattccttcttctatttccttgatgggtattctggatatcatcaaattcccatccatccggaggaccagagtaagactacgttcacatgtccatatggcatctatgcgtatcgtaggatctcctttagactgtgcaatgctcctgaatctttccaaaggtgtatgatgtctattttctcggacatgattgaagatatcatggaagtcttcatggatgatttctcagtttatggaaatacttttggtcattgtctgcagaatctagacaaaatcttacaacgatgccaagaaaaggacctgtttagatcttacttagtaggagccaaggtgataatttatactgatcacgctgctttgaaatacctgctcactaagaaagatgctaaacctcgtctcttaagatggattttgctactccaagaatttgacttagaaattaaagataaaaagggagtagaaaattccgtagcagatcatttgtccaggctgcagatcactaacatgcaggaacaaccgatcaatgattttttaagagatgacatgctgatgacggttcacgactccaacccgtggtatgccaacatagtgaactacatggtatccaagtacataccacgaggggaaaatcaatgaaaattgaagtatgaaagtcgctgtcacatatgggatgagccatacctatatcgggtctactccaatggcctattacgaagatgtgtgccaactgaagaaggaccaaagatcatagaacgatgccatgcctcaccttatggtggccattacggtgcattccgcacccaggccaagatttggcaaagtggtttcttttggccaacaatgtacgaagactcaagagaattcgtcagaagatgcaccagctgccagaggcaaggagaaatcactgctcgcgatgcaatgcccctcacatacaatttgcaagtcgagatattcgatgtttggggtatagacttcatgggacctttccctaagtctcgtagctgcgagtacattctggtggcagtcgactatgtctcaatggtcataagtgacgcaggttctcatttcattgacaaaaccttccgagacctcctacgagaaatgggagccaaacacaatgtggccactccttaccatccacagaccagtggtcaagcagaaacatcaaacaaacaaatcaagaatattctgcaaaagacggtcaacaaaatgggaacaagatggatggatagattgccggacacactatgggcatactggacagcatacaagacacccattggaatgtccccatatcagatagtttacggaaagccatgtcgactccctgtagaacttgagcacagagcatactgggccatcagaaattggaacatggattttgagggagcaggagaatggagaaaaatgtagatcgctgaacttgaggaatgaagagaaaaggcttaccacaacgcaaagatatacaaagaaaggacaaagtgctggcatgacaaaaggataaaaatcaagaaattcaagccaggagacaaagtactgatattcaactccagggttaagcttttcggccatggaaaactgcgcagtaaatgggaaggaccgttcgatgtcatcgacacctcttcacatggggcaatcacactccacgacgaatcaggtaacatatttaaggctcaatgccttttccaagatgacgggaaggccgcgccgcctcccgccgagcgctacgtgggcaccctcttcaccaaggcaggggatgaggtgctccacaagtacaccacacccaccgctacaccatccactccaaagggggagcgtttccgcattcaaggagtgcgaactcccggcggtgggtatggtaagggtttactccggcctttgacggcatgggagaagaagggggcagcggaatcccatagccctccacctatgaaggtgaagcgtcatttgacgccccccacttgctattaataatgtggcacattggtgtttaccccaatgtttgccaaagtttgtttttgttttatgtttaagaaaattcaggttttgaataagtgtgg

SEQ ID NO: 19210 - DNA, 1113 bp, Oryza sativa
  Clone ID: PAT_MRT4530_24693C.1
atggcggcggcgacggaggccttctcgcgccgcctgagcgatgccgttcgggggctctccggcgcctggtacggccgccacatggccgccgccgaccgcgccatccgcagccgcctccccctcgtcgacctcgtcctcgaggtccgcgacgcccgggtacccgccgcctcggcgttcgcgccactccgccgccgctccccggagcccgaccgccgccgcctcgtcgtgctcaacaaggccgacctcgcggacccctctcaaaccgagaagtggatggcgtacatgaagcaaacgagctgctcctgcgtcgctcttaattcgcacagcagggagggcatcaaggagctgttgaatgctgtgcgggcaaagatcagggagattaaacttggtgagagcgattgcactggaaccgtcctcttggtcggtattcctaatgttgggaagtcagcaatcgtcaatgccatgcatcgaattgggaggattggggcagcagagaagggaaagctcaagcatgccattgtgagcagccatccaggagaaaccaaggacataagtggttacaaggttgctagtcatccaaatatatatgtattagacactcctggtgttttgtctcctgtattttttaatgacgagtctggtcctctactagctttgacaggagcaatcaaggattccatgatgcaggagtttgagattgcccaatttctgcttgcaattttgaactcaagggagacatacaagaagtgggagaacatgaatcaagcaggagatatgccttctttcagccatgcaatgtcatccagcagtcaccataataaaaggcaatatgcttcagatcatacccaagattttgttgtgaaggctgttcgccaagtgctttttgatagtatatcatcttttaaggggtatttagaaaatgagaatgaattaaagagtttgatagaatgccagtttatagccttgcaggaggctttcagggtttctgctgatctaagtgaggatgtgcgtaaacttgttgctatgaaattactcaacctctatcgaacaggaagacttggccgttataccttagactgtgctccagatgttaggaaggaaattgtttcatga

SEQ ID NO: 19211 - DNA, 210 bp, Oryza sativa
  Clone ID: PAT_MRT4530_24694C.1
atggtggtgagggcttccggtggcgaggaacggttgggcgaaagcgtaaaaagatcggtgaggaaagcaatgccggtgggagagatcgctgcggagcagatcggcgcaggcggcgacctagcgacgggaggcgatgagacgctcaagaggaccgtatgtgatgtggttgcattatgggtcctcttagagcctactggggttctcatgtag

SEQ ID NO: 19212 - DNA, 2919 bp, Oryza sativa
  Clone ID: PAT_MRT4530_24695C.1
atggagcaactgctttttgagctgtctgctcctcggggcgaattctatgaaccacctccttcatcagagcccatttatacaactggctatgaaattcgtcccgaactaattagtatggttagggaaaaacctttttttggctttgatctagaaaatctctaccatcatctgcgatacttttaacaagtttgctcatgccttaagattcgtggcatgagacaagaaactgtgcggtggaaattgttcccgttctctcttcaagagagagcaaagcaatggtacacctctaccgttggatgtgtaggcggtagctgggagaagttgcgagacagattttgtcttgccttctttccagttactcgtattactgccattcgagtagaaattctcagttttaagcagatcaaaaatgaatcaatcggtgcagcctggtccaaattcactaatttagtgtagtccggaccaaccctgtccttacccgagtatgtgctactccaacatttccatacgggtttggataaggagtctgcattctatctggacataaccgcttgaggatcgttcatgcacaaaacgccgtcagaaggaaggacaattttggatcgcattctagaaaatacttccttcatggcgcaatccaatgaaccctagccagaggcatccatgtccaagatagaggaacctctaacgatcgagccactcactgaaccatccacttctgctagctcgattgatgagaaggttcctaagcagccgactgtcgagaatgaagaaattcagactccggattatgccgcaattctgttcagggacggctttgacgaagactacggcaataccctgaactattttagaaagaggaaaccacccgttcctttgccacctcctaatcctatggaactcgggttcctacgagaaactgtacgggagttaacatccataatgagcgatgaatggctaagggaggcagaactttcatccaaacagctccccactcacgagtctcccgaggcccttctggaagatgaggtccccgattttatcaaggaagaagcagatcccgttgagactctcgacctgccaatcatggaaccgtcacctcgacctccgcttgagcataaacctctacctccaggcctacgatatgctttcctacacaatgacagagaagctcctgtcataatcagtgacaagctctctgaaaacgagactcaacgtcttctcaccatgttggaaaagcatcgttctgttcatggctactcgcttcaagacctcagggggattaatcccgtgctttgcacccatcgtattcctattgaccccgagagtactccttccagggaacctcaacgatggcttaataatgcaacacgagaggttgtaaagaaagtggtcttgaaactctagcatgccgggattatctatcccgtaccatacagaatagttcttgggcatcgagtgtccgaacgaggaatcgaagttgatcgggttaaaattgatgttatagatcagcttcctcctcctgtgaacatcaaagtcattcaacctcctggatggactctgcccttcaagatcatgtgtgatgcaagcaatttcgctgttggtgcggccttgggccaaaccaaggataaaaatcatcatgcaatctgctctgctagcaaaactctaaccggagctcagttgaattatgcaactaccgaaaaagagctgctcgcggttgtttttgctatcgataagtttaggtcttacttagtgggaggcaagctgataatctatactgatcatgctgccttgaagtacctgctcactaagaaagatgctaaaccacaagatggattttgctgctccaagaatttgacttagaaataaaagataaaaagggagtagaaaattccatagcagatcatttgtccaggctgcagatcactgacacgcaggaacagccgataaacgacttcttgagagacgacatgctgatgatggttcgcgactccaacccgtggtatgccaacatagtaaactacatggtatccaagtacataccaccaggggaaaatcaacaaaaactgaattatgaaagtcgccgtcatatatgggatgagccatacctatatcgggaagactcaaaagaattcgtcagaagatgcacaagctgccagaggcaaggaggaatcactgctcgcgatgcaatgcccctcacatacaatttgcaagtcgagatattcgatgtttggggtatggactttatgggacctttccataagtctcgcaactgcgagtacattctggtggcagttgactatgtctccaagtgggttgaggctatgccatgcaacaccgctgatgcgaggcatgccaagaagatgttcacagaaatcatctttacaagatttggtatccccagaatggtcataagtgacggagaacttgagcaagtatactgggccatcagaaactggaacatgggactttgacggagcaggagaatggaggaaaatgcaaatcaccgaacttgaagaatggagagagaaggcctaccacaacgcaaagatatataaagaaaggacgaagcactgacatgacaaaaggataaaaatcaagaaattcaagccaggagacaaagtgctaatgttcaactccgaggttaagcttttcggtcacggaaaattgcgtagtaaatgggaaggaccgttcaacgtcatcaatacctcttcgcacggggcaatcactctccgcaacgattcagttagcttagaaattagtaggcttaggaaagaaaatggaggcctgccggacccaccagggttcggccgaaccagggcggcacccgttcgcagtgcagcaatgtcatactcgacaagctcccggagaagaagaaagatccggggtgcgcccccttgatcggttagggttttgggg

SEQ ID NO: 19213 - DNA, 2145 bp, Oryza sativa
  unsure (1)..(2145): unsure at all n locations
  Clone ID: PAT_MRT4530_24696C.1
acgatatgctttcctacataatgacagagaggcccgtatcataatcagtgacaagctctctgaagacgagactcaacgtcttctcaccgtgttggagaagcatcgttctattcttggctgctcgcttcaatatcttagggggattaatctcgcgctttgcacccatcgtattcctattgaccccgagagtactccctccagggaacctcaacgacggctcaataatgcaatgcgagaggttgtaaagaaagaggtcttgaaactcctgcgtgccgggattatttatcccgtaccatacagtgagtgggttagcccagtccaggttctgccgaagaagggaggaatgacggtcgttgcaaaaaacaatggaggacggaggatgtgcatcgattacaggaaacttaacaaggctacaaaaaaggatcatttcccgctacccttcattgatgaaatgttggaacggctggcaaaccattccattttatgtttccttgatgggtattctaggtatcatcaaattcctatccatccggaggaccaaagtaagactacgttcacatgtccgtatggtacctatgcataccgtaggatgtccttcggactgtgtaacgctcctgcatctttccaaagatgtatgatgtctattttctcggacatgatcgaagacatcatggaagtcttcatggatgacttctcggtctatggaaagactttcggtcattgtctgcggaatttagacaaagtcttacaatgatgccaagaaaatgacctgtttagatcttacttagtgggagccaaggtgataatttatactgatcatgctgctttgaaatacctgctcactaagagagatgctaaacctctcctcttaagatggattttgcaacttcaagaatttgacttagaaattaaaggtaaaaagggagtagaaaattccgtagcagatcatttgttcaggctacagctcactaacatgcaggaacaaccgataaatgatttcttaagagatgacatgctgacgacggttcgcgactccaacccgtggtttgccaacatagtaaactacatggtatccaagtacataccactaggggaaaatcaacaaaaactgaagtatgaaagtcgccgtcatatatgggatgagccatacctatatcgggtttgctccgatggcttactacgaagatgtgcgccaactgaagaaggacttaagatcatagaacaatgtcatgcctcaccctatggtggccattacggtgcattccgcacccaggccaaaatctggcaaagtggtttcttctagccgacaatgtacgaagtctcaaaagaattcgtcagaagatgcacaagctgccagaggcaaggaggaatcactgctcgcgatgcaatgccccttacgtacaatttgcaagttgagatattcgatgtttgggatatagactttatgggaccttttcctaagtctcgcaactgcaagtacattctggtggcagtcgactatgtctcgatggtcataagtgacggaggttctcatttcattgacaaaaccttccaagacctcctacgagagatgggagccaaacacattgtggccactccttaccatccacagaccagtggtcaagcagaaacatcgaacaaacaaatcaagaatattctgcaaaagacggtcgacaaaatgggaacatgatggaaggaaagattgccagacgcactgtgggcataccagacagcgtacaagacacccgttggaatgtccccatatcagatagtatacgggaaatcatgtcgattacccgtagaacttgagcacaacgcatactgngccatcaggaattggaacatggattttgagggagcagganaatggagaaaaatacagattgctgaatttgatgaatggagggagaaggcttaccacaacgcgaagatatacagagaatggacgaagcgctggcatgacaaaataatcaaaatcaagaaattcaagccaggagacaaagtactgatgttcaactccagggttaagcttttcggccacggaaaactgcgcagcaaatgggaaggaccgttcgacgtcatcgatacctcttcacacggggcaatcacactccgcgacgactcaggtaacatatttaaggtaaa

SEQ ID NO: 19214 - DNA, 160 bp, Oryza sativa
  Clone ID: PAT_MRT4530_24697C.1
tcggtctgacatagaaaaggcacagaactgcccgtttatttatgacgacagacgccgcacaattgacggaaagacaaagacaagcaagttgatcaccatggtagcagaggaactacaggcaagggaatagctagatgaaaaaaagttcactgacaccatt

SEQ ID NO: 19215 - DNA, 1884 bp, Oryza sativa
  Clone ID: PAT_MRT4530_24698C.1
atggcggcggcggcggcggtggcgaagtcggtggaggccggcggcgaaccgggcggtggtggtggtggtgcgtggtccaccgtctcccgctccggccgctcctcctactccgccggtggtggcgtcggcggcgggaaggtgggggagctcgcggaggggttggcgggggtggagatcggcggggaacggaggctggacaagtacgacatccccgtggaggtgagcggcgaggacgtgcccccgcccgcggacgggttcgaggcggccgggctggtggaggccgtgctccggaacgtggcgaggtgcgggtacgagagccccacgcccgtgcagcgctactcgatgccgatcgcgctcgccggcagggacctgatggcgtgcgcgcagacggggtccgggaagacggccgcgttctgcctccccgtcgtgagcggcctcgtcgcggcgggagggagcggaatcggccaccgggagaggtcgtcgttcaaccgcgccgccgcgaagccccgcgcgctcgtgctagcgcccacgagggagctcgccgcgcagtcatttgataatgtgattttcattgacactgttaaccaaaatttctctttgttctgctatgaagaacttgatatgattaatgaggaggccaagaagttctctttccaaactggacttagagttgtggtggcctatggaggaactccaatgtataaccagctccgtgatctagagaggggcgctgatattcttgttgctacacccggtcgccttgtggacatggttgaaagatcaaaagtctcccttgaggcaatcaagtacctggtaatggatgaagccgacaggatgctggatatgggctttgagcctcagataaggaagattgttgaaagaatgaacatgccaaggaagtctgtgagacaaactatgcttttcagtgcaaccttcccaccagagattcagagactggcttcggactttttgtcgaactacatatttatcactgttgggagggtgggttcaagtactgacctaattatgcagaaagttgaactcctctctgacggggagaaacgaggctacctgcttgatcttttacagaggcaatctgtcggtgtggctaacagtaagctgcagcaacctctgacattggtgtttgtggagacaaaacgagaggctgactctctgaggtactggctatacagcaaaggtttccctgcaacagcgatccatggtgacagaacacagcaggaaagggagagcgcactgagatcctttaagactggcctcactcctataatggttgccactgatgtagcctcacggggcctggatgtcccaaatgttgctcatgtgatcaactacgatcttcccaagagcatagaggactacgtccacaggattggaagaactggcagagctgggaaggctgggtcagccacggccttcttcactgagtctgaccactcgctggcgaagggcttactggagctgatgaccgaggcgaaacaggatgttcctgactggctcgtacagtatgcagagaggccgtactatggaggttcaagctacggtggaagaaaccggaggtctggtggcgggggcaacaggtttgccggcagagatttccgccagggcagtggcggcggctactcaggtggtggtggtggcggcggctactcaggtggtggtggtggcggcggctactcaggtggtggtggtggctactcaggtggtggccgtggtggtggctactcacgcggtggccgtggtggctactcaggcggaggcggtggcggtggtggagacccctaccgagcaagtgctccacccccgcggtactacccttcgtacccgatgggcacggccgacatcaacgcctctggctgggactaa

SEQ ID NO: 19216 - DNA, 3864 bp, Oryza sativa
  Clone ID: PAT_MRT4530_24699C.1
atgagtatggcagagaagcagaaggactggaatcaagattgttccatttatcaattactcaagatgtacgttgaggtgggtgtagaggtggtgacagccctcgagatcactaaagtcttccttgtccggatcgaaaacgagtcaattggtgcagcttggtccagattcactaatttagtacagtccggaccaaccctgtccttacctgagtatgtgcttctccaacatttccatacgggtttggataaggagtctgcattctatctggacataaccgctagaggatcattcatgcataaaacgccgtcagaaggaaaaacgatcttggatcgcattctagaaaatacttccttcatgacgcagtccaatgaaccccagctggaggcatccgtgtccaagatagaggaacctctaacgatcgagccatttgctgaaccgtccacttctgctagctcgattgatgagaaggttcctgagcagccatccgtcaagaatgaagaaattcagactccggattgtgccacaattatgttcagggacggttttgacgtagactacggcaataccctgaactattttagcaagaggaaaccacccgttcctttgtcacctcccgatcctatggaactcgggttcctacgagaaactgtccgggagttgacatccataatgagcgacgaatggcaaagggaggcagagctttcatccgaagtaatccggataaataccgctccccgaatcattccttgtcacctagaagggaacgatgtcggtattctctacagtccaactatcggggccaacctcatctctgtgtcctttgcattcgcttatttaagcgataaggcagtgaccccgacaaacaaattcttcaagcatccgaatagaaatattatcgaaggatttgggattgtgcaagatgtgcctgtcttctttgaagacagggaggcgatcttggatttccatgtctttgaaatccaagactttgatatcctaatcgggctgcccattgagcaacttctcatcaacacatcccgattaggtagcctcaaaataacactgggagagaatgaattctcaattccattctcgcgggcaaggatcaccttgaccgaccctctcccagaaactgagtcagcggaagaggttaccgcagttcctcctcatgagtctaccaaggcccttctagaagatgaggtccccgacttcatcaaggaagaagcagatcccagtgagactctcgacctgccaatcatggaaccaccacctcgacctccgctagagcttaaacctctacctccaggcctacgatatgccttcctacacaatgacagagaggctcctgtcataatcagtgacaagctctcggaagacgagactcaacgtcttctcaccgtgttagaaaagcatcgttctattcttggctactcgcttcaggaccttagggggattaatcccgcgctttgcacccatcgtattcctattgacctcgagagtactccctctagggaacctcaacgacggctcaataatgcaatgcgagaggttgtaaagaaagaggtcttgaaactcctgcatgccgggattatctatcccgtaccatacagtgagtgggttagcaaagttcaggttatgccaaagaagggaggaatgacggtcgttgcaaattctcaaaatgaactaattccgcaacgaaccgtaaccggatggaggatgtgtatcgattacaggaaactcaacaaggctacaaaaaaggatcatttcctgctacccttcaatgatgaaatgttggaatggctggcaaatcattccttcttctgtttcctcgatgggtattccggatatcatcaaattcccatccatccggaggaccatactaagactacgttcacacgtccatatggcatttatgcgtatcgtaggatgtccttgggactgtgcaacgctcctgcatctttccaaaggtgtatgatgtctattttctcggatttgatcgaagatatcatggaagtcttcatggatgacttcttagtttatggaaagactttcggtcattgtctgcagaatctagacaaagtcttacaacgatgccaagaaaatgacctctttagatcttacttagtaggagccaaggtgataattgatactgatcatgctgctttgaaatacctgctcaccaagaaagatgctaaacctcgtctcttaagatggattttgctgctccaagaatttgacttagaaattaaagataaaaagggagtagaaaattccatagcagatcatttgtccaggctgcagatcactaacatggaggaacagccgatcaatgatttcttaagagatgatatgctgatgacggttcgcgactccaacccgtggtatgccaacatagtgaactacatggtatccaagtacataccaccaggggaaaatcaatgaaaactgaagtatgaaagtcgccgtcacatatgggatgagccatacctatatcgggtctgctccaatggcctactacgaagatgtgtgccaactaaagaaggactggagatcatagaacgatgccatgcctcaccttatggtggtcattacggtgcattccgcacccaggccaagatttggcaaagtggtttcttctagccaacaatgtacgaagactcaaaagaattcgtcagaagatgcaccagctgccagaggcaaggaggaatcactgctcgcgatgcaatgcccctcacatacaatctgcaagtcgagatattcgatgtttggggtatagacttcatgtggcctttccctaagtctcgcaactgcgagtacattctggtggcagtcgactatgtctcaatggtcataagtgacggaggttctcacttcattgacaaaacctttcgagacctcctacaagaaatgagagccaaacacaatgtggccactccttaccatccacagaccagtggacaagcagaaacatcaaacaaacaaatcaagaatattctgcaaaagacgatcaataaaatgggaacaggatggaaggatagattgccggacgcactgtgagcatactggacagcatacaagacacccattggaatgtccccatatcagatagtttacgggaagccatgccgactacccgtaaaacttgagcgcagagcatactgggccattaggaattggaacatggattttaagcgagctggagaatggagaaaaatgcagatcgctgaacttgaggaatggagagaaaaggcttaccacaacgcaaagatatacaaagaaaggacgaagcgcaggcatgacaaaaggataaagatgaagaaatttaagccaggagacaatgtactaatgttcaactccagggttaagctttttggccacggaaaactgcgcagcaaatgggaaggaccgttcgacgtcatcgacacctctttgcatggggcaatcacacttcgcgacgaataaggtaacatatttaaggcacgatgtcttttccaagatgacgggaaggccgcaccgcctcccgccgagcgctatgtgggcgccctcttcaccaaggcaggggatgaggtgctccacaagtataccacacccaccgctactccatccaccccaaaaggggagcgtttctgcattcagggagtgtgaactcccggcggtgggtatggcaaaggtttactccggcctttgatggcatcggagaaggagagggcagcggaatcccgtagccttccacctaagaaggtgaagtatcgtttgacgccccccacttgctatgaataatgtggcacattggtgtttaccccaatgtttgccaaagtttgttttttgtttaataaaattcaggttttgaataagtgtgggggcgat

SEQ ID NO: 19217 - DNA, 1698 bp, Oryza sativa
  Clone ID: PAT_MRT4530_2469C.1
atgggccgcgccgcggcgcgccttcccgggtgcctctacctctgcctctgggcgccggcggcggccatcgccggcggcgtccagcccaaccatctgttctgcttggacgcgtggatcggcggcggtggcggcgtcggcgccggcggaggcggtggtgaccgcgcgctggagctgttcgaggcgtacaggggggcgctctgcgccgccgtgagcgggtgcgtgccgggttgggcgtacaaggagggcgccgcgtgcatggagctgacggagcacgacctggcggcgtcggcgtcgctgcaggtgcagcagcagttctaccacgaaaccggcaccaagatggcggtgttcatgggatgcgacagcggggagatcgaggtcgggctgtcggccgcctcggcgacggcgacggcggcggtggtgggtgagatgcagcagtcgatactggaggagctcctccagatgccgccgccgccgccgtcgccctcgtcgtcctcgctgctgtcgctgtccgtcgggagcccggaatactcctcgctcgttcgctcgatggcgacgtcggtcggtgcgtccgccgccgcggatccgtccccggtgcacggcggcctgctcgcgcctgtctacggcgagttcccgggctccgacgacgacgccgcgatggcgcaggcgatgctcgcggtcatctccacccccgcgcctccgcctccgctgtggcgtccgccccggcgccgcgcgcgctccagctcgtcgccgcgcagggcgacggcgttcaaggcgtacaacgccgcgctctcgccgagggcgcggccgcggccgggcgcgccggggcagaggatgatcaagacgggcatctcgctcctcgccagcgtgcacatgcaaacgcgcagccgagagctcgccgcggcgcgccaaagagacactcacgccgcgccgccgccgccgccaccgccgccaccgcccagcagcagccagcttcaccacatgatctcggagcgccgccggcgagaacggatcaacgacagcttccagacgctcagggcattgctccctctccctcccgattcaaagaaagacaaggcggctattctcgccagcacgacggagtacatggacaagctgatatcgcaggtgtccgagctgggggagaagaaccggcagctggaggcgcagctcgccgcgcgttccggcgaggcccagtggccggctgcaagcggcggcggtggcggtgagtcgtcgtcggagagagtgcaggtcgacgttgtcatcgccggctcgtcggcgtcgaccgatcagcctcgggaggtgagcatcagggtgacggtgcgcgctgagtgcgacgtgtcggagctcgtcgtcgccgtgctcgcgcggctgagagagatgggtcgcttcgccgtggtgtccgtcgacgcggggcgaaggagcagctcgtttgcacaagccagccttacgttccgtgtcatgaattacaaatacaaaacaaattcagtcaccgtggggaaatctcagctaattgtccatactgaaaagtacaaggccggcgacgtctgcgacgagacatcgctgaaggaagccgtggcgaaggccgtggacggcgcggctttcttcaagtttcagagaactccttttatgcattcaaaaaactatgaccagtctgatgatcttgagggggaagctaagttgctaccgcttgattcttga

SEQ ID NO: 19218 - DNA, 195 bp, Oryza sativa
  Clone ID: PAT_MRT4530_246C.1
cggacgcgtgcgctgacgcttgggtctttttgttcactatccacacgctgctgaatctatcagcacttcctgaaaagatcaactaccgactgccgtgtgctcataacacacactgtatctgcacactctacatcaccatacatacatctgaccattatagaaacttatccttttcacaaattcctataacaccta

SEQ ID NO: 19219 - DNA, 675 bp, Oryza sativa
  Clone ID: PAT_MRT4530_24700C.1
aaattatgtagcagatcatttgtccagattgcacatcactaacatgcaggaacaaccgataaatgatctcttgagagatgacatgctgatgacggttcgcgactccaacacgtgatatgctaacatagtaaactacatggtatccaagtgcataccaccaggggaaaatcaacgaaaactgaagtatgaaagtcaccgtcatatatgggatgagccctacctatatcgggtatgctccgatggcttactacgaagatgtgtgccaactgatgaaggacttaagattatagaacgatgccacgcctcaccctatggaggccattacgtgcattccgcacccaggccaaaatctggcaaagtggtttcttctggccgacaatgtacgaagactcaaaagaattcatcagaagatgcacaagctgccagaggcaaggaggaatcactgctcgcgatgcaatgccccttacatacaatttgcaagttgagatattcgatgtttggggtatagacttcatgggacctttccctaagtctcgtaactgcgagtacattctggtggcagtcgactatgtctcaatggtcataagcgaccgaggttttcacttcattgacaaaaccttcagagacctcctacgagaaatggaagccaaacacaacgtggccactccttaccat

SEQ ID NO: 19220 - DNA, 348 bp, Oryza sativa
  Clone ID: PAT_MRT4530_24701C.1
ctcacatcacgcaaccctactctcccaacaccggaccgccgcccctcgccgattcgctccgccgcctccgccatcccgcgccgccgttgcacccccatcccgcgccgccctcgccgatctcttcccttgcctccgcgccgtcggtctgcatcctccgcgcgccgatctcctccctcgcctcctcgcaccgatctcctccctcgctgccgcgctgaagaaaaggagctgcatcgccggtcgcctctcctcctcaagaccacgaagcgccggttccacaccgccgttcttcttcgctttctccgccaccgccgccagggagaagactccgccctccggcatggcgccatc

SEQ ID NO: 19221 - DNA, 252 bp, Oryza sativa
  Clone ID: PAT_MRT4530_24702C.1
ttagtggaagaggttaccgcagttcctcctcatgagtctcccgaggcccttctggaagatgaggtccccgatttcatcaaggaagaagcagatcccggtgagactctcgacctggtgcttaattgggaaaagtgacacttcatggtctgtaaagggatagttcttgggcatcgagtgtccgaacgaggaatcgaagttgatcgtactaaaatcgatgttatagatcagcttcctcctccctatggaggccat

SEQ ID NO: 19222 - DNA, 453 bp, Oryza sativa
  Clone ID: PAT_MRT4530_24703C.1
aaaatagaaaaaaatatcaatagggactaattaaaccaattgtagaaaaagttataatttcaagaaccaattaagaaaacccattaccataaccattatttttaagtgattaaatattaatgaccttccctataagctactccatacgtcacattaaggagtataacatagcagtatgggtttcttcatatattattccatatacaatcatatagttgattttgaaagttatattattgcatatacagggaataccatctgtctgtattgagatcacatgcagtcactactatgactgcaagttagtgactgcatggtatctcatccatccattttccaaatcaagggtacatatcaaagtgctacaacaccattgctataggtatgtacagtattatttttttctgtgcgaacagtgctccgagaatctcagccattggatataacttggat

SEQ ID NO: 19223 - DNA, 210 bp, Oryza sativa
  Clone ID: PAT_MRT4530_24704C.1
atgatgaaggctaacccactaactcacaccgaaccaagagcggcgcagacaactaaaaataactcaacatggctcaccaaaaccgagagcatgcgcgacgaacgcgtacacgcgtcggtcagacagaaccgacgcctaactataaagcaaattcaaccgcttctcccttcaaaacccatgggtcgattaataccggaaagacgaacatga

SEQ ID NO: 19224 - DNA, 1542 bp, Oryza sativa
  Clone ID: PAT_MRT4530_24705C.1
ggtatatacaccaattctgaaaagtcattaaggcacaatgtatgcagacagaaggtctgcttgacagaatctatctttctgaagaaagaaaaaaaaagatcatgagaaaagggcaaagactgactgcaaatgtgcatttttatcccactatattcacaacatccaggctagattttttttcttatctgttccccctctaatcctatgtttttatgtgacaaaaggaactacaagaacaaacaaacacgacccagctaaagaataaagcactgccaaatgctaccgccaagttagccctggagaactagccttggcccgagcatcagccaacgaaagagccatggccagcatcatctgttcttcgaaactatcaggaatactgccagcaccagtgtcggatccacctgaattggcagctccagcctctgttgtaagatcagagccggtaaagctgctactggcctcggccatctctgaccaccgctcattagaatactccataccctcccttgtttggtgcattttgttgctcgatggttcctcagacctagcgcctgaggaaccactcccgtttatgctcagatcctctgtaaaagatctgtctgacctgctgagaatgtcacatcttgacgtgtggcaagtagcggtgctagaagcttctccatacatctgctgttgctcggctaaagctgcgactgcacaagcaaatgcactactggaagaagctgcttcagctggaattgtcatggaaccttcaaagcttctcggaggatgtactgatgagactgtgttaccacaggttggatttcccgaggcttcctgatcctgcagagaaagccaaagtgcttcaacaagcataacttcgtcaggatccatgtcaaaattattattccgcatctgctttaagcgttcagaagtcttcagcagtaactccgcatgctgcacttgagatgagagcatatcactgccttgcccactgcttttgactgtggtggatgcgccaccagtatcacaatgttctacttgtgcagttgttaccacatcggtcaaagcagcagcctgcttcttcttcatccgctcagcatcgtcctggagctcctgctgccgcatccggatctgcgcctcgatcaccctctgctcctcaatctgctcagtgcccttttcctccttcgtcttgacaccgcggtactcaaccgcgtaactcgccattttgcagtaagggcaccaacccaatccaccgcagccgacgaagaagaagacgacatgagcagcaagtaacacgaactcacccgtgcagattcccttggcgcagcacttggaccggttgaggctggggtagaacaggaagcagatgggacactcctcgaggtcggcgcgggggtcgtcggagccggggaagcagggggcgagcttggcctcgacgatgaggcggcgcagcttcttgaggtcgatgtccgggtgcgggtacagcccctgcggcctcgtgtacctctcctccaccgccggcctccgcctcctcctccctcccacctgattccccat

SEQ ID NO: 19225 - DNA, 378 bp, Oryza sativa
  Clone ID: PAT_MRT4530_24706C.1
aaaattaaaaaaaatttaaaagggccaaaagaaatgtaaactggttcaagcaggtaaatccgaaccaacaattgggatacgaaaatacaggcattaacgacacggaaaaaaaaaggcttgaattttaattagaagactctaaaaaggtaaaaaatgatacactcttaaaatttaaaaaaaaaacggtggaattatcaaaaaaattaaaaactggggaaaaaaaggggcacgtcgactcccttttactgtggtgaaaaccgagagcgaaaaacaaacggaaaaaatgccaaaccctctaaaaaaatttaactgcccaccggcctgttggggggaataaatattttccccattaaaagtaagattttttttgcacataaa

SEQ ID NO: 19226 - DNA, 2051 bp, Oryza sativa
  Clone ID: PAT_MRT4530_24707C.1
cctgccgcctgcggcgacccccccggcggcgcccctctccccctcccctccgctctccgccgacgtcgtccccgggccgagcgcggtcggcgacagggggcgccggccgccccggccggcggcccggtctcctcccacggccggcggtcctcctcttcgccccgaccggccgcccgcctcccctggccggcaccctccgggctcctcgtcgccttcctggggctttcggcaccgggtcgggcggctcgccggcggcgtggttgagtggcctcggcggcggaaggctcctcttctcccccgctgcttgttctcgcttccgccgccatcttgtgctgccgctctcgttctctactcacaaatttcgttcagtccatctccgtcaccatcgctatccacttctgctaccgccgccatcgccatccgcttccgccaccgctgcagtcgctcggtcacatccaccggcgccgccatcaccatccacttccaccaccgccggtattactcgtatccgcttctgctaccggagccattgctccgccacatcaacccacctccgccgccatcgccatcggcttccgccaccgctactgtcgctcggccacatccaccggtgccgccatcactttccacttccaccgccaccggtattactcgtccagatgcttggcagctgctctgatccacctccaactccacaagcagctgtgaaaacttctttttattatcagtgagaagccaaacatatatttttatagggtgagagaggagagagacccgatcaagattccgagacggagccagcaagcgctgcgataatggcgacggcggagaaaaagaggcctcggagcagaagcggcggcggcggcggcggcggcgtggagaagaggccgagcaggaagcagatattggggagaaagaaggctgttgaagaacttatcaggaaagctgtagccgtgaaggatcatctagcgcaatttcctgattttcataagtatcagagaaatggtcttttggtctacttggagtctggacatggaaatcaacttccattatcaacaaggaagtacatccaaaatcttctcaaggttaacatggagggacaatatgggccagaatggccttcagaagagaaaattaagcgccgggaaatggttgccccagaagcacgatatatctttgtccggcaatcttcaaatgccattaccacccaaaatattatgaagcaagattccgggctagaatttacacatgaagcatgtaatgaagatcgcttgattggttttgtacactacagatttgttttggaagaagatgttcctgttgtttatgtctatgagttacagatggtgccttctgcacaggggaaggggctgggaaaatttctaatggaattgattgaacttatagcttgtaagcatgaaggatcagctgattttgatggcgtgtacatgcagagccaaatgggagcagtgatgctaactgttcagaaagctaacaaccttgctatggctttctacaagaagttgagtgactgctggttgaaacatttcaatgtaactcttatcctgcagatatgtaatatccagtacttcgccatcacgagtagatccactggtaggatggcagatggcaaattcgcaggcacgcatagatacgaccccgagagctcaagccgctcaaggcgcgttgtcgcgcttcttccgcggggctctcttcccccttgtgacgatgatcgcgtcgccgctccaggtctccacctcctcctccggctccggctgcggctcctcctcttttgcacatccgcgcctgagcaggagacgcttgcgcggcggcaggtggtgctcgtccccgacgccggcgtcggcgcggtgctccgtgcggcgcagcccgcagctcgcgcatatgcgccgcctcatcttgatgggatacttgcgctgtttctccgtgaacgcgccgtcctcctcgccaccggcgaacgtcgtgcacacaggggtcaaaggaagcgagagcgacctattgctcgtgctcaacatcgtcccgctccactgtag

SEQ ID NO: 19227 - DNA, 428 bp, Oryza sativa
  Clone ID: PAT_MRT4530_24708C.1
gtgttaaaaaaggcccttttaaaatttggcaaaaaataaaaaaaaattttataaattggaaaaaaaaagggccataataatatggaaactaacaaaaggggcggtggggtttctttttaatggggaaaaaaaaaaccaaaggtgccaaataaataaatccaactcacaaaaaaaggtaaccaagaggaccctttaaaaacttcccgcgaggattatgtgtgaaccattgagaggaaaaacaaaaaattgcgcgccaacaactaagggggggggagggggaatttaaaaaaaaaagtggggggaaggcccccccggatttttaaatggatgtccaaccacgtaaccataaaccgtgagctggggaaaataattgcctttgccaccaaaaagacaaggttagaagaactttttaccggattcccaaaccc

SEQ ID NO: 19228 - DNA, 160 bp, Oryza sativa
  Clone ID: PAT_MRT4530_24709C.1
acatcgcgcgcctcccggcggtgcgccccgccgtcacggcgcgcgtcgacctcgtggcgctgccgatcccgcgcgtcgacatgcctccccgacggcgccgagtgcaccaacgatgtacccctccggcaagttcgacctcctctggaaggccttcgacgcc

SEQ ID NO: 19229 - DNA, 798 bp, Oryza sativa
  Clone ID: PAT_MRT4530_2470C.1
ctttcttccaatggatctgatggaaacagtgaaaagtggaataacgatgaagctttctttgcttggaaagatgatccaacaaactatgagaatcaactcgaggagttgaaggctgaaagagtatccaagtggctctcgcgtctcgctgaaagccctgatgtgaaagctttgccaaatggtctttcaattgttcttaacaagatgaatccttcaaagagggagcaggttattgatggtctcaggcagcttctgggttgaccaatgtgaattttgatatccagcatgaaccaaacagaatcatactcaaacgctaacactgaagtttaattgggctatcattgatgcaatggaagaggttttttgcacataaaatgggaggttttgagatggcatctcaagaaccatatacatacaaggatatgattgggcctctgccctactggatgtttggtgtgagttcttgcaaagagcagaataaagagcaatgcaaagattagtcaggcacggaatgttgttccatttgtagtgatgtatttagatgttttttactagcattttttttcttggcctgcctcatgccaatgtcatatagatacgatggaattcttgatcaagtaattgtttatttattttccaatccaaataatacatagcaatcctcatcttctagtgttctattctcgtgccgattgtgttgctgttacagatggttgcgacgtttggcatgaataaaccagctcatttgagcctcaaactttgaaactgagttggtacttaagtttacgtatgagtgtattt

SEQ ID NO: 19230 - DNA, 514 bp, Oryza sativa
  unsure (1)..(514): unsure at all n locations
  Clone ID: PAT_MRT4530_24710C.1
ggacaaaaattaaaccggaaaattttaagggacaggcctaatcaaaacacacaagccacccacattaaaaaacaaaacccgggggtaaattttttcctaaaggggctaaacataaaaaacggggggggggattttttaaaaggaaaaaggaaagggggagggatattaattttgcagctttaaccacattaaaacaggggggataaaacatctttatgtcccaaccccctccccaaaacccattttaagctactttttgggggccccccaaaaccggtttttaaccaccctggggggtggggggggcacccccttaagctttttttgggctactctttttggcaaaattcggggctttgatcggcaaaggctcaacgtcatcaggaggatcatagttggggccagctaaaaacgggagcgccgccaccacgtcgttgatcaaaggccggttgctcccctttttttgcaagcacatnaataaaattgccagggccgggaacacccctttaagggg

SEQ ID NO: 19231 - DNA, 521 bp, Oryza sativa
  Clone ID: PAT_MRT4530_24711C.1
ttttttttttttttttcattataatctggcaatgagcaggatatgactatagaggttgctgtaggagcggaactgggaaaaaaatgtctgaagagcattggctttcctaatggatcgttaacacatctctcctgctcacccacgtctctgataattccagtacaaaggtgataattacacaatgtaaatacatcgccatagccagcccactctccaggcaacaccagcttcccagagctgcagattacgatgcggcaatgccatggctctgattgcacaactgcttaaagccagagtcagactctgcatagggtaccacctagacatgcagggggagaaaaaagggaaaacaaatcaagaagccctctagtttctttacctgcacatacctgctacctgttgtgctatcttctgcacaatgcaatgcaatagattagtagtatattatattatgcaggaggctctctaccaaaatgaagagggaaaagtgggcagccagaaagtatcagcatgggctcaag

SEQ ID NO: 19232 - DNA, 1946 bp, Oryza sativa
  Clone ID: PAT_MRT4530_24712C.1
cttcttcccaagtaaaaccccaagaagcggctattacttctctcccctgttcttcttcctccacattcccatttcctaaaaaaaaaatccccaaatctccacatgattcctccgtaattcggcgcgccctctcatggcgtccctcgccgaattccccctcccggtgatctctccgacttgctggagctatcggtagcgggaggaatcaatcaatcaatcccccacgctgggtggttcttgagcaagaacggctcgtcgccgtgccgatcgatcacgtcggccgccggggaaatcctctggggatttgtgggtggttttgggctaaagattccgtttctttcgagcccttttggtctcgggtggatccgcttagctttggttcttttgctggttggggggcatggcggcggagtcgtcggctgctgctgctgcgggcgggggcgagaggaggggcccgatggatctgaacctgtatctcggcctccctccgctgccgccgcctccgggaaggctggatgtcgccgccgattacccgtcgctgctgctgaactccgccgccacggtggcgaacgagcaaaggggctcggtggtggtggcggcaccgcctccggcggcggcggcgtactcgccgtcgaacgcgctgtcagcgccggagcaggtgctggtagatcctgttgcagcgtggcttgttgatcccggtgagcagcagccggtgccgccgctcgagacgccatcgtacatggccagggcctcgtcgacgctgccacagatttttgcttgtgcagcgttggaaatgcttgtgcagaccggtggagcaatcccacctactggtcttataaggggagcagagattgctgctgcaagccgccctatgacgccggagaatcggctgcggaggttgatccaggtgagcgatcaacacggcgtcgggaatgggagggcggggactgggccagtgagccgcagccgacgggcgaatagcccggaagccgataatctggcgcgggccatccagaggtctcataattctcttgaggcatcaaggaggcagatgcttgatggtgatggcagtgatgccaccaagaaggatgacggttgcggatgcaacggcagcttcgaatgcaatatctgctttgaatcagctaaagatcctgtggttaccccttgtggccacctcttctgctggccttgcatataccagtggcttcatggacattcagagcactctgattgccctgtctgcaagggcgaggtgctcgaagtaaacgtcacaccgatttatggaagaggaggtggcgaggagaactcctccagaaatgatatccaaatccctcccaggccgagtgcgcagaggaccgagagcttgaggcagcagctgcaaaggccagacacaagaggaggcattgcaaacatggtgaggcggttgatgcaaaaccaagatatagtggtaggccaggcggcttcatctgcaccccggccaaggggtaggggtcgaaggcaggcaaaacaagatgcgccttctgcaccagcaacacagcagcaggtggtcaatgctgatgctgggagtggcaatcaggctcctttgccacctcctgatgctaatggtgctgcaccggctgctgctgtcgctccccaacagtcatcatctgtggagcaagcgtcgacttctagcaccgtgggtgttatagcgggagggccagcacaaggtaggaggtcaagagtttctgaatccacccctgcaaggaggacaaggaggaggcatcagtaggtaacttagagttgttactgtaatagaacatatacaccatgtttccttgtaaccttgatcatatttaggctcatcccaaaattatgtagaattgtggatgaaatcttttcttttatttaccttgtatccaccattttaccttaggcaaaggaataaagatttcgatttcaatatattt

SEQ ID NO: 19233 - DNA, 602 bp, Oryza sativa
  Clone ID: PAT_MRT4530_24713C.1
atggcggcgacgcgacaggacgcagcgaggaggaccagcgcggcggcggtgcggcaagggcacggcgaggaggactgcagcaaggacgcgacaggacgcagcgaggaccaggacggcggcggcgcggcaggacgcggcgaggaggtctacggcggcggcggtccccgacggtggctcgatggctgtcctcgacggtggctatggctcggcggcggtcccttgctgcggcggcgcagcgaggaagaccatggcggcgacgcgataggacgcggcgaggaggactagggcggcgatggcgtggcaggatgcagcgaggaggaccacggcggtggtggcgcggcagggcgaggtgaggaggtccacggcggcggtggcacggcagggtgcggcgaggatgtccacggcggcgcggctattgcaggatgtggcgcgggggccgtagacgccggcgaggagaggtccgtaggcgccggcgaggagggggaggagaggcctgcagccgcagttgctgaggtccgtggaggaggaagctatagtcctagctggtgttgcaactctgatgttgaaattttcccttttgtttgatttgatttgaagacttt

SEQ ID NO: 19234 - DNA, 861 bp, Oryza sativa
  Clone ID: PAT_MRT4530_24714C.1
atggcgaccaccgcgctggccgacaggtcggcgtcgggtgggccgcgcgtcgcgttcacgtccggcgtgtggtgcgacgccgtcgtcggcaggtacaaggccgaggccaccaccgtcgatttcaagaacaagaacaccaagaagaagccgttctaccgcctcgacgccggcgtacatgtcgtcgagcaactccaaagtccaaacagtacgtcgccgtgcatgacgggttcaaggtgctcaagctccactacagcgcgccgaatctccgtaacaagcgcaagcgcggccgcggcggccgacgacctcacgcagtacgccatgcttggccaaattatggtctctaatctttgtgagcagctgtatggaggccatggcgatttgccagagcagcatggcactatcgaggtaacagtggctgttacaagtcttcaaatcaaatcaaacaaaagggaaaatttcaacatcagagttgcaacaccagctaggactatagcttcctcctccacggacctcagcaactgcggctgcaggcctctcctccccctcctcgccggcgcctacggacctctcctcgccggcgtctacggcccccgcgccacatcctgcaatagccgcgccgccgtggacatcctcgccgcaccctgccgtgccaccgccgccgtggacctcctcacctcgccctgccgcgccaccaccgccgtggacctcctcgccgcgtcctgcctcgtcaccgccgtggtcctcctcgctgcatcctgccacgccatcgccgccctagtcctcctcgccgcgtcctatcgcgtcgccgccatggtcttcctcgctgcgccgccgcagcaagggaccgccgccgagccatag

SEQ ID NO: 19235 - DNA, 732 bp, Oryza sativa
  Clone ID: PAT_MRT4530_24715C.1
atggactgcgcagtggtccagatcgtgatgcaggtggtcctgaggaggagcatctgcaggctgcaggaagtcttccgcgtggcggtggagctcggcgcggcgatcctcgcggcggtgcggttgtccggcatggcttcccaccggccgacgacgccgacgtcttcgccggcggccgcatcaaggacgacgacgacgacgtactactactcgccggtggtggcctccatgatcggcatgactacagcttcctccttcacggacctcagcgactgcggctgcaggcctcttctccccctcctcgccggcgtctacggcccccgcgccacatcctgcaatagccgcgccgccgtggacatcctcaccgcaccctgccgtgccaccgccgccatggacctcctcaccgcgccctgctgcggcgccaccgccgtggtcctcctcgctgcatcctgccacgccctcgccgcgtcctatcgcgtcgccgccatggtcttcctcgctgcgccgccgcagcaagggaccgccgccgagccatagccaccgtcgaggaccgccatcgagccaccgtcggggaccgccgccgccgtgaacctcctcgccgcgtcctgccgcgccgccgccgtcctggtcctcgccgtgtcctgtcgcgtccttgctgcggtcctcctcgccgtgcccttgccgcatcgccgccgcgctggtcttcctcgccgcatcctgtcgcgtcgccgccat

SEQ ID NO: 19236 - DNA, 1114 bp, Oryza sativa
  Clone ID: PAT_MRT4530_24716C.1
cctaccgccggccgggccttcgccgccgcctctctcccgcaccaagctgcctgagccctagccgccgccgccgccgccgcgcgccaccaccgcaaccatggccgccgcgctcacccgcccgcctccaggcacggtccagtgcttcgggcgcaagaagacggcggtggccgtctcctactgcaagccggggcgcgggctgatcaaggtgaacggcgtcccgatcgagctgatcaggccggagatgctccgcctcaaggcgttcgagcccatcctgctcgcggggcgctcgcgcttcaaggacatcgacatgaggatccgcgtccgcggcggtgggaagacgtcgcagatctacgcgatccgccaggccatcgccaaggccctcgtcgcctactaccagaagtacgtcgacgaggcatccaagaaggaggtcaaggacatctttgcccgctacgaccgcaccctcctcgtcgccgaccccaggcgctgcgagcccaagaagttcggtggtcgcggcgcccgcgcaaggttccagaagtcgtaccgctgagcgctcgccggatcgattcggagcggtgttctcttttccaccctatcaatggagctacttggcttgttctacatctatctagctactgctttactttcaagtttagtcttttaaaacttagccctgaaccttgcctttttgacattgtgaaatggatgtgattgaaatgtttaagactctactctagtctctggaatatggttttgcctgttacctatgtccagggaagttgtgatactattgccttaattaatgtttatgctatgttatggttttgttatgagttttaaaaaaaaaaaaaaaaaaaaaaaataagatacaggaaaaacaaacaaaacagccgacacgggctcggtggtggatcggctagcgcggggcgcactctttgacttgcctcccggtctgtctttgtggagccgtgcggcgactgggcggtggcgctccgtctgcctcgtccgcgttgtgccgcagcgggccggcgacgggcccgcccggggggcgcgttgccggcggggcgggggtcgccgggtggcctgtggtgccaccggtttgcagttgtaacgcatt

SEQ ID NO: 19237 - DNA, 375 bp, Oryza sativa
  unsure (1)..(375): unsure at all n locations
  Clone ID: PAT_MRT4530_24717C.1
gcttttgcccaacctcgagacatacatgcagcttttagagccggaattacaacttgataagcagaaaaatgagatgaaaagaaaggaagcatggcgtgtttatggtgccctgctgtgtgctgcaggaaaatgcttatatgatcggctcaagttgtttcctaatttgctttctccatcaacacggcctcttttgaggagtaataagagagtcgtgactaacaacccanataaacggaagtctagtacagatctctccacatcccagccacctctgaagaagatgacaacagatggtgcgatgaattctatgacttcagctcccatgccaggaacccatggatggcttctccacccaattaccaaccctagcatgac

SEQ ID NO: 19238 - DNA, 322 bp, Oryza sativa
  unsure (1)..(322): unsure at all n locations
  Clone ID: PAT_MRT4530_24718C.1
gttagcgccatttacagaggattgctcgggttctataggtgaggctggaggcgcagcttcaccgtggacgcgtgatggcgccatggcctgcagagctgatggtacattgccagcttgcgcgccgccaggcaaggaggctgctttcgtgatagcatcgccagcactgcgccgagcccggctgtccctggctactggactgggctcaccacgaatccttgggccgtatcctgtcgatgcngcgcgttgaggaagataacctgctgatctgcatcgaccggaaggccaccttcaagagcagcgacgacgccggcagcgccaacta

SEQ ID NO: 19239 - DNA, 537 bp, Oryza sativa
  Clone ID: PAT_MRT4530_24719C.1
aaatttgaaggttgctagctctagcgagcttgctctgccttggaagctaggccactaatacgtagaacgtagcaatggcacaaatgctagacggcctaaggcatgatgagcaagcatcgctgcatgctccacaggaggccagcaccatgccgacgatgtcgtgctctgatctcctgctcgccatgatgtgccctcttatcctcctgctcatcatcttccgttgctatgcctacgcaacaaggtccggcgggatgctcagcagggtcccctcgccgccgggaaggcttccggtgattggccacatgcacctcatcagctctctcccgcacaaatcactccgcgaccttgcaactaagcatggtcctgatctgatgctcctccacctcggcgcggtgccaaccctagtggtttcgtcggctcgtacagcacaggccatcctacgcactcatgaccgtgtgtttgcgtcacggccctacaatactatagccgacatcctcttgtatggcgcaacagatgtggcattctcaccatatggtg

SEQ ID NO: 19240 - DNA, 460 bp, Oryza sativa
  Clone ID: PAT_MRT4530_2471C.1
ccgggatccacaaggctcgatgggcacctttacggcgggtggtgtcactgtcaatgcgaatccagcgtaaatcgggaaattcttgggttagggcttcggttactttttgggtgccactgccaaaaaatttcagatagggggaagaacattccggacacactttgggctggatttccgcatggttacagtaatggcaccgcaggagaggttggccattgccctggacgtagtgataggaaagggaaacgtcacagttgggacattccaacacataaccgcaactgcgacaggagacaaaggtgctatggccccggcggttaataaacaaaataccttgctgttgtttggctttgagttcccccagggcagtttgtaaagcccgactaaaaatggagcgattgccctgttttaatttccgccgcatatcgacaattttgcaccgggggtaggggggcggact

SEQ ID NO: 19241 - DNA, 438 bp, Oryza sativa
  Clone ID: PAT_MRT4530_24720C.1
cgtctttttttttttttttttaaaccactattatagggttggttttttttccaaaacaccttactcataaattttgcgctcaaattttcttacaataacatccccccacactgggatgtacttagtacactaagtacacccgaaatgacacgtttttttgaatcattacaaaattactttaattgtctagcattcctgttacataacaacatttaattcaacttcaggaccgtcaaagaagtcctcggcgagatggttaatgtccacccgtgctttctttctttgccgagcacactttgtcttacacatccccatactcttcaatggctgacccgagcctaaaagcttaagaactttccctatcgtgtttcctcttttagccggcaattgtccttggaacaggtgttttctgtgtgaactttctataccctcaaaccc

SEQ ID NO: 19242 - DNA, 412 bp, Oryza sativa
  Clone ID: PAT_MRT4530_24721C.1
acctcgaggcggcggtatgcctctgcacggccatcagaggcaacatcctcggcatcaacctcaacctccccgtcgacctcagcctcatcctcaactactgcggcaagcgcgtgcccaccggcttcaaatgctaagcatcgataggcggcggcgctactgcgcatttgttccgctggctattttatctggactgtttgattgctactacgtgctagcttagcttgcaacatttgcgcgcatgcatggatcgatcgacaaatatgcatgcgtgcacctgcaaattaagcatgcacacgtaccatggagctactcgattttccgtgtttttattcgtttcatgtgtgggtccttgtatgatctgttgattatttcttttgcattatgaataaaataaatttcacactttgtttgg

SEQ ID NO: 19243 - DNA, 1692 bp, Oryza sativa
  Clone ID: PAT_MRT4530_24722C.1
atggcgcctggcgcagcgggagcggaggaggcttcggggtccgtgaagacccggtcgagcgcaaggcgacgccgcagtgtcaaccgggacggcggcagcggggtggtggcctcgctcgcatcccaatcggcggcgcgcgcggagcgatccgagaggcgatcagctaaaaggtcagcaactctggccgatcagagcagcgagggtgaaagggcagcgaagaagatggatttgggggtgcatgaggaggaggagggggtgaaggtggcgccgccttcagcgtctgcgtcagtagcggaggagcaacaagggggaaagggcggcgaagacgatggatttgggggttcagcaggaggaggagaaggtggcgcactggcgctgccttcagcgtcaggagtggaggaggggattccagtggaggacgaggcctcttcttgctgcagttctcctctccgtaagccatacataccccgtgttgtaattggacacaatgccatgggtagagagatctataagcctatcggaggtgaagacttcagggcacttgatccgtgggaagccaaataccaggcaaaaagagattgtcaaatgaaactgcccactttactcccatgcgtacctgacacatgccttactgatcggaacctcctccacattcgtgaatcatcgactaagactgttcttcatgctgcaaagtttgttgtgggtctttcgtctactatagatggcaagtcattatctaagagttctggtttcatgatcgattgggatgagaagagcaaaacaggcactattttgacatcagcccttcttatttgcaaacagtccccttctttagatgattggaaaagtgcaaaccagtatgcttctaatgctaaggttgcagttcgctttgtggatggtaccactgtggagggtcattttctatattgtcaggagcattacaaccttgctttctacaagattgtagtggacagatccatccatttaccctcctttaatgaaggagtgaaatgggctgaagaggtctttatcctgggaagagatgaaaattcgtatctgagaacaagctatggtagggttcagtatttgaatccacatatgaatgaacgccgtcactatgtatacattgatggtttcagtgcacctcctgagtattacaacgggggaccagtcattgacttaaggggagatgttgtgggcatgtctatccgcagtacaagagggtcttttattccttctaacatcatcctcaagtgcttgcagatgtggaggaagttccattggagaagatacaacctaaaaaatactgacgtagctgcagtggttgtcccagccccaggcgtcaaccacctcgccgccgacatcgaggccatcatccgcggggagatgtcccaccttcacgccgacatcgaggccatcaagggcagcatcgggtgggggaggaaggaggctagcgtggggggcggggaggccggactcccccgtgaccatcgcctccatctctgggtttcgcccaccgtcgcggccatcgcccggatacgccttcgacggcgtcgccgccgcaatgaagcaggccgagcccgtggtcactcaccagtgtttttaacaaaattctacaagaccacatacaaggaacatgtgcccaaccttgtacagctgactatgccatgtatgcgctacaaggtggggtga

SEQ ID NO: 19244 - DNA, 222 bp, Oryza sativa
  Clone ID: PAT_MRT4530_24723C.1
atggtcacatcaggcatgcaccctggaccctggttcgacatgggccatgtgatgagctacgtggaggcccgcacgacggtcatcatcggcgtccatgtgccatcagaacaaatcagcgattataatcagtacgttgacaacaaccagataaatttcttctcccacaaagaccggttcctcccttgtggccgtgccgtttcgtccaaagggcccaccggctga

SEQ ID NO: 19245 - DNA, 4702 bp, Oryza sativa
  Clone ID: PAT_MRT4530_24724C.1
atgccttgggctgaaagcttgctgttcctcctcctcttgttctcgctgcccattcccttctcccattcttggtcctttgattatcccagccccattgccaacattaattctctttggacgaacaacaatgccaccatcccatacagtgcaacctacccagatggttcaacgatcagagcgattcttgttaggcagaatcctacatggtatagtccattcttcgcatgtggtttcatctgcaccgctccttgcaatgattttctctttgccatcttctcggtgtccgttggtgatccgagcaaccctgccttcaatacctcgtccatgccacggatcatgtggacagccaacaggtcccgtccagtgaaggataatgcgtcactccagttcaaggatggcaatctcatactgcgagacttcgatggttctctggtctggtcgacgaacacatcggacagccgtgttgtcggtctgaatcttgctgaaactgggaatatggttctcttcgacgcaatggggaagacggtgtgggaatcatttgagcacccaactgacacgctccttcttgggcagtcactgaggcaagggaagaggcttacttcagattccttggcaacaaactggactcaaggtcagttctatctcactgtacttgacaatggtttgtatgctttcatcgaagcagatccaccacagctctattatcaaagaagattcaatatcactgatgccatagttcagccaaatatgaacatatcctctgatggagcaaagaactacacgacttacatttccttcttaaaaggtagcctgtcagcatttgttagcttcaacaatactgatatcaatctattcgatatatcactgccgtcgccatcttcagcacagttcatgagcctcgagaatgatgggcacttgagagtttatagatgggatggtacttcgtggaaacctcaggctgatgttctgcatgtggatcttgatgattgtgcatatcccacagtatgtggagattatggtatctgttccgaaggacaatgcagttgcccgagtcggaattctggggatgaagatcaatttttccgccaattggacaaccggcaacctaacatgggctgctccctagcaattcctctgtcttgtgacttgacccaatatcaacagcttctccccctcccaaatgtcatgtacttcaatttaggacaaaattggaccaccgacgaatatagctgcaaggaggcttgcttgaaggcctgttcatgcaaagcagcctttttcaagtataacaatgtctctaatggttcttgctacctaatgccaaagcttttctcactcatgaattatcagcctgaagtagttggatacaatttatctgcatacatcaaggtgcaaatgttacctccaccaccaagaagcaaacaattaaatccattagtttaccatgttggtgctcctattatagttgcagttatctgcataattattctcatcatcagaagaataatgaaaaggaagatggatgatgacgacccatttaaaggactggctggcatgccaacacggttctcctacaaacagctgagagaggcgactaataactttagcaaaaagctgggacagggaggatttgggccagtgtatgagggaaaacttggaaatgttaaaattgccgtcaaatgcttgcgtgatattggccatggaaaagaagaattcatggccgaagtcatcaccattggaagcatccatcacatcaatcttgttagattgataggatactgttctgacaagtttcacaggctccttgtttacgagcatatgaccaatgggtctctagacaagtggatcttcagaaagaacccaagaggtacactcagttgggcaactcgatacaagattatactggatattgcaaaaggcttggcctatcttcatgaagaatgccgacagaagattgctcaccttgatatcaagcctggtaatatcctccttgatgacaagttcaatgcaaagatatctgatttcggtctagcaaagctgatcgatagggatgaaagccatgtcatgacaaaaatcagaggaacaaggggatacctagcaccagaatggttgtcatcaacaattaccgagaaggctgatatctacagttttggtgttgttgtgctggaaattgtgagcggaaggaaaaacctggataacaatcagcctgaagcgagcaacaacctaatcaatctacttcaagagaaaatcaaggtcggccaagttctagatatattggacaatcagaacgaagaaatccaattacacggggaagaaatgatagaagtgatcaagctagcagtctggtgcttgcagcgcgactgcagcaaacgaccagccatgtcacaggttgtgaaggggggattcgctgctagctgctcaacaagaaggaaccacagggtgatcttcctcggttcaaggcagttttctccgatcatatacagcccagcacgccgcgcgtcgtcacggctgtctcggagagaggtgatagcttttgcaggccagcaatcttgggatatcggcagatttgtcaggacgctgtatttcttcaacgggccaccgaatcctctcaagattgtagagtccattcttagcagtttcactggctctgctcctggtgaggtgccaaagaaaatggaatcttctgatgtggtgctggtcactggagctaccggtggcgttggacgaagagtggttgatatcctgcggaataagggaatacccgttcgagtattggctagaaatgaagagaaggcgaggagcatgctggggcccgatgtagacttgatcataggagatgtcacaaaggaaaattcacttgatcccaagtacttcaaagggattaagaaagtggtaaatgcagtgtcagttatagttgggccaaaggaaggcgatacaccagacaggcagaagtataaacagggcatcaagttttttgaacctgagatcaagggaccttcacctgaaatggtagaataccttggaatgcaaaacttgattaatgctgtcaagaacagtgtgggtctgactgaagggaaactgctttttgggggcacaggcaacttatccggaaagattgtttggggagcacttgatgatgttgtgatgggaggtgttagtgaaagcacattccaaatccaaccaacaggaagtgaaactgatggaccaaccggattgttcaaaggtactgtctctacttcaaataacggtggcttcactagtataaggacaaagaattttacagtgcctgaggatctgtcagcatatgacggtattgaactacgtgttaagggtgacgggaggcggtataaacttattgtgcgcactagctttgaatgggatactgtcggctacattgcaagctttgacacgactaagggggaatggcaaagtgttaaattacctttctcttcactgaatcctgtattccgtgcccgcactatgcctgatgctgcaccctttgatgcaagcaatgttacttccttacagctcatgtttagcaagtttgagtatgacggaaagctgaacccaacatttacagaaggttcatttgagctccccttttcaagtattagagcatacataaacgagccaatcactccaagaataaatgagcactgtaatcgtccgattgtttggaagtcatcaagactcactagaataaatgacaattctacttgcaggtttgtccatgttagttctgcaggagttacaagacctgagagaccaggcctggatttaagtaaacaacctcctgctgttcgcatgaacaaagagctgggctccattctaacttacaagttgaagggtgaggatttaatccgggaaagtggcattccatatactattgtgcggccatgtgctctaacagaggaaccagctggagctgacctcatatttgaccagggagataatatcacaggaaagatatcaagggaagaaattgctttcatttgtgttgcagctctggcaagtccaaatgcagtagagaaaacctttgaggtcaagagcactgttccattcagtgaacctttcgtggttgatccttcaaatcctcctccagagaaagactatgatgtgtatttcaaagagctcaaagctggcataacaggtaaagaggcactagaaggaacacctgctcaggtcttaaccacttaataaatgcagaacgcccaactgctttgacaaatcttgacatggtgcttcttgaacatgaacagaattacataaatatgcaagtctgattcataaaccaccaatagttgcagtacctgagcatatgtgccacacttaatctttgcagtcatgtggtttccaaaataccaaatgggaagtactttgtgaagtatgtgaaggaacagttgtttcttttttttatgtaaagtagtatatcctctggagtttgtgttatatttaatctgctgtatctgtatgagaagatatgcatacatcttcagaagacatatggatgtcgatcaagagctcaaaggttatggagcattggagctctttctgtagcagattctgtatattatgttgcttttattttcactgaattgtgtgctgtagatagcgtcattggaatctagatcgaccattttgtaaaatcaaatacattgtcatacagagagaagagaagtttacagttccagttttttttttcaac

SEQ ID NO: 19246 - DNA, 1368 bp, Oryza sativa
  Clone ID: PAT_MRT4530_24725C.1
agtggatccccgggctgcacgcatgtgctgagttgcattctcactcaaatttccacccggccggccgcccggagtcctcgcctcggctcggctccctcccacgctccagctccgcctccaatggcgcctatggccatctccaccccgctcgccctccgcgcctccccgacccgcctcctctcccgcaggcggagcggagccaaatcaggcgtggctctcccaggtccacaatttgtaccacctggtatttcttcaaagttggacgagaggatacattgtcattcttctctgaggaaaaatacaattgtagcatcagagaatgaaaatccacctttaatgcctgccataatgactcctgctggtgctcttgatctggcaactgtattgttggggaaccgcattatcttcattggtcaatatattaactcgcaagtagcacagcgtgtaatatcacagcttgtcacacttgctgctgttgatgaagaggctgatattctgatctacctgaactgccccggcggaagtctctactccatcttagcaatttatgattgcatgtcctggatcaagcccaaagttggaacagtgtgctttggtgttgttgctagccaggcagcaattatacttgctggcggtgagaagggaatgcgttatgccatgccaaatgctagagtaatgattcatcaacctcaaggtgtatcagagggtaatgtggaggaggtgaggcgacaggttggggaaaccatttatgctcgtgataaagttgataagatgtttgctgcttttactgggcaaaccttggatatggtacaacagtggacagagagggatcgtttcatgtcttcatctgaagccatggactttggactagttgatgccctgctggaaacaagatactaacaaacaaacacttaggcacagtttgattagcagaggctggtacaaggattgtgaaactggagctgaagttgagattttcgccgtccttctagttcaaggactccaatgacaggaggctggatctgcgagacttgaatgcatcgccatcgctcctatgagcaaaacatctctgcgttgagtgtgattttttgctcttcttttttggatctggttttaacatgccgccagcctatggtctcaatgcattggtcctgctaatgtttagtgtagaccagatgatcctttagacagcaaaacatcagttattactccgtagattttcccatgagctgattccagactgtgtgcaacttttgtgttccaattgcaaagtttgcaacccaacccaacccaacacatgggctgatgggctgttgccaaaggaaagattttccacttcacatatgtcaaactaaataaatactcccc

SEQ ID NO: 19247 - DNA, 901 bp, Oryza sativa
  Clone ID: PAT_MRT4530_24726C.1
atggagcaacctctttttgagctgtctgctcctcggggcgaattctatgagccacctcctttattggagcccatttacacaactaatcagtatggttagggaaaatcctttttctggctttgatctagaaaatccctacaatcatctgcgagactttgaacaagtctgctcatgccttaagattcgtggcatgaaacaagaaactgtgcggtcgaaattgttcccgttctctcttcaagagagagcaaagcaatggtacacctctaccgttggatgtgtaaacggtagttgggaaaagttgcgagacagattctgtcttgcctttttcccagttacccgtattactgccctacgagtagaaattctcagtttcaagcagatcgaaaacgaatcaatcagtgcagcctggtccagattcactaatttagtgcagtccgtaccaaccctgtccttactcgagtatgtgcttatgcaacatttccatacgggtttggataaggagtctgcattctatctgcacataaccactggaggatcgttcatgcacaaaacaccgtcagaaggaagaataatgttggatcgcattctagaaaatacttccttcatgacgcaaaccaatgaaaaccagtcgaaggcatcagtgtccaagatagaggaacctctaacgatgaagccactcgctcaaccatccacttctgctagctcgattgatgaaaaggttcctgagcagccgtccgtcgagaatgaagagattcaaactccggatcgagagagctccactactcatcgctctcctccagttgtccactagacagcgctagggtcaccacctagctgcgtcgccaccaccgtcgagcctgtctgcccctcggccaccgagcattggttttgcccatcggga

SEQ ID NO: 19248 - DNA, 439 bp, Oryza sativa
  Clone ID: PAT_MRT4530_24727C.1
ggaacccttaaaacgggccgccgttatctacaactagtcctggctgcaaccccgattcaattcttgggagacctatatccacagagtgcagctagtactggcgtccaactacgccgacactgctggggacgaatgcaggttccacgggcacaggcaccacacgagcggcaccacaccgaccggcgcggctgcgttgcctaagatgcgcaggagctgggcgtccgtcggctcggtcttgtgcggcagcagttgacacgggcactgccccaggtgcgtatgtgcgcccgacatcacgcacggctattattagtgccagttacaccgtagaaattgtcaccaacacctgtcttcctaatctaacgacgcagacgtgcatgctgctgtcgtactttgctaccaataccgcaacaaacaggaacaacgacaccagaacggtatg

SEQ ID NO: 19249 - DNA, 1794 bp, Oryza sativa
  Clone ID: PAT_MRT4530_24728C.1
atgacgcaatcaattgaaccccagccggaggcatccgtgtccaagatagaggaaccactaatgatcgagccacgtgctaaaccatccacctctgttagctcgattgatgagaaggttcctgagcagccgaccgtcgagaatgaagaaattcagactccggatcatgccgcaatcctgttcagggacggctttgacaaagactacggcaataccctgaactattctagcaagaggaaaccactcgttcctttgcaacctcccgatcctatggaactcgggatcctacgagaaactgtccgggagttaacatccataatgagcgatgaatggctaagggaggtagaactttcatccgaggtaatttggataaataccactccccgagtcattccttgccatctggaagggaacgatgtcggtattctctacagtccaactgtcggggccaacctcgtctccaagtcttttgcattcgcttatttaagcgataagctagtaaccccgacaaacaaattcttcaagcatccaaacggaaatatcatcgaaggatttgggattgtgcaagatgtgcctgtctgctttgaagacagggaggcgatcttggatttccacgtcttagaaatccaagactttgacatcctaatcgggctggccattgagcaacttctcatcaacacatcccgattgggtagcctcaaaataacactgggagagaatgaattttcaattccattctcgcgggcaaggatcaccttgactgaccctctcccagaaattgagtcagcggaagaggttaccgcagttccccctgatgagtctcccgaggccctcctggaagatgatgtccccgatttcatgaacgaagaagcagaccccgacttcatgggacctttccctaagtctcgcaactgcgagtacattctggtggcagtcgactatgtctccaagtggattgaggctatgccgtgcagcgccgcggatgcgaggcatgccaagaagatgttcacagaaaccatcttcctaagatttgaacttgagcacagagcatactgggccatcagaaactggaacatggattttgaaggagcaggagaatggagaaaaatgcaaatcgctgaacttgaagaatggagggagaaggcttaccacaatgcgaagatatacaaagaaaggacgaagcgctggcatgacaaaagaatcaaaatcaagaaattcaagccaggagacaaagtactgatgttcaactccagggttaagctcttcggccacggaaaaccgcgcagcaaatgggaaggaccgttcgacgtcatcgatacctcttcgcacggggcaatcacactccgcgacgactcaagtaacatatttaaggcacgtcacctttttcaagatgacgggagggccgcgccgcctcccaccgagcgttatgtgggcaccctgttcaccaaggcaggggatgaggtgctccacaagtacaccacacccaccgctactccatccactccgaaggaggagcgatttcgcattcagggagtgcgaactcccggcggtgggtatggcaaaggattgctccggcctttgacggcatcggagaaggagggggcagcggaattccgtagccctctacctctgaaggtgaagagtcacttgatgccctctccaattgtgagggctcccggccaattccaggaagatgaggtgaaatcgccggagccctcgatccataatcttgccgctcaagtgaagaaactccgcaaggagaacatagagcttagggatcacaattcggagctaggg

SEQ ID NO: 19250 - DNA, 3282 bp, Oryza sativa
  Clone ID: PAT_MRT4530_24729C.1
atggagcaacctctgtttgagctgtctgctcctcggggcgaattctatgagccacctccttcatcggagcccatttatacaactggctatgaaattcgtcctaagctaattagtatggtcagggaaaatcctttttctagctttgatttagaaaatccctaccatcatctgcgagactttgaacaagtttgctcatgccttaagattcgtggcatgagacaagaaattgtgctgtggaaattgttcccgttctctcttcaagagagagcaaagcaatggtacacctctaccgttggatgtgtaaacggtagctgggaaaagctgcgagacagattctgtcttgccttcttcccagttacccgtattactactcttcgagtagaaattctcagtttcaagcagatcgaaaacgaatcaatcggtgcagcttggtccagattcactaatttagtgcagtccggaccaaccctgtctttacccgagtatgtgcttctccaacatttccatacgggtttggataaggaatctgcattctatatggacataaccgctggaggatcattcatgcacaagacaccgtcagaaggaaaaacgattttggatcgcatcctagaaaacacttccttcatgacgcagtccaatgaaccccagccggaggcatccatgtccaagatagaggaacctctaaccatcgagccacttgctgaaccatctacttctgctagctcgattgatgagaaggttcctgagcagccgtccgtcgagaatgaagaaattcagacttttgattgtgccgcaattatgtttagggaaggttttgacgaagactacggcaataccctaaactactttagtaagaggaaaccacccgttcctttgtcacctcccgatcctatggaacttgggttcctacgagaaactgtccgggagctgacatccataatgagcgacgaatggctaagggaggcagagcgttcatccgaagatcaccttgaccgaccctctcccaaggcccttctagaagatgaggtccccgacttcatcaaggaagaagcagatcccggtgagactctcgacctgccaatcgtggaaccgctacctcgacctctgcttgagcttaaacctctacctccaggcctacgatatgccttcctacacaaagacagagaggctccggtcataattagtgacaagctctctgaagatgagactcaacgtcttcttactgtgttggaaaagcatcgttctgttcttagctactcgcttcaggaccttagggggattaatcccgcactttgcacccatcgtattcctattgaccctgagagtactccctctagggaacctcaacgacgactcaataatgcaatgcgagaggttgtaaagaaagaggtcttgaaactgctgcatgccaggattatctatcccgtaccatacagtgagtgggttagcccagtccaggttgtgccaaagaagggaggaatgacggtcgttgcaaatgctcagaatgaactaattctgcaacaaacctttctcaaaaaggcactcgtctccgctccagtcattcaacctcctaattggactctacccttcgagattatgtgtgatgcaagtgacttcgctgttggtgcggtcttgggccaaaccaaagataaaaagcatcatgcaatctgttacgctagcaaaactctaaccggagcccagttgaattatgcaactactgaaaaagagctgctcgcggttgttttttctatcgacaagtttagatcttacttagtaggagccgaggtgataatttatactgatcatgctgctttgaaatacctgctcactaagaaagatgctaaacctcgtctcttaagatggattttgctactccaagaatttgacttagaaattaaagatagaaagggagtagaaaattctgtagcagatcatttgtccaggctgcagatcactaacatgcaggaacagccgatcaatgatttcttaagagatgacatgctgatgacggttagcgactctaacccatggtatgtcaacatagtgaactacatggtatccatgtacataccaccaggggaaaatcaacgaaaattgaagtatgaaagtcgccgtcacatatgggatgagccatacctgtatcgggaagactcaagagaattcattagaagatgcaccagctgccagaggcaaggaggaatcactactcgcgatgcaatgcccctcacatacaatttgcaagtcgagatattcgatgtttggggtatagacttcatgggacctttccctaagtctcgcagctgcgagtacattctggtggcagtcgactatgtctccaagtgggttgaggctatgccgtgcagtgccgcggatgcgaggcatgccaagaagatgttcaccgaaatcatcttcccaagatttggtacccccagaatggtcataagtgacggagaacttgagcacagagcatacttggccatcaggaactggaacatggattttgagggagcaggagaatggagaaaaatgcagatcgctgaacttgaggaatggagagaaaagacttaccacaacacaaagatatacaaagaaaagacaaagcgctggcatgaaaaaaggataaaaattaagaaattcaagccaggagacaaagtactgatgttcaactccagggttaagcttttcgaccatggaaaactgcgcagcaaatgggaaggaccgtttgatgtcatcgacatctcttcgcacggggcaatcacactccgcgacgactcagccccttgcaacagtgccaggctccgtagcaaatttggagcccgtcggcgagctccctggttcggccgaaccaggggttcagccccccgttcggcagcgcgatccctctcccctcgacatgtcgcaagaatgaaaatccggggggattcgcctgcacgatggccgactatgggagagctcggcttgttaaaggcacgatgccttttccaagatgataagaaggccactacgcctcccgccgagcattatgtgggcaccctcttcaccaaagcaagggatgaggtgctccacaagtaccccacacccaccgctactccatctactccaaagggggagcgtttctgtattcagggagtgcgaactctcggcggtgggtatggtaagggtctactccggcctttgacggcatcagagaaggagggggcagcggagtcctgtagccctccacctgtgatggtgaagcgtcatttgatgccccctccaatggtgagggctcccggctaa

SEQ ID NO: 19251 - DNA, 567 bp, Oryza sativa
  unsure (1)..(567): unsure at all n locations
  Clone ID: PAT_MRT4530_2472C.1
nnncgaggccggccgggggatcagtcgagattactgctatatagctgttccactcgacgcgaagcttgtcttacatgatgctattgtngatatctcaccgattgtttcttcgacagagtttcctagatatctgagtgcaggtgatgctcatagatagcatcgcctccatggtctccgtataacgactcggtgccaccttctggtctcatccctctgagatgattgcactcttctcgaaggatggtaaccatacaaagataatgctcccttgtaaccagatgcttgcagagatgcgatgactggatactaacctgaaaaagaaagatatgttccctttgaagacattctccggcatcgctacaggaagactcttgcgctggcgcccttgtggtagctctgatacatcaagactccggctgtggtctgcaactaccttcggatgaatgctatggagttgaccttgccaagagctgcacagcgactgatcacttgcaattccaagaacagtctgctgatggacacaccaacagccactatgttattgatgttgattatgagacctatcat

SEQ ID NO: 19252 - DNA, 349 bp, Oryza sativa
  Clone ID: PAT_MRT4530_24730C.1
ttttttttttaacaatcttgttttgttgtttttcacagtttcgttttgttacctttaacattttttttctttttcttgtacgtttatacagtcattcattttattactgtgtgagaggtttattttatgcttgtccgcttccattcagttgggttgatacttgagggagcagacagatgacccgcacgatgtctctcctgatggcaggggggggaatcataaaaaaaaaaagaccgcagttgttgacgacattagcacaaaacggaaccccccctccaccccctattgctgcgttcgccccggggggcccacacaagtaggggggccccacagcccccttcttcctctg

SEQ ID NO: 19253 - DNA, 2780 bp, Oryza sativa
  Clone ID: PAT_MRT4530_24731C.1
atggctaagggaggtatagctttcatccgaagtaattcgggtaaataccgctccccgaatcattcgctgccatctggaagggaacgacgtcggtattctctacagcccgatcgtcgaggtcaatctcatttctgagtcttttgcattcgcttatctaagcgataaggcaataaccccaacgaacaaattcttcaagcatccgaacgggaatatcattgaaggatttgggattgtacaagatgtgcatgtctgctttgaagatagggaggcgatcttggatttccacgtctttggaattcaagactttgacatcctaatcgggctacccattgagcagcttcttattaacacaccccgattagacagcctcaaaataactctaggaggaaatgaattttcagttccattctcacgggcaaggatcgccctaaccgaccctctcccagaaattgagtcagcagaggaggttaccgcagttccccctcacaagtctcccgaggcccttctggaagatgaagtccccgatttcatcaaggaagaagcggatcccggtgagactctcgatctgccaatcatcgaaccgctacctcgacttccgcttgagctaaaacctctacctccgggcctatgctatgctttcctacacaatgacagagaagctcctatcataattagtgacaagctctctgaagacgagactcaacgtcttctcatcgtgttggaaaatcatcgttctgttcttggctattcccttcaagatctcagggggattaatcccgcactttgcactcttcgtatccctattgaccccgagagtactccctttagggaacctcaatgacggctcaataatgcgacgcgagaggttgtaaagaaagaggtcttgaaactcctacatgccgggattatttatcccgtaccatacagtgagtgggttagcccagtccaggttgtgccaaagaagggaggaatgacggtcgttgcaaatgctcaaaatgaacttatcccgcaacgaaccgtaaccggatggaggatgtgcatcgactacaggaagcttaacaaggctacgaagaatgatcatttcccactacccttcattgatgaaatgttggaacggctggcaaatcattctttcttctgtttccttgatgggtattccgggtatcatcaaattcccatccatccagaggaccaaagtaagactacgttcacatttccatacaacacctatgcctatcataggatgtctttcgaactgtgcaacgcgcctgcatcttttcaaagatgtatgatgtctattttctcggatatgatcgaggacattatggaagtcttcatggatgacttatctgtctatggaaagaccttcggtcattgtctgcagaatttagacaaggtcttacaacgatgccaagagaaggatctgtttagatcttacttagtgggagctaaggtaataatttatactgatcatactgctctaaagtacctactcagtatgaaagatgctaagccacatctcttaagatggatcttgctactccaagaatttgacttggaaattatggataagaagggagtagaaaattccgtagcagatcatttgtttaggctgcagaccactgacacacaggaacaaccgataaatgacttcttgagagatgacatgctgatgacggttcgcgactccaacccgtggtatgccaacatagtaaactatatggtatccatgtacataccaccaggggaaaactagcgaaagctgaagtacgaaagtcgctgtcatatatgggatgagccatacttatatcgagtctgttttgatggcttatgcctcaccctatggtggccattatggtgctttccgcacccaggctaagacttgacaaagtggcttcttctggccaacaatgtatgaagactcaaaagaattcgttagaagatgcacaaactgccagaggcaaggaggaatcactactcaagatgcaatgcccctcacatacaatttgcaagtcgagatatttgatgtttggggtatagactttatgggacttttccctaagtctcgcaactatgagtacattctggtggcagtcgactatgtctcgatggtcataagtgacggaggttctcacttcattgacaaaaccttccgagacctcctacgagagatgggagccaaacacaatgtggccactccataccatccacagactagcggtcaagcaaaaacattaaacaaacagatcaagaatattctgcaaaatacggtcaacaaaatgggaacatgatggaaggatagattgccggacacacttacatgtaagcgtttggaattttggatagaaattccgggcgtgacaacactgtgggcataccggacagcatacaagacacccattggaatgtcgccatatcaggtagtctatgggaagtcatgttgactacctgtagaactcgagcacagagcatattgggccatcaggaactggaacatggactttgagggagcaggagaatggagaaaaatgcaaattgctgaacttgaagaatggagagagaaggcttaccacaacgtaaggatatacaaagaaaggatgaagcgctggcatgacaaaaggataaagatcaagaaattcaagtcaagagacaaagtactaatgttcaactccagggttaagctttttggccactgaaaactgcgcagtaaatgggaaggaccgttcgacgtcatcgacacctcttcgcacggggcaatcacactccgcgatgactcaggt

SEQ ID NO: 19254 - DNA, 171 bp, Oryza sativa
  Clone ID: PAT_MRT4530_24732C.1
atgagggtcatggtcatcggtgacgggccagataatccgcaagcgcacggatataccgatgtagcacttcccctcagagtattccaagggtatcgaatccaagggaacgtgtgtggtcagatcttcctccggttcatccaaggacaccaagcaattgataggctaggatag

SEQ ID NO: 19255 - DNA, 158 bp, Oryza sativa
  Clone ID: PAT_MRT4530_24733C.1
tatataagagatatgtcgcggcatgtgcacgctcacgtgagtggggaccctatatttggggcgctttttttttttttttttttttttttggagataatggtattatggatacatttttttaccagtttttgagtttatttacacatgagatgcaccaa

SEQ ID NO: 19256 - DNA, 1719 bp, Oryza sativa
  Clone ID: PAT_MRT4530_24734C.1
atggacagaggaaggtccagggagtccaccgaccgaaggccaggccagcagggcccagcccaagttcggccgaacaccctgtccaatgaactccagccggaggtatccgtgtccaagataggggaacctctaacgatcgagctacttgctgaaccatccacttctgttagctcggttgatgagaaggttcctgagcagctgtccgtcgagaatgaagaaattcagacttcggattgtactgcaatcctgttcagggacggctttgacaaagactatggcaataccctgaactattttagcaagaggaaaccactcgttcctttgccaccttccgatcctatggaactcgggttcatacgagaaactgtccgggagttaacatccataatgagcaatgaatggctaagggaggcaaagctttcatccgaagtaattaggataaataccactccccgaatcattccttgccatctgaaagggaacaacgtcggtattctctacagtccaactatcggggccaatctcgtttccgagtctttggcattcacttatttaagcaataaggcagtgaccccgacaaacaaattcttcaagcatccaaatggaaatatcatcgaaggatttgggattgtgcaagatgtgcctgtctgctttgaagacaaggaggcgatcttggatttccatgtctttgaaatccaagattttgacatcctaatcaggctgcccattgagcaacttctcatcaacacaccccgattaggtagcctcaaaataacactgggagaaaatgaattttcaattccattctcacgagcaaggatcaccttgactgaccctctcccagaaattgagtcagcgaaagaggttactgcaattccccctcatgagtctcctgaggcccttcttgatgatgaggtccccgatttcatcaaacaggaagtggatcccgacgagactcaacgtcttctcaccgtgttggaaaagcatcgttctgtttttggctactcgctagcagatcttagggggattaatcccacgctttgcactcatcctattcctattgaccccgagttcatcaaggtcttttctacaatcgccagacatctgaccaatctgctagccaaggatgcgccctttgagttcgatgacgcgtgcctaaaatcttttgaaattctcaaaaaggcactcatctctgccctaatcgttcaacctactgataggactctacccttcgagatcatgctgcagatcactgatatgcaggaacagccgataaatgatttcttgagagatgacatgctgatgacggttcatgactccaacccatgggttaagctcttcggccacggaaaactgcgcagcaaatgggaagcaccgttcgacgtcatcgacacctcttcgcacggggcaatcacactccgcgacgactcaggtgacatatttaaggcacgacgccttttccaagatgacgggaaggccgcgccgcctcccgccgagcataatgtgggcaccctgttcaccaaggcaggggatgaggtgccccataagtatgtcacacccaccgctactccatccactccgatggaggagcgtttccgcattcagggagtacgaactcccggcggtgggtatggcaagggtttactctggcctttgacggcatcggagaagaagggggcagcggaatcccgtagccctccacctgtgaagatgaggtga

SEQ ID NO: 19257 - DNA, 1098 bp, Oryza sativa
  Clone ID: PAT_MRT4530_24735C.1
atggagacagcgacggtggcagtcggaaacggaggcggtgaatggtggactggtggtggcggcggcgggagagggaggcggaggtgtcggacacggcgacacgacggcagcgacggaggtggagacggaggcgatgagtatggggacgcgatggtggcggcgcgaggaggaggcgacggcgacctgtcttcccctcaaggcgaattctatgagccacctccttcatcggagcccatttatacaactggctatgaaatccgccccgaactaatcagtatggttagggaaaaaccttttattggctttgatctagaaaatccctaccatcatctgcgagacgttgaacaagtctgctcatgccttaagattcgtggcataagacaagaaactgtgcggtggaaattgttcccattctctcttcaagaaatagcaaagcaatggtacacctctaccgttggatgtgtaaacagtagttgggaaaagttgcgagacagattctgtcttgccttctttccagttactcgtattactgcccttcaagtagaaattctcagttttaagcagatcgaaaatgaatcaatcggtgcagcctggtccagatttactaatttagtgcaatccggaccaatcctgtccttacctgagtatgtgtttctccaacatttccatacgagtttggataaggagtctgcattctatctggacataaccactggaggatcgttcatgcacaaaacgccgtcagaaggaagaacaattttggatcgcattctagaaaatacttccttcatgacgcagtccaatgaactccagccagaggcatccgtgtccaagatagaggaacctctaacgattgagccacttgctgaaccaaccacttctgctagctcgaatgatgagaaggttcctgagcagccgtccgtcgagaacgaagaaattcagactccggatcgtgccacaatcctgttcagggacggcattgacgaagactacggtaataccctgaactattttagcaagaagacaccactcattcctttgtcacctcccgatcctatggaactcgggtttctacgagaaactgtccgggagttataa

SEQ ID NO: 19258 - DNA, 3251 bp, Oryza sativa
  Clone ID: PAT_MRT4530_24736C.1
atggagcaacctcgttttgagatgtctgctcctcggggcgaattctatgagccacctccttcatcgaagcccatttatacaactggctatgaaattcgtcctgaactaattagtacggttagggaaaatcctttttctggctttgatctagaaaatccctaccatcatctgcgagactttgaacaagtttgatcatgccttaagattcgtggcatgagacaagaaactgtgcggtggaaattgttcccgttctctcttcaagagagagcaaagcaatggtacacctctaccgttggatgtgtaaacggtagctaggaaaagttgtgagacagattctgtcttgccttctttccagttactcgtattactgcctttcgagtagaaattcttagtttcaagcagatcaaaaatgaatcaatcggtgcaacttggtccagattcactaatttagtacaatccggaccaaccctgtccttacccgagtatgtgcttctgcaatatttccatacgggtttggataaggaatctgcattctatctggacataaccgttggagggtcgttcatgcacaaaacgccgtcagaaggaagaacaattttggatcgcatcctagaaaatacttccttcatgacgcagcccaatgaaccccagccgaaggcatccctgtccaagatagtggaacctctaacgatcgagccactcactgaaccatccacttctgctagctcgattgatgaaaaggttcctgagcagccgtttgtcgagaatgaagaaattcaggttccggattgtgccacaattatgttcagggacggttttgacaaagactacggcaataccctgaactattttagcaaaaggaaaccacccgttcctttgtcacctcccaatcctatggaactcgggttcctacgagaaactgtccgggagttaacatccataatgagcgatgaatggctaagggaggtagagctttcatccgaagatcaccttgaccgaccctctcccagagcccttctggaagatgaggtccccgatttcatcaaggaagaagcagatcccggtgagactctcgacctgccaatcatggaaccgccacctcaacctccgcttgagcttaaacctctacctctaggcctacgatatgctttcctacacaatgacagagaggcccctgttataataagtgacaagctctctaaagacgagactcaacgtcttcctaccgtattggaaaagcatcgttctgtacttggctactcacttcaagatcttagggggattaatctcgcgctttgcacccatcgtattcctattgaccccaagagtactccctccagggaacctcaacgacggctcaataatgaaatcaagaggttgtaaagaaagaggtcttgaaactcctgcatgccgggatcaatttatcccgtaccatataggatagttcttgggcatcgagtgtccgaacgaggaatcgaagttgatcgtactaaaatcgatgttatagatcagcttcctcctcctgtgaacatcaaagtcattcaacctcctgattggactctgcccttcgaaattatgtgtgatgcaagtgactttgctgttggtgcggtcttaggccaaaccaaggataaaaagcatcatgcaatctgttacgctagcaaaactctaaccggagctcagttgaattatgcaactactgaaaaagagctgctcacgggtgtttttgctatcgataagtttagatcttacttagtgggagccaaggtgataatttatactgatcatgccgctttgaaatacctgctcactaagaaagatgctaaaccacgcctcttaagatggattttgttgctccaagaatttgacatagaaattaaagataaaaagggagtagaaaattatgtagcagatcatttgtccagattgcacatcactaacatgcaggaacaaccgataaatgatctcttgagagatgacatgctgatgacggttcgcgactccaacacgtgatatgctaacatagtaaactacatggtatccaagtgcataccaccaggggaaaatcaacgaaaactgaagtatgaaagtcaccgtcatatatgggatgagccctacctatatcgggaagactcaaaagaattcatcagaagatgcacaagctgccagaggcaaggaggaatcactgctcgcgatgcaatgccccttacatacaatttgcaagttgagatattcgatgtttggggtatagacttcatgggacctttccctaagtctcgtaactgcgagtacattctggtggcagtcgactatgtctccaagtgggttgaggctatgccgtgcagcgccgcggatgcgaggcacgccaagaagatgttcacagaaaccatcttcccaagatttggtacccgcagaatggtcataagcgaccgagaacttgagcatagagcatattgggccatcaggaattcgaacatggattttgagggagcaggagaatggagaaaaatgcagattgcagaacttgaggaatggagagaaatggcttaccacaacgcaaagatatataaagaaaggacgaagcgctggcatgacaaaaggataaaaatcaagaaattcaagccaggagacaaagtactgatgttcaactccagggttaaactcttcggccacggaaaactgcgcagcaaatgggaaggaccattcgacgtcatcgacacctcttcgcacggggcaatcacactccgcgatgacttcgccccttgcagctgtgccaggctcccctgcaattttggagccgatcgacgagctccctggttcggccgaacccttctcagccccgttcggcagcgtgatccctctcccctcgccatgtcacaaggacaaaaatctggggggattcacctacgcgacggccgacaacgggagaactcggcttgttgaaggcacgacggcttttccaagatgacgggaaggccgcgccacctctcgccgagcgctatgtgggcaccctgttcaccaaggaaggagatgagatgctccacaagtataccacacccaccgctactccgtctactccgaaggaggagcgattccgcatccaaggagtgagaactcccggcagtgggtatggtaagagtttactacggcctttgatggcatcggaaaaggagggggcagcagaatcccgtagccctccacctatgaaggtgaagcgtcatttgaagccccctccaattgtgagggctcccagc

SEQ ID NO: 19259 - DNA, 1907 bp, Oryza sativa
  Clone ID: PAT_MRT4530_24737C.1
tttttttttttttttgcagagctaacgctggcctggcgatatatttttatcacagcaaaaacatggcagcaattggtaacatgaatttgttcgacttgttcttcgtcttgcagcttctcctgtcaggagtatgcgtgctcgtcatctgctaccgatatcagcggcttaaatccatgaaaaaatgtagcctatgggttgcccagtggccgatcgtcggcgtgctcccggccatcgccgccaacatgcaccgcctcctcgacggcgtgaccttcctgctggccacgtcgcagctcaacttccagtgccgcttctggctcgccggcttccggttcttcgtcacctgcgacccggacaacgtgcgccacatcttcacggttaacttcggttcctaccccaagggcgacgtgttcgccgacatgttcgacgtcctcggcggcggcatcttcaacaccgacggcgagcggtggcggcggcagcggaacaaggcccagatgctcatgaccacgccgcggttccgcgccttcgtggcgcgctccagcctcgacaaggtggagaagggcctcctgcctttcctcgcgcacgtcgccgacgcccggaagacgtgccaccttcaagacgtgttcacgcggaatggtcgctccgacgcgaacggttgccacctggtagttcggcgtcgaccccggctgcctggacatcggcctgccggaggtccccttcgcacgggcgatggacgacgtgctgcggacgatcttcctccgccacaccatgccagtgtcgttctggaaaacgatgagatggctagggattgggcacgagaagaggaacgccgcggcgaggcggacggtcgagagcttcgtcgcgtcggccatcgcgaaacacagagccgatgacgagagcaagtccagacaaggcggcggcggaggcggcgacaagcaatcggtcgccgacttgctttcctccttcctctgcgacgacgagatcgccggcagcgccgacgccgacgtgtacatcagggacatggcgatgaacctcctcgtcgccggccgcgacaccacgagctcggcgctgtcgtggttcttctacctcctctccacgaacccgcgcgtcgagcagaagctcctgcaggagctggcgcccatcgcttcccgcaagccgcagctgcagcaggggcggctcttccccggcaacggcggcatggtgacgttcgacgcgagcgaggtgaggaacctcctgtacctgcacgcggccctttgcgaggccatgaggctgtacccgccggtgccgttggagcacaaggcggcggtcgccgacgacgtgctccccagcgggcacgaggtgatggccggcgacaaggtgctggtgttctactactccatggggaggatgaagcgggtgtggggcaaggactgcagggagttcaggccggagcggtggatcaccgaggacggcaagctgcggtacgtgccgtcgaacaagttcgtcgcgttcaactccgggccgaggacatgcctcggcaaggagatggcgctcgtgcagatgaaggtcacggcggcggccatggcgtggaactttgccgtggaggtggtgccggggcacgtcgtggagccgaggctgtccgtcatactccacatgaagaatgggctcttggtaagggtcaagagaagagagccagtgatgaacacctgagaactgagaggatacatgcttattaagtgtgatcaatatgctattacatgatgtacagtacagagttttaatttatgttggtgtcgagcgtggtgcttcatctgtaccgtgtgcggtacgcgatagaggcctaaatttgcacattggttgcgtcagatttgtaatggaatccctcaaggatacgaattaataacttggggggtgtgtcaaaaaaaaacaaa

SEQ ID NO: 19260 - DNA, 2995 bp, Oryza sativa
  Clone ID: PAT_MRT4530_24738C.1
atgagcaatgaatggctaagggaggcagagctttcatccgaagtaattcggataaatactgctccccgaatcattccttgccatctggaagggaacgatgtcggtattctctatagtccaactgtcggggccaaccttgtctctgagttttttgcattcgcttatttaagtgataaggcagtgacgccgacaaacaaattcttcaagcatccaaatggaaatatcatcgaaggatttgggattgtacaagatgtgcttgtctgctttgaagacagggaggcgatcttggatttcctcatctttgaaatccaagactttgatatcctaatcggactgcccattgagcaacttctcatcaactcaccccgattaggtagcctcaaaataacactaggagagaatgaattctcaattccattttcgcgggcaaggttcaccttgaccgaccctctcccagaaattgagtcagtggaagaggttactgcattttttcctcatgagtctcccgaggcccttctggaagatgaggtccccgaattcatcaaggaagaagcagatcccggtgagactctcgacctgccaatcatggaaccgccacctcgacctccgcttgagcttaaacctctacctctaggcctacgatatgccttcctacacaatgacagagaggccccttgttatattcagtgataaactctccgaagacgagactcaacgtctgctcaccgtattagagaagcatcgttctgttcttggctactcgctccaagaccttagggggattaatcctgtgctttgcacccatcgtattcctattgaccccccgagagtactccctccagggaacctcaacaatggctcaataatgcaatgcgagaggttgtaaagaaagaggtcttgaaactcctgcatgccaggattatttatcccgtaccatacagtgagtgggttagcccagtccaggttgtgctgaacaagggaggaatgacggtcgttgcaaatgctcaaaatgaactaattccgcaacgaaccgtaaccggatggaggatgtgcatcgactacaagaaacttaacaaggctacaaaaaaggatcattacccgcttcccttcattgatgaaatgttggaacggctgacaaatcattcctttttctatttccttgatgggtattccggatatcatcatattcctatccatccggaggaccagagtaagactacgttcacatgtccctacagcacctatgcataccgtaggatgtccttcagactgtgcaacgctcctgcatctttccaaagatgtatgatgtctgttttctcagacatgatcgaagacatcatggaagtcttcatggatgacttctcagtttatggaaagacttttggccattgtctgcagaatctagacaaagtcttacaacgatgccaagaaaaggacctgtttagatcttacttagtaggagccaaggtgataatttatactgatcatgctgctttgaaatacctgctcactaagaaagatgctaaaccacgtctcttaagatggattttgctgctccaagaatttgacttagaaattaaagataaaaagggagtagaaaattccatagcagatcatttgtccagactgcagatcactaacatgcactaacagccgataaatgatttcttgagagacgacatgctgatgacggttcgcgactccaacccgtggtatgctaacatagtaaactacatggtatccaagtacataccactaggggaaaatcaacgaaaactgaagtatgaaagtcaccatcatatatgggatgagccatacctatatcgggtctactccgatggcttactacgaagatgtgtgccaactgaagaaggacttaagatcatagaacgatgccatgcctcaccctatggtggccattacggtgcattccgcacccaggccaagatttggcaaagtggtttcttcttgccaacaatgtacgaagattgaaaagaattcgtcagaagatgcacaagctgccagagggaaggaggaatcactgctcacgatgcaatgccccttacatacaatttgcaagtcgagataatcgatgtttggggtatagacttcatgggacctttccctaagtctcgcaactgcgagtacattctggtggcagtcgactatgtctcgatggtcgtaagtgacggaggctctcacttcattgacaaaaccttctgagacctcctacaagagatgggagccaaacacaatgtggccactccttaccatccatagaccagtggtcaagcagaaacatcgaacaaacaaatcaagaatattctgcaaaagatggtcaacaaaatgggaacaggatggaaggatagattgccggacgcactgtgggcataccggacagcatacaagacacccattggaatgtccccatatcagatagtctacgagaagtcatgtcgactacccgtagaacttgagcatagagcatactcatataaagaaaggatgaagcgttggcatgacaaaaggataaaaatcaagaaatgcaagccaagagacaaagtactgatgttcaactctagggttaagttttcggccacggaaaactgcgcagcaaatgggaaggaccgtttgacgtcatcgacacctcttcgcacggggcaatcacactcagcgacgaatcaggtaacatatttaaggcacgtcgccttttccaagatgacgggaaggccgcgccgcctcccaccgagcgctatgtgggcaccctgttcactaagacaggggatgaggtgctccagatgtacaccacacccaccgctactccatccactccgaaggaggagcaattccgcattcagggagtgcgaactcccggcggtgggtatggtaagggtcgactccggcctttgacggcatcggagaaggagggggcagcggaatcccgaagccctccacctatgaaggtgaagcgtcacttggagcacgaggcaacaaa

SEQ ID NO: 19261 - DNA, 1104 bp, Oryza sativa
  Clone ID: PAT_MRT4530_24739C.1
atgcgggccccacatggcagtgactcgggtggcggtccgcggtggaccgggtccacgaaccggggaaggggctgcgtaccacgtggcgctgacgtggggccgacaccacggccacgtggcagccacgtgggcgcccgaaccgacggccctgatctaccctcggcggcgggagcgcgcggccggcgcgcacaggtggctcaagccggcccggcggccatggcgtacggcaacgctaccgcgagcggcggtggcaaacggcggcgaccgacggaaacaaagtgggagaagttagaggggaagagaaagatcaccgagggcgggaacgccggccaaaggcggcggccatggccgaactcaccggcgcacggtgcgggatgggttccggcggcggaatccgacgggagaggggtggatggggtggcccgctcgacggcgaacgcgacggcgtcaacggcgcggctcggcacggcagctagcggcggtcggagcaacggcggaggcggcggagaggtgggcgacggcgctagtgctaaagagagcacgggagcggcagctaaagctaagccgagttctgtcgccgacgccgtcccgatcaagaggaggatacactcgtacaaggagcggaggaggcatcaccagcttacaatgcggagctcgttcggcggcaaagctcgcggcgctgcagcaccggcaccggcgacgcacccgcgctacgtgccgcagagaggagtcgtgctgaagagcgtgctgggctggttcttcggctgcttccgccccgccaagacccggcctcttccggccggccgccatgttgggctcttggctgcatccagtggcttcaaccagattgattacctttttgtttctggaaaggaatcattagtatttggaggggggaagaagccgcctccgccgggagtccaccctcgctacgtcccgaagaggggctcggtgctgaaggggatcgtgcgccgcatgctcggcctcttcgtcttcctcctcccgcagcagggcgggggcggagcggcgaatggcagcggcggcggcggccgcgtgcgcccggcggcgcctccggtggatgatggcggcgagcaggggaagtag

SEQ ID NO: 19262 - DNA, 907 bp, Oryza sativa
  Clone ID: PAT_MRT4530_2473C.1
aataagcaaccaagggcacattgaagtgcactaggttttgtcatttacaactagccagagcactaatttcggaaaatataattacctgtccctccaaggctccaaccatgtctaggtctgtggagcctcttgttgttgggcgggtgatcggagaagttattgattcattcaacccatgtacgaagatgatagtaacctacaattcaaacaagcttgtctttaatggccatgagttctacccatcagcagttgtatctaaaccaagagtcgaggtccaagggggtgatatgcgttctttcttcacattggttatgacagacccagatgtgccaggaccaagtgatccatatctaagggaacacctacattggattgtaactgatatacctggaacaacggatgcctcttttggacgggaaatcataagctatgagagcccaaagcccagcattggtatccacaggttcgtttttgtgctcttcaagcagaagcgtaggcaggctgtagttgtgccatcctctagggatcatttcaatacacgccagtttgctgaggagaacgaacttggccttcctgtcgctgctgtctacttcaatgctcagagagagactgctgccaggagacgctaaaaaattccagctgtcattatccccgctgtgataaataaaaaccatccaatagtttctcctgtcgtctacattatctgccacatcactagattgtggatcaaggcttcatcattacgtcatttgcctcaagaaaatctacaataaaccaaatgcatttgacagattgtatcagtgtcagattgtttcccgtatcaaaaattaagtaatggattgtttttgtaagaagattgagagtcatgataaataccagtgcattcgcatgcaaatattagcaatct

SEQ ID NO: 19263 - DNA, 4056 bp, Oryza sativa
  Clone ID: PAT_MRT4530_24740C.1
ctaccccttcaatttgcacgccgccctagcaactccaaacgcttcaatcatcatcatatttgtcctgtaactttcttgaaccccatctggtctagttgtctctcgatcccgcctatcaaagggcacgttgctcttcgctttcattgtgtacctctttaggatgtagacagcgggtatcttctcaacttgtacatgaacaaatgcccggagcatgtgtgtgcagaacatgcctgtatgctcccactgtttgcacttgcatgtaaataccccttcatcgacatctgcaataaccttgaattgcttccacccgttgcggaaattgtcgtcttgtgtgatcctgaagtcagtgctgtcctgaagcacctcctcgaacaatctgaaagccgccctggtgtaaagtctcgacatcgagcatgctcttgtctcggcagcctccttctccttcctgtcagttataacctccaacattctccgagcaaaacggtgcagcgcggtttggtggtcagcaaacttgtgcttcaccaacttgttcatgctctcgctccgctgcgtcgacgtcatcctcctgcagtattccttcttgaagaacgcaggcacccacttttccctgatatcatataaagctttcatgatgggacagccctccaaatcataactctttatgaattgatcccatgatgtttcaaactcataaggcgtgtaggtttgattgatgcacaacatcatgtctggttcaatttgagcgtcccgtgcaaaaatggtgttcaatgggtcagagtggcggttgaggatatgccacttgttgaaggtgttgaataaccactcaaatgactgcaccttttcgtctctgagcaaggcacatccgaagagtgtgctcgcatctccaaagtcagcaaattcaacctggctgctagcatgactccaaaacaagttcttaatgacaccattttcatcaagctgggcgtcccagtagaacttagggttttgcaacgtgcactcgttgaaaaactccaacaacttgttgatgtcattcgcattttcctttcggacattggctactttcctgcatcggtcagatgggaacgtcctgttctcaacgtcgcgtgaagtgaaagggatattgtcttggcctccatggagatcagatagaacgcccatgatacaactttgcggcacgtgactttcttgcatagtgtccacaaattgcataactgtgtcgtcgcggttcttatgtgcacgcatgtgctttaccgccgaaggggatggcgttagagggtggttgtgctgtagctcgaccacatcatacaccaccgatgagagcgcaccaccgtcgtagttgtgcctcagcttcataaaagccttgcaccccattttcttggacggtctcctccgttgtctatcaccatcggtgaccttcgacacgtgcttgccctccctcgtacaacacacctcgcgaaacgctttgtgcgtacggctcttcttgatgtcaaatccagcgtgacatgcatacctctggtagaagttgtatgcgttgtcgtatgtagggaaagccatgccttcggtgggcaccatatgcggtggcacgctaggaccccggacagggaggacttcagtgatctcgagggctgtcaccacctcagggttcggctgaaccagggggttcggccgaacctgggctaggccttcctggcctggcctttggtcggtggactcctttagtctgattttccttccaacttcagggtttatcttccctagctccgcattgcgatccctaagctctatgttctccttgcagagtttcttcacttgagcggcgagcttgtggattgagggctccggcgatttcacctcatcctcttggaattggccaggagccctcacaattggagggggcgtcaaatgaagcttcaccttgataggtggagggctacgggactccgctgccccctccttctccgatgccattaaaggccggagtaaacccttaccatacccaccgccgggagttcgtactccctgaatgcggaaacgctccccctttggggtggatggagtagcggtgggtgtggtgtacttgtggagcacctcatcccctgccttggtgaagagggtgcccacaaagcgctcggcgggaggcggtgcggccttcccgtcatcttggaaaaggcatcgtgcctttaacaagccgagctctcccgtagtcggccgttgtgcaggcgaatcccccttaaatatgttacctaagtcgtcgcagagtgtgattgccccgtgtgaagaggtgttgatgacatcgaacggtccttcccatttgctgcgcaattttccgtggccgaaaagcttaaccctggagttgaacatcagtactttgtctcctggcttaaatttcttgatctttatccttttttcatgccagcgcttcgtcctttctttgtatatctttgcgttgtggtaagccttttctctccattcctcaagttcagcgatctgcatttttctccattctcctgctccctcaaaatccatgttccaattcctgatggcccagtatgctctgtgctcaagttctacggggagtcgacatggcttcccgtagactatctgatatggggacattccaatgggtgtcttgtatgctgtccgatatgcccacagtgcgtccggcaatctgtccatccatcctgttcccattttgttgaccgtcttttgcagaatattcttgatttgtttgtttgatgtttctgcttgtccactggtctgtgggtggtaaggagtggccacattgtgtttggctcccatttctcgtaggaggtctcggaaggttttgtcaatgaagtgagaacctccgtcacttatgaccattctaggggtaccaaatcttgggaagatgaattctgtgaacatcttcttggcatgcctcgcttccgcggcgctgcacggcatagcctcaacccacttggagacatagtcgactgccaccagaatgtactcgcagttgcgagacttagggaaaggtcccatgaagtctataccccaaacatcgaatatctcgacttgtaaattgtatgtaaggggcattgcatcgcgagtagtgattcctccttgcctctggcagcttgtgcaccttctgatgaattcttttgaatcttcgtacattgttggtcagaagaaaccactttgccaaatcttggcctgggtgcggaatgcaccgtattggccaccgtagggtgaggcgtggcatcgttctatgatcttaagtccttcatcagttggcacacatcttcgtagtaagccatcagagcagacccgatataggtatggctcatctcatatatgacggcgactttcatatttcagttttcgtttattttcccctggtggtatgtacttggataccatgtagtttactatgttagcataccacgggttagagtcacgaaccgtcatcagcatgtcgtctctcatgaaatcatttatcggttgttcctgcatgttagtgatctgcagtctagacaaatgatctgctacagaattttctactccctttttatctttagtttctaagtcaaattcttggagcagcaaaatccatcttaagaggcgtggtttagcatctttcttagtgagcaggtatttcaaagcggcatgatcagtataaattatcaccttggctcccactaagtaagatctaaacaggtccttttcttggcatcgttgtaagactttgtctaaattttgcagacaatgaccgaaagtctttccatagaccgagaagtcatccatgaagacttccatgatgtcttcgatcatgtccaagaaaatatacatcatacatctttggaaagatgcaggagcgttacatagtccgaaggacatcctacggtatgcataggtgccatacgaacatgtgaacatagtcttgctttggtcctccggatggataggaatttgatgatacccggaatacccatcaatgaaatagaagaaggaatgatttgccagccgttccaacatttcatcaatgaagggtagcgggaaatgatccttttttgtagc

SEQ ID NO: 19264 - DNA, 3483 bp, Oryza sativa
  Clone ID: PAT_MRT4530_24741C.1
ttattctgatcctcttatttttcccttctggaaccctccattcaatgacctaataccgccgatgttgactaaagaggagtgacagcttacgttgctagcccagagcacaacattcatgtgattcatcttcgttcacgagttccggatcagacgcccgactttggacgagctgaagtgacgcaatccttagcagtcaccagcaaacttgcccgttgcgcgaatctagtcaccggagatctcgtgtggggaagaacatcaccttcgaactcttgctcgcgctgtcgtcagaagcttccccggcgctccgatgacgtctacatcgcagcagcctacaaaaaccatctcaagagacagttcatacttggtagtggacgcctggtgctcggcgtttgaggtgttgatcaccaagacaccaaggcgtggcagagccggagacgcgaagtggggttcgaagcagacatcacccccaactagaagaagacaggaagaggaagaaagaatcgacggagagtgcgagaatgacatgtggaacacacctgaagactcagcaagaaaggcctgatcctccgccacattaataaaatttgacctctgctttggttgcttggaattgtttggagaagcgaagtaagtgaatccatccagaatctaggcgcttgtgtgtttgctttgtccatttagcggagatacgtttcctgatcccggtgcacttgagaatgttgtgtttttatcaaatttacctgacagcttcttaaaatgcaagctttgggttggtctagcttgatcttcagaaaacacccccacaggttgttggtttaacacagaacccagtggttctgctggaggggggcgaagagtctgcagctgacggccaagaagcaatattgtctcctggcattctgcaagcttctctgctgctgctgcgatctctttgtcctgctttattttaacacctgcatcctcatctacagatgaagtattcttctcattctcatacctttcaatcttctccttaagatctctgtacttcgccaaatcgtcctgatggttttgtctttcatcagcaagttcagttctcaaagtatttatttgtctatgcataacttctatttcactttctaatttcaacttgtgtaactcaagtgatttgtatgattcagccatacacttcagctgtgtctcagtcaagctattcgatttctcgcatgcagataactttgacgtaagctcttccatgtttttctccatcagactaaactcaagctttctacattcgatagtttcattgcactttgctaattccatctccaatttcctcttctccgatttcagttgttcatattcctccattgagcacatctgcactgtggttttgacaacaaatgcatccctagaaccctcaaagtcaggatcagaagacgaatgaggcgcaagtgaacaaatatcagcaaggctatctttaattggctcatgatgcactttgttttccaataaggtcactttatcaacatagtccagattattgctctcggtttcagtgatgctgtctctcggcaatgtgagtttaatagcagaatttcctgccaaaatttccggtaatgcaatcaccatttcggcaagagcattttcgtttagcacaactttgtcagctatagtggagaacttttctattttctcaaggattgtgttttggtgggaacttttaccttggacctcagatagttgtcttttaaatggctggaaaaaatcaagaatttccaaaatagcatgtcttagaccatgatccacatccctcaggttcttggattgctttgtcaaagatccattatcagcaagtccattcatgttatcaggctgattcttttttgcactcactgattctgcttcttccttgatatctcttaggatatttctgataccctctaggaccttgccaacattgttctgtggtgaatgagaacctaagagagaagaaattcttgagtgcaattttgaaagtggggagttctcaggcagatgctcactgctggatggtgtatctgggaactgcgaggatggccatgaatctctatcactttcccgtttagtgatggtagtgagagttgtgtgaactttagtggccttcttcttgtcaataaagcttccacattcttttccttcaggagataaacacgccaacctctccatctctagaaagtcatccatgagtaccatctgattggaattttctgtcaaactgcccttacctccattatctttcttgatgtgtgagagctcagatatcaaagcattggcccaagattcggcacaacttgttgcatcatcaactccgtcttcggacatggaagtcagacttggtgggttacttccattcaggctcagtgcaccatcatggtgaacatcaaggtttgaatttgttggattcttatactgcctagcactcaccatatgaacatccatgctgcggagcttgcctgctgtcttagcacatgtgtttcttgacacctgcaactcattattacgctttgacagcgcctcttttaacatctttgtttcatcctccatcgataacaagcgtgcagtcagaaattcattctctttctgcatgtgctgcaagttttcaagagaattatcaggggatggtgacaaaggatgatggaaattagaactccttgaaggggagcgtcgcaatctgttatcagcatggtctctgccccagctatccacttccagcttcatttgagctaatgcagctggcccgggtaactttttccgaacaagaccacgtaacctttggcactccgcttccagttttgatattttcttgacatcctctacatgttgcttggttgctacatcagctgaacgcacactcatgttcttttcttcattgcgaatttcaaattctttggaaagaacatgtagttcatacttcaatgaacttatctctttttcaccagattgaatagtgcctttcaacacttcgatctgagattctgcttgctctttttccccaccaaccttcatcattaagtgttcccgctcttcaagagatcttgagagtgcgtcattctcagcacattccttgagagcaccatccagatgggcagctctttcctcagcggctagcttagataatgtaacagtttctagttgatgtttcaacgccaaggcctctgcttcagctttctcccaacctgatacagcctcttctgccactttgacatgctgctttactaggctatctttggtagtaatatctgattgtgctgcagatagtttttcattcaacacattcaccttatcacatagaatcttcacttgctcttctgattcagtaagatttgtgtatctttctggtgaaatctgcacaaattttggtacttgttcatcctgctctgcttgaccggaactcttcaacacatctccagctgatgatttatcagaagacttctttttccaaggccagcttcttcgatccat

SEQ ID NO: 19265 - DNA, 688 bp, Oryza sativa
  unsure (1)..(688): unsure at all n locations
  Clone ID: PAT_MRT4530_24742C.1
attcggctcgagctgaccacaaagtacaggttggtaaacctttctcatcagcttcaacagagnctctcattgcaacaacccttttttagccataggctttgaatagagacattttccaaattagggggtttagaatgttgtttctaacgtagtgttgcttcttttcttttttctttttttctggtgcaggtggtctgttgtgggtgcaaagaatgggattcaatatggcccttttgctcttccccaaaacggcttacccatcacattatttcccaagagcaagtagataatcaatcacacatccaatacaaccctggcttcatagtagctttctaaatatggaaagaattgcttcatagctctcaaaattggtttccacagataatgataaagacacagaccatattgcaattggataaccaaacaaagggagatcaacttttcccttcttttttgtccaagagaaacccaaaggggtaatcttgacaaatagcatacaaacaggaatgtcaagtgtatatagaggaggtttcacagcctgagcagatagtattaagttcttttcattttcttattttttttatctttcaaatatgaggaaaagtcctcataagattgtattgatgcattcaactaattagttctgtatccataagaatgccgcaaggccaaaataaagtgaaacatt

SEQ ID NO: 19266 - DNA, 289 bp, Oryza sativa
  Clone ID: PAT_MRT4530_24743C.1
ctcctctttaacgtgcgactactctaccgaccgggcttgggtggggtgtatataacctttagacgaaactggcgacggcgaagactactccgtttgtggtgccaaatgtgtgaatggctcatcgaatggaatgactttctagcacatattgttggcatggggcgattggataggcacgaacttagagagacgcgcacaatggatgttgtgctagagggcctgatgtggatctcaatatgaagactatctcggtcgaaggttggggtgtaacaaagcaaggcagacaatg

SEQ ID NO: 19267 - DNA, 1777 bp, Oryza sativa
  Clone ID: PAT_MRT4530_24744C.1
ggttgttgtagtaaggtgtaagagctttgaagcaatcatcattaataacacttggtatgaattaacacagttgagcatgagctcaaggttaaatctcttttccatctttttctctacctgtgaatcagtgaccaacatgctatacatatgccattgatttaggcctgaagaacaatgactgggaaacaaaaaatgaaaaaaagaaagggggagaagaatgaacaaaatttgaacaatgaagtaccaaaattatcttctcaaatccgttcgaccatgaatcgtgtgatcaactcgcgttcaccagttcatcttcatcatatgagtagtccaaagttcttgtaactgagcctccaaactgttttttttcgccttgtaccatggaaggaacttctcagaaggaaaggtctctcatgtcgccttcgcgttcaggggctctgtatgaatatcccaattcttctccagattgtcgcctcactatgctggccctttgcatcaggcgaacaagttgctgaactacctcagacataggagggcgaaactcggggctcaggctgacacacagcgcgattatgtccgaaaaacgggagagcgatttagccagggtacattccatttaatgctggatccaccatcttagcaagcgcatcgatatcatgaagctgtggagtagcccatcgaacaagagattgttctgatctctctctagaactgtctagtggtttccgccctgtcaatagctctaacatcacaactccaaaactgtacacatcactctttacggtataaattcctgacatggcaaactccggggcactgtatccaaatgagccaaacacctcagttgaagcctgtctctccgtgttgggtgtcaaggcggcaagcccacagtcagataaatgtggattatgctcttcatcgagtaggatgtttgaggacttaaagtttctatgcacaacagatggcaagcacacctcatgcaggtactctagcgcccgagcagtccctagggctacccttacacggatgttccatgtaagcttcctgctcaactcatcagagtagtgcagcacatcatgcagtgttccatttccaatgtactcataaacaagaagcctttgcccatgctcaacacaataccctgtaagtggcacaatgtttggatgccttagccgtgacatgctcgatacagcctcaagaaaattgtcttcttcctgcaaggaaagggctgaactatctatcttcttaactgcaagaacctttccattggggaaatcggccttgtaaacacgaccaagtgagccctctcctagaagggaatcttgacagaagctattagtggcaacttggagggaagcaacagtataaggcgttgcagtgattgggacctttgtctttctcatagaaccagttttaccataaatcctctctggagtcattttctcagcaggtgagatcttcatagttgctacagaagtattctcaggactctgctctgggatttccctgttagaagctctctctatgtttactgatagtggacctacaaaatcttttgaattgctgctggtatcatcctttcttttctgagcattgcgaatgcagaataccaaaagaagaagtgcacataaggcaccaactgttgagccagcaactatcccgacaagcgggcctgtctgaagaccttgcttcttgtcaccctgaccagctgggcttactgagccttctggagcatctccacttccccgaggatggctgggccgattacgtggtcttctac

SEQ ID NO: 19268 - DNA, 471 bp, Oryza sativa
  Clone ID: PAT_MRT4530_24745C.1
ctggaagggatcaaggccggtgacgtggccgtcgcggcggcatccagcggcggcggcgccatcaccgtcctgcagctcgagaccttcaggccgttgagctacctgcccgacgccgcgtaccaggcgctcgagaaggttgtcacggccgccctcggctcgccgtcgatggcgaacccgccggaacccttcgacctttgcttccagaatgcggcggtcagcggcgtgccggacctcgtgttcacgttccagggcggcgccacattgacggcgcagccgtcgaagtatcttctcggcgacgggaacgggaacggcacggtgtgcttgtccatcctgagctcgacgcggctggactcggctgatgatggcgtgagcatcctgggaagcttgctgcaggagaacgtccacttcctcttcgacctggagaaggagacgctctccttcgaacctgcagactgcagctcactcacctaa

SEQ ID NO: 19269 - DNA, 970 bp, Oryza sativa
  Clone ID: PAT_MRT4530_24746C.1
actggtccagtaatgaccaatgaccgaagattcaaataattgagaagtgaaatcagcatcaggtgcaatgtgcaatggagcaacaacttcctaacttcaagcttatttacattacacataggttaaagaggataacagtgaggatagctgtttgcaagaatctccttggatataagtacactgttgaaactagaataggatgaaatggtgaaaatttctaacaggaaaacgggttactttgaccttaataatgtaatttctccccaaaacgaatttcagaatacatacctagtcctagctgagaaatataaagccgcggcgatttgacgcacctctatatgatgaataatttacacatgtatcagccttagatcggtcattcttgattcgcaggtctttggcctgtatgtgccgctgccagaagccccactggagattttgacttgacagtagctcggtaagatacttgctacacaatgtgttgcgtcttcagatttcagtaatgtataagccgatagtcaccttgtcacagctgtaccattctataaatatataatcctatttcataccaatccatgagcagaggaaccactgaaagactcccaagggaaatgcaactaatgcgttatcgctcagaaagctgttagatgatttcttcaagatgactccaacttggctactattcacttgacccactgtttcttgaggaggaatctcgtgagtgacgttttccttccattgcttctttcttttcctggcaactgtggcaaaggaaaggcccatcccatggacgcagctttcctgactttgacaaaccctcatgtatggatataccctgaccagactctaactctacttgacaaattgcacatatgaagagcttgaacatattccgaactggatattcagaatctagccgtcttgaaagggaaggacatccatcctcaaagacttcctccaccaaatctgg

SEQ ID NO: 19270 - DNA, 314 bp, Oryza sativa
  Clone ID: PAT_MRT4530_24747C.1
ccgggccccccgaattcccggtcgccacccgtccgccggctgttttgtctgccgtcaaacacgacccaaaggggggggtttgtactaaactgccggaggacaattccaatgaatcaagcactcacacaaaacctggaggcactgacttacaacaagactgaccatagttgcacctcacatctgaaacaaatccaccgatgatccggctggtaaacgacgaccttgactgatctgctgagggatcttcattctctgtcaagaccaggactcctgccacatgcctgtcttactataattcgattgaaagatgacac

SEQ ID NO: 19271 - DNA, 145 bp, Oryza sativa
  Clone ID: PAT_MRT4530_24748C.1
ttggcgtgtggttgaatttggatttgtgctatatgtcctctggacggtccgacctagatcgacattggatggtgcctgtcgctacggcaggtttgcttgagctagactagctcgaggagtctttggctggagtactgatcaggta

SEQ ID NO: 19272 - DNA, 952 bp, Oryza sativa
  Clone ID: PAT_MRT4530_24749C.1
gcagcaacaagcaaacctaacatctcttcctctctcctctcctccctgcgacccgcgaaccacccaacccaacccaaccccaccgcagccgaagccgaagccgcgggaggggagggagataccgccgcccccccaaccaccaccgccggccacctcggatctcggctgcgtgctgcggcggcggaggaggcggagaaggaaggaggagaagatgttctatggggcgatggtgtgggatccgtggctgatcgtgtcgcagatcgtgtgcctgcagtgcctctactacctcgccctgggcctcctcatggcgctcctcgtcggcacccgcgtcccgcgcctcaccctcctctacctcttcgacttcgccacgctcaccccgcgcaccaccaccggatggtgcgtcatcgccgccttcctcctcgccgccgccgccggtgctgctttcatgctttatgtgattgagagagctaagaagtgcctggactttgcagccaccctctacatcattcatctgtttatttgcattgtttatggtggatggccagcttcagttacatggtgggttgttaatattgctggtttggcgattatgtctcttcttggtgaatacctatgtataaggcgggaattaaaagaaattccaatatcacggcttcgtgcaagtgtttaatcttacagactaaaggagtatagatggccttcaaatgttgttaccccccaagagatgcttgttaatatgtttctttaggaatacaaagactcgtgatacatgctttcctctatggtttacgaccaatactcttcaaacctgcaaattgatgcatgatctcccagtaaagccaccaggtagagactgacagaacaaatcaagggttctgagaccaagcatagaatgccaactcaatttttaaagcatgtatcaactattcaagtcttctcttctctatggata

SEQ ID NO: 19273 - DNA, 234 bp, Oryza sativa
  Clone ID: PAT_MRT4530_2474C.1
acacgaccagatcttacatggtctttcgtctctgaaggatccgacaaggccttattggctctgggcgtccccagccgaagttccctcaggttcctcggaggccttgtcaagacggcgggtaatgggagaatcgctacatcgctggtcgaggaccaggcagtagtcgtaactcgaccacttaaagtggaagtagtgggagaaacgccacatcgctggtcgaggaccagacagtag

SEQ ID NO: 19274 - DNA, 2994 bp, Oryza sativa
  Clone ID: PAT_MRT4530_24750C.1
atggcggcgacggtggaggagcagatggtggtcaaggccatccgggaggagtgcccatgggagtcgctccccaagcgcctccagtccacgctccacaccaaggaggaatggcaccgcaggattgtggattactgcatccgaaaacgattacaatggaatacttgttttgctcgtagagtgtgcagggaaggggagtactatgaggaaatgatgaaatacctccggaggaatcttgcattatacccgtatcatcttgcagactatatctgccgagtttcgaggatctcaccatttagatattattgtgacatcttgtttgaagctatgaagaatggtttgttcagcatagctcttagaattagcctttatcttcaactgattatttctgatggcaataatttagtaatcactttgaaacatggagagcaaccatatgacagtattccaaacttcactgctgctgatgccttgaggcttactggcgttggaagaaatgagttcattgatattatgaacaaatgcagatcaaagaaactaatgtggaagctgaataagtcaattgcaaaagaattattgcctacacagcctgttgacttcccaatcgatccttggtggggagtttgtcttgtgaacttcactatagaagagtttaagaaactttcagaggaagagactgcaacaatagacaaaatatgcaaagaagaagccaattcctatgttctatttgacccaaaggtcatagatggcctttataaaagaggtttagtgtattttgatgtgcctgtttaccctgacgaccgctttaaagtttccaggctcgaaggttttgtttctaacaaggatcaatcatatgaagacccaatcgaagagctactttatgctgtatttgttgtgtcaagtgccaatgctactgtagctgaattggctgcaactctactagctgacctttatcagctgcaagcagctgcgtcgtttgcttgtcgactgggctgggctgtaaaacttatggatgctgactctgtacttgaagatgcacccacttttcccagtaacattctgagtgatgatgaagaaggttcaaatgcaagcatcaattcagaaaagtctggccaacagttgctcagtgttgatgctggaccaaggaaaatatctggaactgcccatgtagcgttggttgtggatgcgaatgttacttcgtacttgatgatgggctcattgtcaccaggtttaaaatctcatgctgtcacactatacgaagctggaaaattaggtgattcttgcattgcagaactatgcagtgatctggctagtttggaagggaagaagtttgagggtgtgcttgaggagtttgctaatcatgcattcagtcttcgatgcttcctggagtgtttacaatctggtggagtttctaccaatgtgaatattgataaagctggtgaagcaaagcttacaacaagctccttgcaagataatgttactgcccatttgaccaagataaacattgaggacactgatgaaatgccccagcagaagcactctggtttaaatagtagtgatgggaaaatgttgacttcatcagcgactttattggaaagtggagaaggcatggagggaaatgatgttgagggtagtggcaccactgaactagatggctcaactgacatcaatgtggttaagactaaaaggaagtacagagttgatatcctccgatgtgagagcttagcttcacttccaccagcaacactggaacggttgtttctccgggactatgacatcattgtgtctatggttcctcttccttcttcatcagttcttcctggttcgtcaggcccaattcattttggtccaccctcatactcttccatgacaccttggatgaagctggttttgtatacagcaggggattgtggaccattatctgctgttttcatgaaaggacaacgcattagattgcttcctaaacctttagccggttgtgagaaggcactgatatggtcttgggatagctctgtggtaggtgggctaggagggaagtttgaagggaacttagtcaagggcaacctgttgttgcattgcttgaactcaatgcttaaacaatcagctgttatggtgcaaccacttagtgtaaatgatcttaatgcatcaggaaaccttgtcacagtggatatccctttgcccctgaagagtgatgatcagtcaattgcatctgtgatagctcaaactaatttgccacaagaacaggtcttaaatttggcctctgtattaaaagacctgtccagtaaatttgagttgagtacacttggctaccttcggttattaagacttcataggcttactgaatcggatgaatcacacctagaaaatggaagttaccagtgggtgcctttgagcttggagtttggaatccccttgttcagtccaaaattatgtgagcggatttgcgaaagggtggtcgaatcctgtatacttcaaaaagaggatctcgctgaacattatgatgtgatgcaaactgtaaggcggcggctaagagaactttgcagtgaatatcaggcaactggtccagttgctaagttgttcaacaagcgaggaagctcaaaggatttgccccgtgttttaatcaacaccatcagtggcagatggaatccagttaatgatccttcagcaccaagtgaacatgagaggctgaaacttgctggacggcagagatgccaaacagaagtcgtgggatttgatgggacctttatcaggtcatatgcacttcctcctgagcacgatgaggctggcaccaaatctttatctgaagaacaatcatcagctcacgatggaaaaccagacacagaagatgcagatagcaaggatgtactcttaccaggtgtaaacctcatatttgatggagctgaattgcatccattcgacatcagtgcttgccttcaagcacgtcaacctctctggctcatagctgaggcgtcagctgcttcatcgaccatgatataa

SEQ ID NO: 19275 - DNA, 530 bp, Oryza sativa
  Clone ID: PAT_MRT4530_24751C.1
agtgcgaacccacaagggattttaaaatttttgcccgagttcacctgcgatggaaattacaatttcgtatcaagcatgtatttttaaccaactcatgtcaacacctctgacgcaatacacacagggcacatatattgacatacatgttcagaaggacagcatgatttggaggttcgagtagtcatgtgattggccgccaaactgaactctgctggaatgagcttaagaggaagcactggaaactggatatattatctgcaggataaagctaaagaagaatcgaatggtgcgatacagaccctcgctaaagaacacaggtttcaaggtgctggtatctagccatacaaattgtcaagtaatctcttttttcgtcaattcaatgagactatccatagagaagagaagacttgaatagttgatacatgctttaaaaattgagttggcattctatgcttggtctcagaacccttgatttgttctgtcagtctctacctggtggctttactgggagatcatgcatcaatttgcag

SEQ ID NO: 19276 - DNA, 410 bp, Oryza sativa
  Clone ID: PAT_MRT4530_24752C.1
gggcttcatttacccaattatttacctgggattgaattattccccgggggcttaaaaaatctatagcccctgggcgggtttttatgaacaggggttaaagaagagagaattaacgggggcccaaaattttaaatgggggcagccagcccatcccagcccagcccagttaagctagcaagctgccacgtcttacggggacgggacggggggaatccccggggagggaatttacccccacttgcggggggcggggatgttgacctcccacggggggtcggaaaaacccgccccctcggggagggggggggcccaggggaacccgaacttcccccgctccgacagggggaacggggagggcatggccccccccatgttgggggaaacccgcccccacccgggggggggggggt

SEQ ID NO: 19277 - DNA, 771 bp, Oryza sativa
  Clone ID: PAT_MRT4530_24753C.1
atggtgtgggatccgtggctgatcgtgtcgcagatcgtgtgcctgcagtgcctctactacctcgccctgggcctcctcatggcgctcctcgtcggcacccgcgtcccgcgcctcaccctcctctacctcttcgacttcgccacgctcaccccgcgcaccaccaccggatggtgcgtcatcgccgccttcctcctcgccgccgccgccgggtatatctgcttggtacctgctgaaattttacacccaaatcttccatttaatatgagggccaacaagtttcattctccaaatcaccctaggacagcttataacagagaacgggaactatacctccactttctaattctaccagcattcattacagatcgcagaatttactacccacatattacgcactattacacatttggtgattactgcaatctaagaggccctgtggaaaacaactcccttttgcctaatttcttcatgcattttaacagtgctgctttcatgctttatgtgattgagagagctaagaagtgcctggactttgcagccaccctctacatcattcatctgtttatttgcattgtttatggtggatggccagcttcagttacatggtgggttgttaatattgctggtttggcgattatgtctcttcttggtgaatacctatgtataaggcgggaattaaaagaaattccaatatcacggcttcgtgcaagtgtatttatgctgttgactgattgggactataggaaagggagagtacaaaagttcaactag

SEQ ID NO: 19278 - DNA, 247 bp, Oryza sativa
  unsure (1)..(247): unsure at all n locations
  Clone ID: PAT_MRT4530_24754C.1
gccggagataatccccacgacgcactagatgctctagcacaccgactggatcaccggcggcccgggctccgggatcgtcaggttcaggttgtctccgaacccctccgcgtacggaggctcgccgaccaccacgatcgcgtattcgtacttttttcctaagaccacgctgccgaccgggnacgccgagaacaccaccgacgagcagggagcaacgggggccgagaacgccgacaggaccagcgggcca

SEQ ID NO: 19279 - DNA, 116 bp, Oryza sativa
  Clone ID: PAT_MRT4530_24755C.1
ttacatctatactggcgcattggataacgaggcatgagatctagtacctgaggcactggacactgtgggtcgattactgatgcatccacatgtgacagtatggcactgtgctgaat

SEQ ID NO: 19280 - DNA, 401 bp, Oryza sativa
  Clone ID: PAT_MRT4530_24756C.1
cccatgcgtgcgcccacgcgtgcgcttttcctagttatattgcattcaccgactattgaactgataatgaatccaatggccccaacactaccaccgccggcacccatggcggcggggccgacagcaccggaggtggaggttgaacaccacttatcgagtgctggattacccaaatggactagctcccagttaaggagtcaagatatccacagtaacggccctgttattgacgagacaatctttgccgatcctgacgtaatgggcacctattgtgatctcacgtacactaacttgattagtgactgctttgtggatagacagccaaaagtatacgagacgtatgctactaggcccacctgaaaccaggactaccgaggggcctgattgcagtctagcgataa

SEQ ID NO: 19281 - DNA, 573 bp, Oryza sativa
  Clone ID: PAT_MRT4530_24757C.1
atgcggcggtgccgagcgtttggtggtgacgccgtgcccgtccacctccccatcgattggttggttcttaatggcttcctcaagcgggagaggggagagcacggtgtcggcggtggcggggagggaggggggtgtcgtcagcggtggccggtgcggcggttgcggatgcggaagcagagccacctcgatgacctcacctcacaggtggcacacctccgccgcgacaacgcgcatgtcgccgccgcgctcagcctcaccacccagggcctcctcgttgtcgacgccgagaatgccgtccttcgcacccaggccgccgagctcgccgcgcgcctcgcctccctcaacgacatcctctgctcacatcgcctcaccgctgaaactgccatggtagagaccaacaacaacaagaagaaaatatacttgccattaggggcaatcttgtcatttcgtaaaaatactcgccactttcagtcggaaaataataaaataatgcgttcggtgtcctatggcaaatttcacatattttgtagtgtcctcgagcagtttcacgttttctcggtgtacctcagctaa

SEQ ID NO: 19282 - DNA, 1777 bp, Oryza sativa
  Clone ID: PAT_MRT4530_24758C.1
ttttttttttttttttgttcggggataccatatccaaggttattattattaacttatcagtgtcagtgctacatcttccactacagtctacaggtcctcctgcaaagttaaacgaagcacttccagcttctggtacaaaaggaaagattagattatgcatggtccatccctaacaaaactggagatcactccatggcaaaaacttaaatcttctaaaagggggaacaagcaatcgcaagccaaagaacgtgcgactgatcctgctactaatggggcatatggtgtcaaaccaggagcattactttgtgtaaaatcttcaatccagttgcgaaataggtcatagcaaggcaaatatattccaacagttggtactgctaacgccaagcctgcatttgtacctctccataatctaccaaatccttcctgtctaacaactttcaagaatacatcaagtgttcccttgtactgaaagcagtcaggtgggcaaataggctcacttcccaaaatgacaccacgtgtgcatgacggcgaacatctgaaatcagataatatcgcgtccgggccgagcgacgccatctgcgacggctggtagtagggcacccccgccgcctgcgcctgcaatctcgtcttggcgacgtcgagagggttgacgatgatggcggagacgaacgcggcgccggcggcggagagcgcgcgctcggccatcccgagctcctggtcggcggccgcccccgccaccccactttgctggaacgggctccagtgttgaccagcatatagcagagaaaggaacatcccgagcaagttgtgcggtatcccgccgcctccgccggcgctggagagatcgacgcgggcggcggcggcggtcatccaggacaacgccaagcaatgttttccacattccaggaggctttactccaggacgaaattctttatatgcctgcatccgtgtccttgccaactcaattggggaacaagcaatgcaagccaaagaacgtgcgactgatcctgctactaatggggcatatggtgtcaaaccaggagcattactttgtgtaaaatcttcaatccagttgcgaaataggtcatagcaaggcaaatatattccaacagttggtactgctaacgccaagcctgcatttgtacctctccataatctaccaaatccttcctgtctaacaactttcaagaatacatcaagtgttcccttgtactgaaagcagtcaggtgggcaaataggctcacttcccaaaatgacaccacgtgtgcatgacggcgaacatctgaaatcagataatatataaatactttctccataggtaaatatagcagacacaaaagcaatcttgctttgagaggcataatataagcaggaaaatacttcatatgccaacatcaaacaaaacagcaagtagcacgcgtccgggccgagcgacgccatctgcgacggctggtagtagggcacccccgccgcctgcgcctgcaatctcgtcttggcgacgtcgagagggttgacgatgatggcggagacgaacgcggcgccggcggcggagagcgcgcgctcggccatcccgagctcctggtcggcggccgcccccgcaaccccagcctgctgatgcggccccgagtatccgggctgtgaggaggaggaggaggaggaggaggcccccgagccgggtatgccgccgcctccgccggcgctggagagatcgacgcgggcggcggcggcggtcatccaggcggggaggcccccgccccctctggaacagcccaccat

SEQ ID NO: 19283 - DNA, 318 bp, Oryza sativa
  Clone ID: PAT_MRT4530_24759C.1
atggggtggccggtcagaccgccctcggctcggtcagaccgccctcagctcgatctgaccgaatacgactccgtcggctctgtatcccccaaaccagagcatgacactcccagtctccagggggccggtctgaccgcgcatgtgccgccgttcagaccggccttatgcaccggtcagaccgccgtcttgtggtcggtcagactggccagggcacgccggtcagaccgccactatgcgcccctgtccaacatcatgaagaagaagtggaaggaaatggtgaagtatgacatcctccccgccaaggacatcatcatctag

SEQ ID NO: 19284 - DNA, 441 bp, Oryza sativa
  Clone ID: PAT_MRT4530_2475C.1
atggcggccgggtctcccgcgcccgtttccccctcctccggccgccctttctcactcccaaccctatataaaccctccccgaggctccccaccaccgttatcgccactcaccgccctgtctcaccgccggaatcgagctcgcgccgtcgctccctctttccgccgtcgccgtcgagctccggtccgccgccgtcgtcgcccccgaccacctcccacctcggggccgccttcttcggcgtcgccggatccttgccgaccttggtccacccctccgtttcgctcgtcgaccgccggagcaccgtcgaccccgtccacccgagccgcgccggcggctttcttcggctccggtcccgtttttccgtcgtcgcagtcgacccggggggcgcaggcgcgcttcctcccgccggccgcaccgacgtggccgcctccgggcgcgcctag

SEQ ID NO: 19285 - DNA, 231 bp, Oryza sativa
  unsure (1)..(231): unsure at all n locations
  Clone ID: PAT_MRT4530_24760C.1
gnatccnttttgagttagatactgatgaccatgaagagtttaccatatcctgtaaccaccagatttatctcctggatttggtccatgaattacgatttaggntggaaaggaatattttaagttctattttgatataagtttactgcagctttaaagatattttttttgaacattgtattatccaagtgttattagatattagagtactggcagtgattcttttcaatcctt

SEQ ID NO: 19286 - DNA, 1358 bp, Oryza sativa
  unsure (1)..(1358): unsure at all n locations
  Clone ID: PAT_MRT4530_24761C.1
cgaaaatcctcagcagctagcacgatcgaccagcctaccagcatggccaccgcgcgagcagtacgcctcattgcctcaagaccaccatctaccaatctccgcagcctcgtcgtcgtaccagggcgacgccgcctcctgtccacctcgacggaagcgggtggcgcaggcgatccatccgtgcattccggcgacccgccgagtgacgactaccccgaccgtcctcccaagttctccggcgccgaggaggccaccggaggcggcgaccacggaaagaacccgtcgacggcggcagcaacgccgtcggaatccaccaaggagcgcgtcccgccgttcgctatgtctgacaagcttgggtcccaagagctcgccgacccggcgggaggctcgtcgttcacgcagaagcggcggcggtcgtcgtcgtcccggccagctgactcgcgcgaggaggcgacgccagggggcgaggaggcggcggggcggaaagtgagggaggaggacagggagtactaccagacgcacaagccgtcgcctctcgcggagctggagttcgcggacacgaggaagccgatcacgcgtgccacggacggcggcagtgccgcggacaggttgtcggacgtacccgggaaggtggcggaggacacggcggacgattcgctggcgcgcgctgaggccatgttccgcgaggtaaccccgagtggccgcactcgcgcgcgctcgcggagatgctggcgcggcgccgcggcgaaggagacgctgcggggagcaggagcagtgcgccttggggaagctagtcaggcgtcagctgatccgcgggaatgtagacgtgcagtagtagcatggggggtatgcaagaaaaaatgttactcctgctgcgtctactgatcctatgccaagaactaaagggtgcactcgatcttatgttaaaattgcagatgttccttttctcaatttgatatgttgctgtgttcatatgcgccgtcgtatcatcgtttttgttttttgatgtttgtctcgtggcacgcatattgtatagcaggtttctggaaccgtgttggcttattttcacgtttacaggttaaaaaaaaaaaaaaaaaaaaaaaaaaaaaaaaaaaaaaaaaaaaaaaaaaaaaaaaaaaaaaaaaaaaaaaaaannaaaataaaaaaaaaaaaaaaaaaaaaaaaaaaaaaaaaaggggggggccgttttaaaggacccaagtttacttccgggggtttgcaattttaaattttttttatagggcccccaaaataaaatacacgggccgggtttttaaaacgtggggacgggaaaaacctgggggttcccaaatttaatccctttgaagaaaatccccttt

SEQ ID NO: 19287 - DNA, 1668 bp, Oryza sativa
  Clone ID: PAT_MRT4530_24762C.1
atggcggcagagatgatcagctccgctgtcgtgggagaaacgctgaacagggtcgtgtcgaggctggtctccggcggcagccacaacgacgacgggatgaggggtaataacatggagaggctggagatggcgcacagcaggatgaagccgtcctcgacctctcgacgcggtggccggctgaagcgcgccacggaggagtgcgacggcgcgctccggcgccggcgctgcaagcagcgcgccgtcgaggacgaggcggcggcggtgagccggtcctcgttcccgcgacgcgtcgcccacgcggctaggtcgtacgtcgtctcggcgctcatcggcggctacgactcgtcgtcgagctcagacgtccggagattcgagagggtcgcggacggagcgagcgagttcctgaagctagtcgagcttggcgggacaacacggccacggcttgcgttcttcgacgaccctctcatcggccgtatcatggccggcgagacgctgaggtacctggctctccggggcagcaggttatactacgtgggcgcgcggccgatgagcttcgaggagcgcggggtggaagccatggtggggttcgtcgtgcaggattttgaggcgccgtcgaggagtttcagcgtggggctcatgatgcgcctctccgagagtaccgacgtgcttggcaccatgatcgattgtatgcagtcagttgtcacgtcccacttcagggttgcagctgaagaggtaaggaaagagctcattcagctgccaacccaggatttgacgtgggtggcacgctctccttacggtcacaataaatactggatcgacgtccacaccaccctcacccagtggtatcgtccaaacccgctctgttgtaccgaacaccaacacagccacctggacgacatgggcacgtcgccgtcgccggcgacgccgctgtccaccacgtacccggagcatgtcatcgcgctgcagctgcagtgctacgttccggcgccgacaactgatcaatcccctaatgacgaccatgggcgtgaagaacagctgctgccaccgcccctgaacatgaagctgagcatgctgttcatcccccatgacaccccggatccggaggaggaggacgacgacggcgagaagcacggcggctcatatggtcaccaccaccagagccgcgctttggaggtgatcgacgaggaggagcgagacggcggcgcgtgccagctgcaagacgtcgacgagcggctgctgcccagggcgatggatcgcctgcgcaggaacgcggcgtcgaggacgtaccaggtgtgcctgacgtccggccacggcgccgcgcacatctgcgtcgagaagacgtcgccgtcgacggcgagtgccagcggaagaagaagaagaagaataagaaggagcagtacaggcggggctgccgccgccgccagatcggcggcgcggtcgtcggttgggacgcgccaaggcgagacggcggagaagagacgggagaggtacagtatagaggggtggcgtgagtcggcgagacagctgcttaagctgtgggtggtgcgctcgtcggagaagctgcgtggctccgtcagctcgtggactactgaacactactacaaaaatacccctcagtgtcagttcttaagttctaataggtatcggtttcaggcccaacacctttag

SEQ ID NO: 19288 - DNA, 1704 bp, Oryza sativa
  Clone ID: PAT_MRT4530_24763C.1
atggcggcagagatgatcagctccgctgtcgtgggagaaacgctgaacagggtcgtgtcgaggctggtctccggcggcagccacaacgacgacgggatgaggggtaatagcatggagaggctggagatggcgcacagcaggatggaagccgtcctcgacctctcgacgcggtggccggtcaccgacgtgtccctgctccggtggcgacgcaggctgaagcgcgccacggaggagtgcgacggcgcgctccggcgccggcgccgcaagcagcgcgccgtcgaggacgaggcggcggcggtgagccggtcctcgttcccgcgacgcgtcgcccacgcggctaggtcgtacgtcgtctcggcgctcatcggcggctacgactcgtcgtcgagctcagacgtccggagattcgagagggtcgcggacggagcgagcgagttcctgaagctagtcgagcttggcgggacaacacggccacggcttgcgttcttcgacgaccctctcatcggccgtatcatggccggcgagacgctgaggtacctggctctccggggcagcaggttatactacgtgggcgcgcggccgatgagcttcgaggagcgcggggtggaagccatggtggggttcgtcgtgcaggattttgaggcgccgtcgaggagtttcagcgtggggctcatgatgcgcctctccgagagtaccgacgtgcttggcaccatgatcgattgtatgcagtcagttgtcacgtcccacttcagggttgcagctgaagaggtaaggaaagagctcattcagctgccaacccaggatttgacgtgggtggcacgctctccttacggtcacaataaatactggatcgacgtccacaccaccctcacccagtggtatcgtccaaacccgctctgttgtaccgaacaccaacacagccacctggacgacatgggcacgtcgccgtcgccggcgacgccgctgtccaccacgtacccggagcatgtcatcgcgctgcagctgcagtgctacgttccggcgccgacaactgatcaatcccctaatgacgaccatgggcgtgaagaacagctgctgccaccgcccctgaacatgaagctgagcatgctgttcatcccccatgacaccccggatccggaggaggaggacgacgacggcgagaagcacggcggctcatatggtcaccaccaccagagccgcgctttggaggtgatcgacgaggaggagcgagacggcggcgcgtgccagctgcaagacgtcgacgagcggctgctgcccagggcgatggatcgcctgcgcaggaacgcggcgtcgaggacgtaccaggtgtgcctgacgtccggccacggcgccgcgcacatctgcgtcgagaagacgtcgccgtcgacggcgagtgccagcggaagaagaagaagaagaataagaaggagcagtacaggcggggctgccgccgccgccagatcggcggcgcggtcgtcggttgggacgcgccaaggcgagacggcggagaagagacgggagaggtacagtatagaggggtggcgtgagtcggcgagacagctgcttaagctgtgggtggtgcgctcgtcggagaagctgcgtggctccgtcagctcgtggactactgaacactactacaaaaatacccctcagtgtcagttcttaagttctaataggtatcggtttcaggcccaacacctttag

SEQ ID NO: 19289 - DNA, 288 bp, Oryza sativa
  Clone ID: PAT_MRT4530_24764C.1
attttatttgtgggttcattgaaggtgtatgcggctttttttttttttatggggacagggattaccgcattttaaaattttcttccatggaagaatgtatggtaagttgaaccacttcaatttcggggcgaggaattttaaaagcttatttacgacttatttagcaaaacttggcgataaggctattttaagtttttcatacaagcattggcattgcaaaggtacaccgagagggttgaaacaaaagtgcaaactggtgatggagacaagccgaattaggttacgctt

SEQ ID NO: 19290 - DNA, 347 bp, Oryza sativa
  unsure (1)..(347): unsure at all n locations
  Clone ID: PAT_MRT4530_24765C.1
ccgcgacaggccgncacgccccgggcaagggcnnccgcnccgcgccgggccncagcgagggcggcccgcngnncggcnncaccaaggccaacgagcngnncgncggccggcncgcgcagcncggcancgcccccnccaacaacggcgagaacaacaccggcaagggcgcccncgcgcagcncaacancgagaccgngcgccccaacaacgagaacgagccgcnncgccncnncaacgncgncnncnncnncaacgccgccancaaccccggcaccggcaagnncgncagcgacgacgacgaagagnagaannacgaggancgancgancnaccgaggnnncgccgcc

SEQ ID NO: 19291 - DNA, 2187 bp, Oryza sativa
  Clone ID: PAT_MRT4530_24766C.1
atggcgcagccgcctgacgccgccgccgccgccgccgtcccgccgccggtagtcatcgaccgggatgtctggcacgcctgcgccgtcccgtactccggcgtcctccccggcgtcggcacactggtctactacatcccccatggccacatcgaacagtgcgccgaggatcccgcgctgctgctctcccgcctcccggaccccatccaccccgtgccctgcaccgttgccgacctcgtcctcgacgtcgacgccgagagcggcgaggcgtacgccaccatctccctccttccaggcagccacgacgacacgaccgcgcggcgccaggtccccgcccacggcgagccggggttccgcttcttcgagaagcagctgtcgccggccgacgtcaccagcaacgccctcgtcctccccgccggcgccgagcacgtccttccgccgctcgacatcgccgcctaccagaccgcccggctcttcgacgtgagggacctgcgaggcaagcgcttcgagttcgtgcacatctgggacaagaagcgctgccgctacatgctcggcgacctcggcgtcaacgacaacgacggctggagagggttcgtcaaagccaagcgcctcgccaccagggacaccgtggtcttcatgcgccgcggcggcggcgacggcgacggcgacggcgagctgcttgtcggggtgcggcgcgcgccccgcgcgcgcggcggccaccacccgaggcccggggtcgaagacaacaaggtggtgtccgaggtgtggctggcgatgcagggcgtgacgccgttcgaggtgacctactacccacgggagggcacattcgagttcgtggtgtcgcgcgacgagtacatcggcttctccttctcgccgttctaccctttcgttcccgggacgacggtgcacttgcggatgaacccgctgcagatcgcccaatcgatttcgggcaccgtcaggaccttcgaccatctacgcccatggcgcatgctcgaggttgattgggatcaagcggcctccccgatctcctacaggatacacagacaagttaattcttggcaagtcctgcgtcagcctcagccagcagcaactacttcggctgtgcgaattcgggatgccattgttgccaccccgcaagttcagataatggcgctgccgaggccgccgccgccgacgacgacgacgggaatggtgccgtccgatgattcctacgccatgatttccctctttccgggcgactgctacgtcacgcaccgcccgcttcccgccgcgcgcgaccccgtcggaggccagcgggagttctgcttcttcgacaagaagctgtcgccgagcgacgccgcggcgaacggcggcggcagcggcgccctcttcgtgatccccaagcccagcgccgccgagcacgtccttccgcggatcccggacctccgcgtgacgaacctgcaaggcggccgctgggagttcggccacacctggagcgacgccgacacggaccgccgctcctcctcccacacgctcgccgccggctggagcgcgttcgtcaaggccaagcgcctctgcgtcggggacaccgtgatcttcatgcgccgccgccccggcggcgagccgctcgtcggggtgcgccgcaagccgcacggcggcatgccggtcgggatccccgacaagcacgtggcggacgcctggctcgacgcgtcgtccgcccaaccgttcagggtgacctactgcccatggcagggcacggcggagttcgtggtgcgccgcgaggaggtggaaggctcgccgccgctcgctccggggacgagggtgcgcttactgatgaaccccgacgacgcgcgccgccgcagccagccaccggtgtacggcaccgtcagggacgtccattgccggagcgagtggcgcatgctcgaggttgactgggatcgtgactccccgctcgctcccacgatgaacagacgagttaattcttggcaagtccaacccgttcagctcgctcttccaccacagggttctgatgaggaggcggcagcagcaaccacatcgactgcgcacgccggagatgccaccacgtctgctccatcgttggcgctgcaacttcagacaatggcatcctcttcttcttcatccgcaccaattatcccgagtcgtggctccgcgtttcgcattgtaaatcctcgagatggatcacagggctaa

SEQ ID NO: 19292 - DNA, 1661 bp, Oryza sativa
  Clone ID: PAT_MRT4530_24767C.1
tataaagaaaattataaaaagcggaggcggctggagtgaagtgggcgagggcgcaaaccagagagaggtcacgagattatcgccggccatggccgccgcatcgtcgtcgcgtgttctgctcgccgccgtcgccgtcctggccgccgccctcgcgggctgcggtgcgggggcggcgctggacgacccggcggggctcctgcggcgtgcgaaggaggcggagttcgcgggctggatggtggggctgcgccgccggatccacgagaacccggagctcgggtacgaggagttcgccaccagcgagctcgtgcgcagggagctcgacgcgctggggatcccctacaggcaccccttcgccgtcaccggcgtcgtcgccaccgtcggcaccggcggccctcccttcgtcgcgctccgggcggacatggacgcgctcccgatgcaggaaagtgtggaatgggagcacaagagtaaagtgcctggaaagatgcatgggtgtggtcacgatgcacatgttgctatgctgttgggttctgccaggatacttcaggaacaccgtgatgagctgaagggtaccgtagtacttgttttccaaccagctgaggaaggtggtggtggggcaaagaaaatgatagatgatggagctgtggaaaatatagaggccatttttggggttcatgttgctgatgttgtacctattggtgtggtggcatccaggccaggacctgtaatggcagggagtggattcttcgaggcagtaataagtggaaagggagggcatgctgcacttccccaccacactatagatccaatactggctgcatcaaatgttattgtaagccttcagcaacttgtttcccgggaagctgatcccctagactcacaggtagtaacagtaggaaaatttcaaggaggtggagccttcaatgtcatccctgattctgttacaattggtggcaccttccgagcctttttaaaagagagttttaatcaattgaagcagcgaattgaagaggtcattgtgtcacaagcatccgtgcagcggtgcaatgctgtcgtagacttcctcgacaaagaccgccctttcttccctccaacaatcaacagcgcggggctccacgatttctttgtgaaggtagctagcgagatggttggccccaagaatgtcagggacaagcagccactgatgggtgccgaggacttcgccttctacgctgatgcgattcctgcaacttactactacttcctgggcatgtacaacgagactcgcggaccgcaggcgcctcaccactccccctacttcaccatcaacgaagacgccctgccctacggtgcagccttgcaagcatcactagctgctcgctatctgcttgagcaccagccccctaccactggtaaggcgaaagcacatgacgagctgtaggtacggacactttcgctctctccctctccttctctctcgtgaacgaattctctttattgaacgcgaatgataaagattggcaagatagaattctgtcaaattaaggtggcatgcccatcgattctgtatttctaggtgccatgtgtgactgatgtacatatactcctgattactgcgcattccaattagcaaatttggtacttctgcttcaaaaacaaaaaaaaaaaaaaaaaaaaaaaaaaaa

SEQ ID NO: 19293 - DNA, 430 bp, Oryza sativa
  Clone ID: PAT_MRT4530_24768C.1
tttttttttttttttttttttttttttttttttttttttttttttttttttttttttttttttttttttttttttttttttaaaaaaaaaaagacttggattaaattcccaaaaaaaaagtttgaaattgggaaaaaatttggaaaatgggggaaaaaaaggaaaccaactaaggcccttttattcaaaaaatatggaaaaaaaaaaaaaaaattgggaaaaggaaaaacaagaaataaataaaaaggcggggtgggtgtttcaaaaagaaaaaaagggaatgctatgggagatttggggatttttaaaatttaagggggattccctaaaaaggaggacctaaattttttaccctttgggccaaatatttccctgaaaggatttatttcccagaagagagccctcattttaccagttttttccggggttt

SEQ ID NO: 19294 - DNA, 120 bp, Oryza sativa
  Clone ID: PAT_MRT4530_24769C.1
atggattttccaacttcacggctgggggctaggatcagtgtttattcaactaaggcaagtcaaaggtctaagagccttatcttccgagaagaattctccgacgacaaggctgggggctag

SEQ ID NO: 19295 - DNA, 357 bp, Oryza sativa
  Clone ID: PAT_MRT4530_2476C.1
atggctgctccgaatgaccctccgatgggatgggtcatacctacctccacttcgccggaagcaaatacaacatgggagcacggtttgtctgccgatgacgtgaccggcgtcagaccagtcacagaccggtcattcttgtccaccacgcgtcagtttagcatgccgcacatctgtccttcttcatacaatgacttccttgcaatggttgcgatgaagcctggcatgaatctggccgggactgacgtgccaactccaggagttaccacgccggctccggctagggacgagtgcctggaggctctcatcattccgacgggacggggcgagacgagtgtcaggccgcctgttgccacctaa

SEQ ID NO: 19296 - DNA, 3272 bp, Oryza sativa
  Clone ID: PAT_MRT4530_24770C.1
aaagaaaaaaagaaacttcctttttttttcttgtattgggactgcatttgctgatcagggggaccatgaacaccaacgctgacacatctccacattggcacaacagaatggtgcagcatcagcagtgagtggtccttcccctttcatcacacctacactgactgacttgttcatcttcttgtgattttacatacactacactagctaattaagccttcctctctctctctctctctctcactcaaacctgtcacttgttcttgggtccattacatatctgctgtactcactgccttgcacacagctgcaatcaggcagtagtagtgttacatgtatcttgtggttggtactagtactagtcttgtggctaaacatcacccctaatgctataaaactagtggctattttggtggtagcttatcaagagctttggggggtaattcatcaatggtggtgggtcggtgggtggtaatagtaactaagatttattaactaaggtgatatgatatggtagtaataggaggggcctctaaatttttatctgaatggcactgcattttaaaacattggtggtgtggttggtggtggcttgattgatgctgctgctgctgcttctcttctggaggccagggcatcctctttcttctctttatggtttaattacgctatcttcttgaaaaatgaaaaaggaaaggaaagtaaaaaaaaagggggatgactgaaactaacactatgctgcaacttctccactctgttcctataggccactattctctttttctttgctgctagtattctaggattaagcagtagaagtatgactcacttccatttagatccactttccattctgatggccgcgcggtcggagacaagcctggacatggggaagaaataaggttttggtgagggcatgtccaaggcagaaggtaggagatggttagtgccgccattgctggcgccattgttgatgccaacataggtggcgctacaaccagtcgacgcggtggcagagatctccgcctcagtgggagcgaaaggatcgcgagcaaatcccgcggacttggtcggcgacgcaaacgggctgtccggcagattatgctccacactttggtcactgtctgtgttagggctggaggactctccggtggattcctccttatcggctccgttgaccgccttcttgtgagcaagaaggaagccgcttcccttaccgagctccccggaatcgggaggcgactcgccggtcgcgttggcggcggtctgagaagcgctgaaaggattgccaatgggggtcggcgccgcggcggcgcgcgacttgaagtctagcagctgcagccccatgaggcggcggctgtggagctcgatcgcctgctgcagctcggcggcctgctgctgctcctccagcttcctcctcagcagcatctcattcgcgctgttggagtgctgcagcattctcgcaccgagctggtgcatgtcgaaggggtctctggcatcgagtccagttggagtagtgcagctggagaagtccaccctctcgcccggctggtgctgcttcctgtacttgtcggggaccttgcccttctccttgtatggcttgacgagcacgcgggcgtcgcagatgaagtgcgggttgcccttggcgaggatcagcttcaccgtctccgggtagacgaaggtgacgaagccgaacatgcgcttctgctggtacgggatgcgaacgtcgtggacggggccgtagatgctgaagtagttggagacgtcctcctcgcggaaggtgctatccgccgggaaggtgaggtaaatctggcgcgagccggggttcatcatgctcgcgaagtcggcgcgctccagccgcggccgccccatgaacttgtgcgcctcgtcgccgcctagcatcagcgccgccgctgccgccgccctctggctctcgttgtgctgctgctgctgctggaggagcaagctcaaacacttggtggctgcggatggcgagccggggagtgagccggtgggcgagtaggggaaggcggcggcggcgaggcgctgggacttggagcggatgaggaagtcctgacactgctgctccacggcggaggggtccatcttgccggcggcgtcgtcggggaggccgccgtggacgaaccggcaagcgctgccgttcttgcagtagccgcgcgcgtagtagaggcacggcttccagccgaggccgtcggcgccgccgaggcagagctcgctgaccgacgcgctccggcggtgtccggggccaccgttcgcccaccctaggttgtaggagaaaaggccgccgtcgcctccgccggggctccggcactcgccgccgtcgaacatgggcatctggtgccccgcggggacgccgccctcgttgaggaacgcgagctggtcctgcagctggagctcgtccatgagcgggtcgccgccgaagaagggcgatggcgggcccccgccgttggccgggctgatgagctcgtcgccgaggccgaccatctcctccccggcgccattgctgatgctgttgttcctcgaaaacaccgggggaggcgcccacgaggagggggaggacaccgagagcggcgacggcgaggggccgcggcgcggggagcggcccgaggtctgcctcgacagcaagaacggcgagggggctgccggcaccgtgggcgacggcgacgccgcctgaggcggcggcaggagggcgagctccttgcgcgcctgcgccatgacgctgtggagcagcgcctcggggccgaaggcgaggcgtatcatctccttgtcgccgtggtcctggatgagcaggaggcccatgatcttggcggcgtggtcagggtccagcgcctggatccgggagaacaccaccttggtcgcctcgtatgcatccatggcggcgcccaaagcttctcttctcctactcctcctaccttctcacagtcacagcctcacaggcgcctttgcctcttcctggtcttcagttcacaccttttaccctactactatttccgctggtgttgtgtagtgcctacagccttaaatagcgcagttgccgcagcaaaaacaaaactagctggcgcttcttggctcggtccggttgctctcggtagcctccgcttcccggagctgcggcagcgagcagctccatttccgaaactttggtgcgtagccgcggcctatcaccacaccgtgcacctcacgctccctttattaagcaaagcaaaggcctgagcatggctttcttgggccggcctcgtgccgaattcctgcag

SEQ ID NO: 19297 - DNA, 381 bp, Oryza sativa
  Clone ID: PAT_MRT4530_24771C.1
attattgatcaggtagaacagagcgagtggggtgcagataacttatgagctgaaactgaggatcgcaacatccatgagcacctcgccgctggtggcgccggcccggaccaagggccttgcgtccatctgccgccggggatcctacttagccatccgctgcagaggtgccaagaacatcaagaccgacacgccctacctgattggaggagacatgccagtccatattgatgcatctggcacgatgcgcacggagcacggtgcagcccaagatcccgacaagtacgtgccaaaccggcaccgctacagcccaatctagctcccgggggaagggtctctacaccggagacacctaccttggaggaaccaccgggcttgtgatct

SEQ ID NO: 19298 - DNA, 207 bp, Oryza sativa
  Clone ID: PAT_MRT4530_24772C.1
atggctcaaagtcaggataacgagcgcggagcccgcttggcaggcggcaggagctgcgggcaagtgcttgcttccggcgtcggcttcaatggcagcggctttggatctaggaaaatgagggggggcatcatccgcatcaagggctctctcatctcctatttgtttgagccattcattatggtggtggtgccggggaggcagctgtag

SEQ ID NO: 19299 - DNA, 2322 bp, Oryza sativa
  Clone ID: PAT_MRT4530_24773C.1
atggtgttcccaagtaacgtgcactcggggagggtggtggaaggcaaagggagagaggaggatggccagaacggcagcgacaagagctcagcctggccggcaagagaaggtggcggtggtggcttgcctcaaagtggagggagaggggaaaggggaaaaatggaatcacctcaacgaggtggagttggtggcgcaagggtttggcttgcaaagctccggaagtatctgctagggtatttatatcaaactctgagctctgcatcggctaagattgctgtaaattcggtggttggtgctggtggtccatgctggcttctacaagtttggctcaatctccataccatcaaagtgtcaaaaagatcagatttagccgaagccgatttcctagcactagagccaactgaagatgatgaaggcaatgagatcacaactcgccgatgcatgtccttcggagaagcagcttgttcctatgctggatcagaacaatcaactgaattcttttcaaattggttcagtaacttttatgatggatttctaagagattcaaggattttgtttgcttatgaacactccaataactttgaatacccagccgatttcagatttgatgatataaactccgaaaagtttgagaaatccagagaagtctttgctatggctatttctccttgcatactccccgtcggcatccatcaaggcaggaatatccaagtgtcatacgagttttatcatcctatgagtgctgcaagacaacatggaatgggccaattgccgattggactattttttgcaaacaagatccaaaccacgggagaaatcacttcagccctcatgatggacagacttctaaacatcccggggcccccactaggcagcattgaaaacatccaacttgctctggctagaagtaaagcttttgaccaatggtggattgaatggaagaaacatattttccatgaatcggcttctatgtacctgaccaaatatctatctagagctggttacacaagactacttcccaagggtggtggactggcaccttcaataattggctataatgccccaaaaacatctacattgctctatggaagagttcgtgagccgattccctctgagactgtcaaaagaaaaaggactaagtcatcggctgctgatccatcggccgcaaagaagaacaaatccaagaagcaaaaaactgcgacagccgatgatttgccatctatcgacctagatgtggaaaagtttttggacgatgaagaaatagaagaaggagttgatgatgcagctgctgatatcagcgaagcaagagaacaaatgccaccagctgatattttactagccgatgtcaaacaaattcaatcttttcagcctcctcattctccaactcatcttcatcatgaatcaagtgaacatactccatcggctgtgggcagccatcaccttaaagaagaagtagaaccaactcctgccattcctgtaagcatcctttctaaaaactcatatcggctgttatataatttttctgacaatcaacaatcccaatattctcattttcaagctttagccgatatgttctcctttgacataaaacaattctttgacaaagaagaagaaactactagcctgcccttagctcttcttgccgatgatgtcaaagcaacacttcgagacatcgcacatcggctagggagttcccttgagtctctggtggttgattgtggacccataagagcaaggtttgaagaaatccatgatcagattcctgaggatcaagccaaaatcatctcacctgcggtgtatcttgaactacatcggttcaagttagagaaagcaaggcaaaggattgccgataggcgtgaaaggaaagagcttgaagccacaattcaagctaatcggcaaactatcaatgaagaaaaatccacgcttgatgagatgaccattgattctgtccaagccaatattgatcggctgaaaactcgtagaacagaacttttggctgaattagaaaaatgcgaagccgaaatatcatcagaagaacaaagacttgctgatttcccaagagccatagaagagcaaaggtccaagataaggaaatctatcaagcatctttcagatctgagcaagtccttaaaagtgatccttggaaccaatgtaaccaatgctcaagccatagatgatatagaacaaattaggcagcgggctatatcggctaccaataagcttgtatctggcaagaaattatctgcgcgcaacacttgtaatacagacaaaaacatattttgctttgaaatgtgcatattttcatatatgtatgccccttaa

SEQ ID NO: 19300 - DNA, 222 bp, Oryza sativa
  Clone ID: PAT_MRT4530_24774C.1
atgggaggaaacctgtcttgcttcgggtcggcggcggctggttcaggttacggggacatcgccgacgaccagccggcggcggcggcggcgtacgagctgcgacggtcgtcgaggaaggtgcggccgagcgacgaggacaggctgtggtacgtcggcgagcgggacgtcgacaggaaggcggcggagttcatcgccaagttccatgcctcggctaggacatag

SEQ ID NO: 19301 - DNA, 524 bp, Oryza sativa
  Clone ID: PAT_MRT4530_24775C.1
atgcgggagatgagaggagaggagcgatgcgggaggaacggccgatgcggatccaacggtgaggacaaaaaggtgcggcggcggcgacttccggctgcgtcggcggaaggcggcgccaaggcgggtaggagcctaggcggcgcgtcgggcggcggcgactgcagtctagtctgcagcgtgctcgtcggcggctgcggcggaggcttccggctgcggcgtgcgcggctgcgtcggcggcaggaggcgccgaggcgtgcaggcggcgcgtcgacggctgcggccgtgcggcgttggggctcggccaggcgtgcaggccgccagtccgccaggccaccacacaggtacgcgatgcggcggccgaacgaccacggctcgccggcctggcatggattgcgtgaggggcttgattcattgattcattgcattgatttgttctaggtagttcaatagtagttatgttttctggtggcgacggcttgtttccttgatttgttctatagtagttcaatagttcactagcaccg

SEQ ID NO: 19302 - DNA, 446 bp, Oryza sativa
  unsure (1)..(446): unsure at all n locations
  Clone ID: PAT_MRT4530_24776C.1
gcggcgaggacgtgcggcagtgcggcggcggcgacttccggctgcgtcggcggaaggcggcgccaaggcgggtaggagcctaggcggcgcgtcgggcggcggcgactgcagtctagtctgcagcgtgctcgtcggcggctgcggcggaggcttccggctgcggcgtgcgcggctgcgtcggcggcaggaggcgccgaggcgtgcaggcggcgcgtcgacggctgcggccgtgcggcgttggggctcggccaggcgtgcaggccgccagtccgccaggccaccacacagagcgaggctgtttgccgctgcagcgccggcggctcactaaaccccagaacccccttctctcgccgccgcgccgccgccccaatggcggtggacaaatccggcggcggcggagggcggagggcnnnnnccnntncctcctcgncgggcngcgccgcctc

SEQ ID NO: 19303 - DNA, 2289 bp, Oryza sativa
  Clone ID: PAT_MRT4530_24777C.1
atgggtttcatggccatgatggtgtcatggcctgccattgctgctgccttcatcgtggcggcatcgctgtcgtcgccggcggccatgcgtgcctcggccgccgccgccgccggtggcggaggagggaataatcccacggccgggttcgcgaaggtggacctcaccggcggcgacttccaggtgcagagaccgtacgacgtgccggagagccggcggttccggtaccgtgacggcgtatggacgttctgggtgtacgactccgacaagcccttcaacaccgccacccacaccaaccctcgcaccgaagtcaggctcaggggacatgactattcatcgggagtgtggcaatttgaaggatatggatacgtgccatcaggaacatcaggggtatcggtgatgcagatccacaatgaggaaggtgcagagcatgcgactatactaatgttgcacgtctacgatggtgtgttgcgcttctatgatggtccggccattgagagcaacatctacaaccggtggttccggcttaatgtggtacatgatgttaaagcatcgacggtggctgtgtacatcgacggcaagcaaaagttctccaccaatgggtaacgattactcctagactaaaatcctactactactaatcctagtagtaagaggaaattaaagcgaaaagagattgattatccaaagaagaagaagaagaagcatttagtatataatagtactagtatgcactcggatgaatgaagttgaagtgcagtgaggtcagggatgggtgggcttgttggtttggaggtgaaggttggcattattggtgatggggcggaagaggcgctccagctcgtcgagacgcaggctgatggccttccccttcccctgctgctgagctgggtcgaagaggagcttcctgcaggccaccggcctgggcttccggggcgccggcgggcaggtggctggctccctgattcccggcgttggcgtccggcagcagctgtactcgtcgacctccgtggtactggtaccggcggcgcaggagggcgagaaggccggcggcgagggcctgtagaactcgggcgaggcggacatagctggagcctgacccacagcttcctcttcttcttcttccctgataattccaatcggcttcgtttctccgccgttgattacttgtgtttgtgcatcgggatcggaacgcgacatccccaccaacgtgggacgcctgttccgtggaactgtggggttcctcttgtgcttatctttcattcttccttttgatttagtaacaaaccatggaaatcgtgtgtccctggagcggctggcaacatgcctgagcagtgcctgccctgactgatgcgcgaaatgcttctgcctcagctgcacgtacgggtagcagaggctggacaggatgtgtgctggcttcgagaaggacatcacctcgtaccacacctgatcgtcttcgtccagctgcaccgagaacctctcctcccctgccagcagatggccttgtagagtgccgctaccataagcaaaaacgcagccttttccatggcctgaggagttgcctccattgccatcggtcacataggcaatctggaggggcaacatgacccaagggatcagctccttgtaacaaatgcagaaccttgttccagccttcaccggtgtgtcgggttccacatttgcccagcctagtgccaaatgcttccaggagagaagcgcggatttggcatggttgaaggtggtagtgccagagccaaccagaacacgtgaacggttcacgaagaagccgcgctcgacaagcgctttgtcacttgcttcagtatctcccgcagtcaatttagctactgattttggtcttgaggcaccatggagaggcgcatcatagttgaaaccaccagcagctgaaaggcatgacttctgttggtcctgtgagggacggctgaagctcaagaagagacctccccatgccatggatttctcgctgtatggtggcctggtggactggcggcctgcacgcctggccgagccccaacgccgcacggccgcagccgtcgacgcgccgcctgcacgcctcggcgcctcctgcaaaagaagcagccgcgcacgccgcagccggaagcctctgccgcagccgccgacgagcacgctgcagactagactgcagtcgccgccgcccgacgcgctgcctaggctcctacccgccttggcgccgccttccgccgacgcagccggaagtcgccgccgccgcactgccgcacgtcctcgccgccacaccgcgcacgtaatcggtcc

SEQ ID NO: 19304 - DNA, 542 bp, Oryza sativa
  Clone ID: PAT_MRT4530_24778C.1
gacacgggtgacgtaggcccacacgcatttaatggagaaggatttggggacacgcgtgcaccaggaacacaatctcgggcatgtccagagcggtcaagccgattccagatcagttgagaggcccataacctctcatcatcatgatgggacggggcatacctgccgcacgccgcctgacactcgggtagaacgcgtgtggcttgccgccgtcccatctgttattcgaccggtcacataccggtcgcatgctagtcaggcacgcagcacgccacatttaatgcagcgtggtgcgctcgctccgcttgcactaaatgcgattaggtagacgccggggagcgtccacctaacctcatacgctcggtggccacatggtgaccgccggtagcccgacccctcaggctcggaaggggcgactgccacccatccatgggaccgaccccctcggggggtggggggagcgccacgtgaaagttggggggggggcttcttccctttaagttttttaccccggacctatatcaccgacaacaggtatttcttct

SEQ ID NO: 19305 - DNA, 233 bp, Oryza sativa
  unsure (1)..(233): unsure at all n locations
  Clone ID: PAT_MRT4530_24779C.1
gtgccttgtcaaaacgccactacaantactgttcttttttgttcctagcagccttgacaacaagaaacacgccgctcagttttgtactttagagtctaaattttcaacaaaaanaaaaaaacagttcatgtgaatttggcgtggagtccatgagaccatgacccattctaccgatncattttcntcttttgagtnaatttgttcccaaatcccaacccaccccaccttcaaat

SEQ ID NO: 19306 - DNA, 422 bp, Oryza sativa
  Clone ID: PAT_MRT4530_2477C.1
aaaaaaacaaaaacgggctggttgttttttttccccctcccctcccacccaaaaacttaaaaagcctttttttttcgggccacttttatctggttttgtttcacagcaaattttttgtggggtcttggggggcccccaaataacctcttttaaacaaatcttaattttttaacgaaaactcccccccaaggggggatctttttttggcccaaatttttaaaacttatatatccagggggggggggtgctccccccctcagttaaaccttgggggaaccaaaaagggattttttttttcccgttgcccacggaggccctcccaggggaaacattcctgcccacttccacggtattttcaacacgggtggggccgggggctttctcccagggcctgggggccccaatgattctggggccagggg

SEQ ID NO: 19307 - DNA, 938 bp, Oryza sativa
  Clone ID: PAT_MRT4530_24780C.1
gtttgcttgcaaacgttggcgtcaggcaggcccccccgtgcgttcgtctggcgaccgcgactccatcttgacccttccggccttcccccggtcaccgtcggagcagctcagatggccgctggcgttgacggcgacacggccgccgccgccgccgccggaggcggggtggtggtggtgttcgacttcgacaggaccatcatcgagtgggacagcgacgactgggtcatcaccaagctcggcgcctccgacgcctttcgccgcctccgccccaccatgcgctggaaccccctcatggacaggatgatggtggagctgcacgcccaggggaggtcggccgacgacatccgcgactgcctcaagagcgcccccctcgacgcccacgtcctctccgccatcaccacggcctcggcattagggtgtgatttgagggtggcgagcgacgccaacgccttcttcatcgagaccgtgctggagcaccacggcgtcctcggatgcttctcggagatcagcacgaacccggcgcgcgtcgacggcaacggcaggctgaggatctcgccgttccacgaccccgacgacagctcgccccatggatgcagcctctgccccgagaacatgtgcaagggcaagataattgagaggattcaggcgacggccaatggtaaaaggcatttcatctacattggtgatggcagaggagattattgcccctcccttaagctaggggaaggggactatgtcatgccaaaggagaaataccccctctggaatctcatcagcagcaacaaacagcttctcaaggccgaggttcatccatggaataatggcgaggaactcgaacagaccttacttaagttggtcaacaagttgatcacccacctgcacaaccatcccaatttgaatataaatgtgatatgaggaaagcatgcatggtcccccgc

SEQ ID NO: 19308 - DNA, 471 bp, Oryza sativa
  Clone ID: PAT_MRT4530_24781C.1
atggatgtgaacggcatcatcactgtcctcatcacgtacgagctattggttagaagagtatcccaccgcccacactacccagatatcgccggcacaacgttccatcctcgcgtcgctggccatgccgcccgttgcctcctcctccgactacggccaccgctcaccagtgctggccggaatggacagccacggtgctcgtccctgcaatacccaaacggcctagtgcctccttcgcactcggatctggtggccccagtcctcatcaccgctggactgatcgatgcaatgaaggggattggaaaggaggagaacggatgttgcagtagtcagggatcagagcccgggaagaagacgcagatctggctgaggaccttcgagtcaccgaagatggctgctgtggcgaactatgtggcgtcactccgcctccacggattggagccgaggctcaacttcctggcactcatcatctga

SEQ ID NO: 19309 - DNA, 1696 bp, Oryza sativa
  Clone ID: PAT_MRT4530_24782C.1
atgacacggagctccgtgccgctggatggcagcttcctgcctccctctcgcattaccaacgagaggttcgcgggtctgccgcgcaagttcatgccgacgacgtcgtccggtcgggcaatgattatcctgggcgaggcatgcccgacgctgcgttatccggagcggccagtcttcttcctcttgttcgtcatggtgggattgactccccctttttgtctttcttcctcgatgttcaggacttctacgagatccagatggcgcacctcaccctgaacgccgtgctgacacttgccatcttcgcacatctgtgcgagatgttcatcggggtgaggccgtgcctccgcctcttccgttggttcttaaccatgcaactggtgtcccccgcgacggaagccgacggctgctacttctagccgcgcgccaacacgcaacagcactatttcgggcagacgctacgcaagaagtgggacgactggaagcacgattggttctacaccgtcctccctgacaacgtccacctttggctccctacagcaccgcccgttcagacgtcgagctggcggtcattgtcggtgttgggagacacgtatgacgcagtgatcgactacctcgccggtctgcagtataaggggctgactggtgccatggtcttcagcgactacactcgctgccggattgcgcctctccgggagcgggtccggggtgcatggtcatacaccggctccgacgactccatccggactcatccggggcagacctgggactagaactatgccaacctcaagctagtggtccagtgggtgctcagcctcagggatgtcgagccgtcgctaatcccccacaacatccttcctccatcctggccatcatgcaagcgataggcgcaggcggggaccgcagcggaggtgatggcgctggcggcagccacgttttgggggaccgctacctatccgcccgaggcggccatggaggaatgtccacgggcgggggttcgggcagcagccgcccctctgacccgaaggggaagaggaagcaaagggactcctctccctccccgtcccggccctgcgggggcggcgcagagtgcgccgttggcaggcgcccaatgggcaccgaaccggcgcagccctcaatgaccgcatagctagtggctgggaggaggaagaaatggccgtgcaagacggcggagaccaagccgtgccggggggagtttatcaagtccccggaatggagctcaagcgccaccccctgaggttcggtcttaacgcggcccaagtcacacaggtcggagaaggctgaggccgaggcgcaaacaaccaagaccggggcgcggggaaccagggtcggtgaggagatggagtggccggacaacggcgcggagtcccaggcctcgggagggggcctggagccaaacgccgcgcccgaggccgagcccgaataggccccaggagggggccaggatccaggcaccgcgcctgaggtagaacccaaggcgaggccctcaggaggagagtaggccctggggaccgacgcgcccccatacaactgctggcagggcgtccccgaccgcgcacagggcggaggccacctggggggcccctgccaccagcgccaccggacacacgcccagtgctggtgggggcgacgcccaaggcgcggaggacggcccttgttttgtttgaactttgggtggtcc

SEQ ID NO: 19310 - DNA, 435 bp, Oryza sativa
  Clone ID: PAT_MRT4530_24783C.1
ccgaacctgtataaaaatcatcgtctccgtctcttttacctcaatctcgcatatatcctagtaccaacgatccttgtcggtgatataggcctgggggtatcaggtttagagggaggaggctgccccccgatgccacgtggccctcccccgaggggagtcaggcccgaggtcaccacgtacggtgggttaggtgtccgcctacccgtatttatggcgtcccaagcggtcgcgctacgccgcatttaatgtggcgtgcagtgcactcaaccggtctgtgaccggtcgaatgaccgatgagactggctagtgcgcctgtgcgctgctcgtgtgtcaggcggtgtgcagcctgacatgtcccatcaaatagtgatcacacgttgcacgtcttcgttgtccatatctgatctctcttcacgcaagtatcgagagagtatc

SEQ ID NO: 19311 - DNA, 450 bp, Oryza sativa
  Clone ID: PAT_MRT4530_24784C.1
aaggccttctttatatccttgcaaatgtactttcttataactgtttttttaggtcattctcaccatcactatttgatgggacatgtcaggctgcacgccgcctgacacacgagcagtgcacaggcgcactagtcagtcccatcggttattcgaccggtcacagaccggttgagtgcatcgcacgccgcattaaatgcggcgtggcgcgaccgctcgggacgccataaatgcgggtaggtgggcacctggaggcggacacctaacccaccgtacgtggtgacctcaggcctgactcccctcgggagagggccacgtggcatcggggagcgggctcctccctctaaacctaatacccccgggcccatatcaccgataatcggcgtgtgcacacttttcaaactactaagcggcgtgttttttttaaagaaaatctaatgaaagctgctttaa

SEQ ID NO: 19312 - DNA, 1014 bp, Oryza sativa
  Clone ID: PAT_MRT4530_24785C.1
atggcggcctccatctcccccgtcgtcatctccataggcaggccgtgcagcgctggcgtgccgcccggagctcctcggcgtcgaggcggccgcggcggagacggcctcccgctgccgcccgccacggcttccatgacggagacgccactgaaggcaagagaggagctaggagttgatggtggaggcgcaggcggcggcggcggaggtggcgagggtggtggtggaggcggagttggtagcggcagcggcgcgagggatgtggcggtggcgggaggcgggagcggcggcggagtcggtggtgggtccgatttcctggtacaggaacaggaagatcaaggtggtaaccagactataagaatgcaacctcaacaaggtagattttttggaagagggaaggttcttgattctgtcccaagcataagaaaggctccgagcttcgccaagcctttaccagaaaagaaggggagcatgaaatttgagcaagagcaggcaatcccaacggtgccaccgaatgttaggccgacagctttatttccccgagagaagaaagagagcaagaaatttgatcaagaccaggcaatcccaagggtgccaccagatgttaggccaacagcttcattttcccgagagaagaaagagagcaagaagtttgagcaagacaaggcaaatcaaatgccatctttggcttccgcgccgacgagttcatattctagtgaggctgaagcaatggcagatacgtacaacatgacaatggataccatcgtcgaatgggaggccgagaagaaggccaaggccaaacgccagatggagttgaaagagggcgataattcagagcggaagcgagagaaggcgctggaggagtacaacgacgagattacaaggatcaacaaggtggccgcagcatcaaggctgacggcggaggagaagcggaggagcgcagagaggaaggtgagggagaaggcagagaggattcgggtgacgggaaagcttcccggcgcatgtggctgcttctga

SEQ ID NO: 19313 - DNA, 531 bp, Oryza sativa
  Clone ID: PAT_MRT4530_24786C.1
atttgatccccagtcaaaaaaaataaaaaataagcatttgatcgatcgatcgatcatgaggtttaccgcagtggtagcagctattgttgccgtcattcttctcgtcttcctggtctccggcggcatggcggcgcggccgatggtcaatatggagaagaccacggccgtgccggttgtgaggaaaagtggtgtggtggtagagtcgtggacgatggagagctcgtcgctgccgtccggctgcaccaacgggaatggcgccggtggctactgccgccctcctgctcctgccggtcactaattaattaggttgccgtcaaccatcataccatatggttctatataaggtttaccgatcacaaatttgatcatgcatatagttaagatttagcagatgaagcttgatcgtattcttatagcagtatataggatgaatgggaaataaaatgtatgaacatgattgtaaattcttggtacaccacgcctccagatatgtaaccccaattaaagattatatatttatatgatattgat

SEQ ID NO: 19314 - DNA, 260 bp, Oryza sativa
  Clone ID: PAT_MRT4530_24787C.1
aaaaaaaaaaaaaaaaaaaaaaaaaaaaagaaggaaaaacaaaaaagaaagaataaagaacggaggcgagaatgaaaaaagtaaaatgatgggtgaaataggatgaggtaacaattgcacataatatagaaaaggaaagcatgaagggaaaagacggatgagtcgaataagtaaacaaagtcacataaataaaagggtaccaacagtgccggtagcgggaaggaaaaaagtttagccatgtgaagtaaaaaattgcaaaa

SEQ ID NO: 19315 - DNA, 706 bp, Oryza sativa
  Clone ID: PAT_MRT4530_24788C.1
ccggccgggaaaaaaagcatcattagcttctccccggcctgagaattcccgatgcatcccatcatcgctacactcctcctcgccgccgcaatagcccccggtctcacggtgggttccccatctctcatcaacgagacatgcaccgcaacttccaactatggctactgcttgggcgtgctctcggctgatccggcaggcgcctccgccacggacaagcgtggcctcgccatcgccgcggccaacatcacgatgcgcaacgtgacgtccacggtacgcgtcctcaccgagctggtagaggagctcaagctctgcatcaagtactaccaggacatggacgatctcgtggccagcgccatcgacgacctgcgtgtcgggcgccccgccgttacctcgttctacaaactgcaccgggcctcggacgagcccggcaactgtgatataatgttgtttgagggaagcgcccacaagaacccggtgagctcggagaacatgtacaacgaggccatttcaaagttaaccagcgacatcgtgtaccagttggtacattaatacaattagcctaagttgcatggataggtccacctccccctcctcctccttaatcttactctacccatgtattgtattgggaggctgtgggtagcatcatgccatttccaggcatcagctaatacagtttgctggcaaggctgcgtctgattgttgt

SEQ ID NO: 19316 - DNA, 1698 bp, Oryza sativa
  Clone ID: PAT_MRT4530_24789C.1
atggcctcctcggccttcaaatccaccacccgccggaccctccaccccgccgccgacgaccgcccgccggctcgtccccgcaaggccccaccgccgtgcccacgccgctcccgcagcgccagcgtcgagccccgcgcccgcggcatcggggagtacgccgccggcaacacccgcaccaaccctctcttcgacgactccgcctctccgccgccgccgcagccgcaggtggatacggaggctgctgggtgtcgcggcggggaggcgagacgggagagggggagggaggtggcgcggaatggttcgtgcgccggcggctccgggagggcgcgctctgtgtccctcgcgccgcggggccggggcgccgactcgtcgccgtcgtgggggaatggtgatggaggcggtgggaggagggcctccagggcgccgtcggtggcggtggacctgcaaccttatcggggtgacgagaagcgcagagaaattgagactcggtctttgcattccatctccaccaatcctttgctcgcaagttctgttcttgctaaattcgaacagagtgatgcagaaatcagagatatgtcaatagaatttcagttttgggagagtatgcattcagtttcgagctcagtagaggtcatttggcaaagcaatcattcaaatgtcccagtgcaacaggttattgaaattcctcccgagtttgatccagattcttctgagtttgtctccgacataagtgattacacaacagaattcaaaaaggaggaaattttgcacattccttttgagtttgatctagatagagctgatctggctcctgacatagagcaccattcaatagaactgcaacgggaacaaatggaaattcctcttgactttgatccggacagtgccgagctgtctcctgatataacagagtatacaacaaagctcaaacagtcacatgaacgtgctcgaaagctacgggcagatttagctgtcgaagagcaacgtgaacaagagttgagtagagtgctgaagggtattgtaactacaccaaattttactgaggcacataaaagaaggccaagacgaaagagtagtgtagaacgactgaaagtatcgaagcatttggctgaagaggcaatgaattattttgaggaatgtgtctcgatctcgacattggatagcactgatttctcatcactggaggaccctcaaataaattcagttgtgaacatcccacaaaagagcagaaatacatcttttaacaaaggtggatcaagcattgcagaaatccactatccaacagatcgtcattggcataatgaggaatctgacaaccaaacccagtgctcagttagcttaactggatctgatgtgtctggaggccgtacttttagtcataatatgatgacccccgtttcaagaactacaaataactcaagtgatgatctcgatggctttgacacaccaaaaagcagaagttcttgtttctccttcacccatgaaccaacaaaaactgttgagggcgacgacgttcaacaatatttaagaagttttggaaggggaatcagtaaagatctaagagagataaggtcaaattattgtgatgatgactatgtatttcagaaaatgaatgcagacttaattatggatactgtgacatttaagaacatggtaaattttgggggtctccttatttgtaatattagaagatactga

SEQ ID NO: 19317 - DNA, 496 bp, Oryza sativa
  Clone ID: PAT_MRT4530_2478C.1
gcgccacgcgtgtgggttaggtgagcacagcggggctcacctacccgcatttatagcgggattggacgagcgcgccacgccgcatttaatgcggcgcagcgcacgcttatccggtccgcgactggtcgcggtgtgtgaccggtcacagaccgccggagccggcgtgctaactcctggagttggtatgtcagtcccgatccaccagaacacaggagtagggtgttacgcttctcagcggcccgaacctgtctacgtcgcccgtgtcttgcgcatttcctctctcgctgacgttcctcagatcgagggcgaagaatctcacttagcgcccccggccgaatcggcaaaggggggcctgcgcggtctcccgttctgcgagcataacagagtttttgttaactcggtgaagtttccaacgaatctgagctttcgttatgcaggacttgacttggacatctttatttacaattccatgaaaatatcgaatttttttcgtttt

SEQ ID NO: 19318 - DNA, 810 bp, Oryza sativa
  Clone ID: PAT_MRT4530_24790C.1
caagcaagaatgggaaacagcatatataattgatgtgagaggatccacaacagttaacatcctgatgaggatcagagtcaaacacatcaacagccacaggccatgaaactatttcatgcattacataataactccttagctaccaaaatactacccagaaacttcacacttgctcctagtactaagcataacagatagaatccccttcatgtctcatcattttatcagttgccaagcaaagaaggatcttaaaatggaataagaaaactaacaaaaaagggaaccacatcagatagagcttaacctaattcagtttcagggctatcctgggggcatctgatcaactccagtatgttcaccacctcactcatgtctggcctattggaaggaacctgagaagtgcacactagaccaagtttcatgattggaacagcctcctctagcggaaattttccgcagagcctctcatcaacacactcttccaccttcccttcatccaaagcagcccttaccacatcgcaaagcacaataacatcatcttccatgtactgcaccggcgtcctccctgtcaatatctcaagggcaagagctccaaatccatacacgtcacacttttcagtgatcttcacagtcctgcacgcaaactctggtgccatgtaaccaagtgcactctggaccttactgcttagaacataccgatccaacatcggcagaagctttgccaatccatagtcccccaccttggcatcgcctgatccatcaagcagaatgttgcttgacttcagattgtagtggataatgtcatgacgg

SEQ ID NO: 19319 - DNA, 361 bp, Oryza sativa
  Clone ID: PAT_MRT4530_24791C.1
cggcgagtacggttggaccgccaacaggggggggttttttaaagcccaggcgctgttggactccagcatgtgtgggtacatgtcctccaagaagaacatggagattaatcccgagaacgccataatggaggagctttccaagcgtgctgaggctgacaagaacgacaagcctgctaaggaccatgtcatgctgctgctcgagacggcgctgctcacatccggctttagccttgacgatcccaacacctttggcagccgcatccaccgcatgctcaagctggcccccgagcattgacgaggacgaggaggctcccgaggctgacactgacatgccccccctggaggatgaccctggcgagag

SEQ ID NO: 19320 - DNA, 1030 bp, Oryza sativa
  Clone ID: PAT_MRT4530_24792C.1
cccacgcgtccgcggacgcgtgggtctgaaacagcctagctagctagctaacacaccactagctaattaagctcgctcgatcacttcatcagttagcattagcaatggcttccaccaccaaagtcgtagctcccctcctcgccttcaccctcctcatcctcgccgtcgcggcgcgcggctgtgagcccaactgctccggtggtccggtgatcccgacgccgacaacgccgtcgtacgaccgccatggccactgccccatcgacgccctgaagctgagggtgtgcgccaacgtgctcaatgggctcgttggcgtcaagatcggagccggccccaacgagtgctgctcgctgctgcaggggatcgccgacctcgacgccgccgtctgcctctgcaccgccgtcaaggccaatgtgctgggcatcaacctcaacctccccgtcgatctgagcctcatcctcaacaagtgcaacaagatctacccatccggcttcacctgctaattgagctcgaccatgcatgcataattagtcctcatgcgatgacgaggattgatctgagttgcatgataaattaaagattaatcttgaaataattatattgttattcacttctacatttttgcagcccattctacattgtacctaactttatcattcttgaattacttaattgttgtaagttggaacgcattaaaaaacaacctaataaacctatttttttttaatttttattcaacaccttaatatcaatcccccaaaccttggggggggccccgaacccatttgtccctatgggggtgtttacccgcctcctggcgcgggtttacacgtgggactggaaacccggggtccccacttatcgctggggacatccctcttcccagtggttattaaaagagccccccttcccctcccacattgccatctcatggtagtgtcccccttgtggctttaagcggtggtgggtgtcccagggccttcattccgtctagcccttttgctttcgcttttcgcattccgatcccaaacaa

SEQ ID NO: 19321 - DNA, 478 bp, Oryza sativa
  Clone ID: PAT_MRT4530_24793C.1
accccttctacttccttcctcttgcagtcttcctcttctctacaccaccaccattactccccccttctcccctactccccgcgacgcgaaggcgaccaccacgcccatgccctccgttactcgcggcgagcgcgaccgcgaccaccaccaccagcagcagcagctagccccatggccaagtcgacgcccgctgcagcggcggcggcgcccgaggaggcgacagtggtggagctgcgcctccgcctgcgccgtcttgtggtcgtcgcgacagccggcggcgtcggagggggggaggccttcgacgaggcggcgtcagcgctcgctgcgctgagagacgcggagctggggccaccgccgaaggaccgtcccagtgccagtgcggacaggacgaggagtggacacactgaggctgtggccgtgccggagcagtttctctgccctatctcgtcggagatcatgcgggaccacgtcttgctcg

SEQ ID NO: 19322 - DNA, 325 bp, Oryza sativa
  Clone ID: PAT_MRT4530_24794C.1
cgcccctgaagctgacgcccaatgggactgcgaccttgtggcttgcattgcagggtggcggcggcagcggtggccaacagcagctagattcagtgatgggccaccagatcagtgaatgccatgattacatcaaactgaaccaatcaaatatgaggaggacactgagcgttcttttttttatgtagcacagcaccaaataattctggttctacgtcatctagccatgttcagggcttcagaatttctgatagtgatgggaaacttgaacgcgctgttgatttatacttcagttcattgttgtggaactggcattatttcctctatt

SEQ ID NO: 19323 - DNA, 409 bp, Oryza sativa
  Clone ID: PAT_MRT4530_24795C.1
gatgaattaaggagagtatcatgaggagagagatgaattgatgacacttgatcaatgtgatcacatagatacacagctacacgcgcgcatatgtgacaatgttctgtgaattttacatagcgtgcatacaatgtgtgtataaataacacaggctcaagccgatgctgaagaatgtacaaagctgtgtactgaaagtgtgaagcatgatcctttagaacaccacagagtgcagacagctgctacagatctgaatgataggatgtacatggaacatgcgatatgtagatagtcaaacataacttcaataaagaccctgtagataattctgcgtgcatgtgcagatgtgtggcgcgcccaaacgtgaagctgttcaacgccgtcgccgtagaggacctaattgttaaggggg

SEQ ID NO: 19324 - DNA, 693 bp, Oryza sativa
  Clone ID: PAT_MRT4530_24796C.1
gcttaataatccattaattcattcataagcagtactagatcagtaggtaaacaacaataacattgatgatcaaaatacagagcaataatatgttgccggatcgatcccatcttgatgagaaacaaaatgaacaaaaaaaaaaagaggaacaatagtgataataataatggaggtgctagctgaaccatcggctggctataccatccgacgaaaacgagcttaaattcttcagacttaattaacagcaataacaataataatcatcatgacgacgttctggaatcgcagaaactggcgcagaatccggccaaaccaccaccttcttgttcttcatcttcatcatcgccgttgttgtgatcagatcatcagatcatgctctatgcatgcttcatctctccacaagatctcaagtaaaaatacacacttgacacacacactatgtacaaaacaagatttaaccacatatcttgatccatttctgatcttcttcttgtactgcagctgcagccatggccaccaccatctggactgaactgaactgaactgagaaaaaccccaaaacaaatcctgcctttgcctttgcctgcctcccccgcccccccgacatccatccaagaatattcacataggaatggtagatgatgaatgatgaacatatgtacaagggattaggagaatcttaacagcagaact

SEQ ID NO: 19325 - DNA, 269 bp, Oryza sativa
  Clone ID: PAT_MRT4530_24797C.1
aattaagaaagatttctcctttttttggaggccataaacggagatagattttgccgccttaccactgcggggagaacctttggaaataatggccatacgttgcattggcagatgctaaaagaagagcccacgctgacagcacaacaaggtttaatgctttataacaaaggatattgtcaccttaaggacacaatccagctccacatggaaagttgactagcaaatacccaaggggttaccaaaccgtctaggcacagctgtctaagccc

SEQ ID NO: 19326 - DNA, 490 bp, Oryza sativa
  Clone ID: PAT_MRT4530_24798C.1
cgaaaaggatgaaaaggggatgtgttaaagagatccattgaagcgtctcaaaatggagcattgcaccaatactcattaactcctaattaagcacaaaagtaccttattcggatcacgccacacccggacagttcgcccattccacatacccacgatgatggattccttggttttagttagtcctgctctttctatggcagtgttgatcctctcgtcagaggtgggtcggtttagtcatcagctcgagaggacaggggagagataggagacatctatgtaaccttagcctaccccatagtaagtatcggaaaaaggactccttctcgaaagagatagcagtcatcgcattatctacttgattatgatattgattttgatccacggataatgcaatcgagggctcgcccacctataaattaaataaattcaagtgaaagttcagtacgaactggtagagcgagagcagctagtttagaaaaaaaaaaaaaaa

SEQ ID NO: 19327 - DNA, 452 bp, Oryza sativa
  Clone ID: PAT_MRT4530_24799C.1
caggggcagcatggccacttgtccagacgcttatactagcaccgcaacccctgcggggcccacacctgtcaccggcagataggcaccgacggtttggggtacacacgggaccacctgctgcatggaaactcacgggaccagctgtggtatgtggacgcacggacccacctgcccctgcggtggtcagtttcagccaatgaggtacgagcacaaaaccggctggttacttcaacactacggcatttacagctcaagctcgtctcaagatgatggtatgcattgcaggacgatacatgggatcaaagaaaacatcaagtgaaagctgccaatacattacatggcgaaccaatgcatactcttggcggaaccaccttgcacctacagaactcatggttcacggccatgccatgaccatccggatccatcatgctcacacggatataccaggacca

SEQ ID NO: 19328 - DNA, 447 bp, Oryza sativa
  Clone ID: PAT_MRT4530_2479C.1
ggtcttttcatagcatcccacccggatggcgatccggtgaccggggatatcattacgctccagatccaagggactcatcttggccgggctccccagccggcagaggcgcctactggtgcgactactccccagacctcggccctcattccaccgaagatctgcccgactcgcgctcgcctacctcgatgctatcgatcaccctgttgaacctacctagctcgcctactttgcgcttaaaagtccgcgcacatatctggactgtttgcactctgcagagatcttgcgcagtagatatcgagtctatgaacatcttattcaattcccgcaaataatcctttaaattcctccattccaaaggaggcctaatactattgttctatataatgctagcatatagcactctgtccgcatacattggactgcggcagtacgagcttagagcaacgc

SEQ ID NO: 19329 - DNA, 404 bp, Oryza sativa
  unsure (1)..(404): unsure at all n locations
  Clone ID: PAT_MRT4530_247C.1
ccgtcagnngcttcgggcaacgtcancaatggcggcagggatcangttctgaaggtatngaanaataaannncttgggantttaaaagaaatgggtngtaaanttgcnggggaaattgttacnattccngaaaaaaaanttaanaancttgcaaaataccgaggtgcnaagaattgaancttaattntgttgggcattcccttgggaaaattntcgtccaactgactncaaaacccgntttncaccnttcttnaanaaaccgtttnncgtacatntcaatatcncggccanacttggnnacnggtanaggccaaaancnntatncnactctnggctnttntttcttnaaaancncaagggaacnnngtggntccnncaactcnctttcngtgataataacaccc

SEQ ID NO: 19330 - DNA, 1507 bp, Oryza sativa
  Clone ID: PAT_MRT4530_24800C.1
ctcgggagggccagatctgccgccctacggtggagctcgacgctcggcggtggatctgggggcggcggtggcagcgacggtctcgggcggtggcggcggcggtctcggggagagggaggccttgctggccttcaagcgaggcatcaccggtgatcccgcaggtcgtctcacctcgtggaagcgaggtagccatgactgctgccagtggaggggcgtccggtgcagcaacctcaccggccatgtccttgagctccaccttcggaatatgggtccagccggccgattcccgcggttcgtcagctctctcaggaacctgatatatattaacttctctggtatgccattaacaggtatggtgccgcctcaactcggtaatattacaaagctgcaatatctcgacctttcccatggaataggtattgcaagccaatcattctcacagttaaacctcacaagactcgagaagctcgacctctcctacaataattttaaccaacctttggcatcttgttggttttggaatttgacaagtctcacgtaccttgatcttataatgaacattttgcccggtcagtttccagattcactaggagacatgaaggccctccaggtcttcagattctcgagtaatggtcacagtatcataatgccaaacttgctacaaaacctatgcaatttagaaatcttagaccttggaggcaacaatatcactggaactctgccaactggggtgggcaaatttactagtttggacactcttgatctctctcataaccaactgactggatctgttccatatgagattagcatgctgactagtttggctaagatcgacctaagcctcaataacctgacaggtgaaatcacagaggaacacttagctggcttaaagatgtcactagaaagactctatttaggttcaaatcaaataaccggtgtaataccaatcctgccacctaacctcacctggttggagatccaaaataacatgctatcagggtctgtggcatcaaaaacctttggatcagctccacaactaggttttatggatctatcctccaacaacatcaaaggtcatattccaggttctatctgcgagttgcagcacttgcaatacttgaatttagccaacaatcatttggagggagaatttcctcaatgcattgggatgacagaactacagcattttatcctaaataacaatagcttatccggcaaggtcccgtcttttctgaaaggttgcaagcagctaaagtacctggatctatcacagaataagttccatggaagattgccaagttgaattggaaacttctcagaagtacaaattctaatcctaaacaacaattcgttctctgggcatatcccaaccagcatcaccaatcttgcaaaacttgctcggttgaatctggcaaacaataatatatcaggcgtcttgccttgacagttcggaccactacgtaaaagtcacacctaggttttcacctcgccgtcccactcccaccca

SEQ ID NO: 19331 - DNA, 1938 bp, Oryza sativa
  Clone ID: PAT_MRT4530_24801C.1
atggatcctacacagaagttccttctcttcctcctcgttggagtagccgccaccttgtcccttgcaaccaattcaccggtgccgcagtggccagccagctgcacgccacgggagagggaggccttgctggccttcaagcgaggcatcaccggtgatcccgcaggtcgtctcacctcgtggaagcgaggtagccatgactgctgccagtggaggggcgtccggtgcagcaacctcaccggccatgtccttgagctccaccttcggaataacttcccgcgatacgacgaagcaacagctttggtggggcacataagtacttctctgatctctctcgagcacctagagcaccttgacctcagcaataacaatctcgtgggtccagccggccgattcccgcggttcgtcagctctctcaggaacctgatatatattaacttctctggtatgccattaacaggtatggtgccgcctcaactcggtaatattacaaagctgcaatatctcgacctttcccatggaataggtatgtactcaacagatatacagtggctcaccaatctaccagccctaaggtacctaggcttatcaaatgtaaacctcagcagagtatctgactggcctcgtgtggtgaacatgaattcatatctaatagtactcgatctttctggttgctctcttacaagtgcaagccaatcattctcacagttaaacctcacaagactcgagaagctcgacctctcctacaataattttaaccaacctttggcatcttgttggttttggaatttgacaagtctcacgtaccttgatcttataatgaacattttgcccggtcagtttccagattcactaggagacatgaaggccctccaggtcttcagattctcgagtaatggtcacagtatcataatgccaaacttgctacaaaacctatgcaatttagaaatcttagaccttggaggcctaagttcctgcaacataacagagcttctcgatagtttgatgcattgcttaaccaaaagaatacggaaactatatttgtgggacaacaatatcactggaactctgccaactggggtgggcaaatttactagtttggacactcttgatctctctcataaccaactgactggatctgttccatatgagattagcatgctgactagtttggctaagatcgacctaagcctcaataacctgacaggtgaaatcacagaggaacacttagctggcttaaagagtttaaaaagcttaaacttgtattataatccctacttgaagattgtgcttggtgatgaatggttaccgccctttagactagaggtggcgagatttggatcttgtcagctaggtccaatgtttccttcgtggcttcaatggatggtgaatattaaagaacttgatatttggagcacaggtataaccgatcaacttccacattggttttggacaacattttctaaggcaacagacttagtcatatcctccaacaatatcagtggtagcttgccagcaaatatggaaaccatgtcactagaaagactctatttaggttcaaatcaaataaccggtgtaataccaatcctgccacctaacctcacctggttggagatccaaaataacatgctatcagggtctgtggcatcaaaaacctttggatcagctccacaactaggttttatggatctatcctccaacaacatcaaaggtcatattccaggttctatctgcgagttgcagcacttgcaatacttgaatttagccaacaatcatttggagggagaatttcctcaatgcattgggatgacagaactacagcattttatcctaaataacaatagcttatccggcaaggtcccgtcttttctgaaaggttgcaagcagctaaagtacctggatctatcacagaataagttccatggaagattgccaagttga

SEQ ID NO: 19332 - DNA, 148 bp, Oryza sativa
  Clone ID: PAT_MRT4530_24802C.1
ttttgggggctggaaaaggatatattccccaagcgtgacaacaacttttgagagccagcgagagtgagagaacccctccccaccctgctaaaatacatcatcttcaaacgaaaatgaattcgtgaacttcaacggggagggaaaaaga

SEQ ID NO: 19333 - DNA, 1633 bp, Oryza sativa
  Clone ID: PAT_MRT4530_24803C.1
caccctgggaaaaacccaccaggccatcaaaaggcctatttttctccatggtaatctcacagggatgaaaggcactcgatccagatttgtgttttcattttagtcctttgtttttttttatcctctctcaactagttttattttttttgaattcacaaaacatcttacattttggtagatagcaaaggtaccagctgcaatagtgacaggcaaaagttacatgcttcctttcgttcatcatgtgatgcagaagcttatgaattacatgggtgattttatgattcatattcagaaaaaaaatgatgattttacaccaccctacaagaatcatcagatcatgcgttttgttttctctttttcactgcgcaacaatcataatccttggacacttagatcctagtagacctcaacgtgccattgcttgttcttcttgagctgggatagcttctgctcccagctctcccctctctgctccgccactttcttgagggtgtcttgaatcccaggcatcatccccttcaaaccacagaagtagatgtgcgcgccgccatccaagagcttgaagatctcgtcgctgtactcctcgatcttgtcctggacatacatcttgccagcgttcttgtttttctgctccctgcttagcgctttgtcatacctgaaattgtctggatactgcttaaggtagcttgtgaactcttcatcatagagaaggctgtcagtgttagccacaccaaggaagagccaggccaagccaccaaatctgtactttgggacatcttccatgaacatacggcgtaggtagccacggaatggagcaacaccagtgccagtagctatcatgatgtgagttgcatttggatcttcctcaggcaggagcattattttgcctgacggacctgtcactttaaccttgtcccctggttttgaattacataggaagttactgcagacaccattttttgaggggtcctccttgccagtttcaggatcataataaacggcacggcgcacacataaactagtggtccttccatcgaatgaatctccataccttgtagatgcaattgaataaagacggacattatgtggtgcaccaggcttcttcgggttctcccctggaggaataatgccatagctttgcccctcccagtaaggcacattgccaccatgatcaataacaatgtggcatgtctctcctggagccttggggcctacgatcctctcaaccgagacaattgtggcggtgtaaggctcctttggtttgtatgtgttgagcggcggctcgttagcactctccaaatcaagaggcttgacagcaaccttgctttcgctcgcttgctgaactgacatgcagagcaccttgttcgcatgcctcggtcgcgtggccttgctctcccacgccaatgtggtgccaacccatgatttgttgctaaagctaatattgttgctaccctggatcccagaactcctcaagccgcgatccgagccagccggagcagagacagcaacctgggacgcaacggcggtcgccatggccgatcctgagggaaagcaagggtcttttgatctggagaagggagatgaggtgggttgagatgagatgggaggggaggaggcggggtttacctcgtgc

SEQ ID NO: 19334 - DNA, 597 bp, Oryza sativa
  Clone ID: PAT_MRT4530_24804C.1
atggcggcggcggggcctattttgcagcggcgctccatctcaggcatgggggaggcggaggagatgtggtcggcggtggcagaggccagcgcggtggaacgagaatttgagaatagattggtacctaatgattatattgtgattatgaacaatggaagggacaaggagacacttggagaaggacttagagtcatggaggatcatccagggtgtccaagtcaagggggtgggaatgatgaggacatcctctactattacccgctggcaaagacacaaagtcgggcggcgaccgtggagattgaacctttccccaaggctgacgtcagcgcggggcggcgcggcgccgacatgtgggacccaccggccgatcggacggacgacggcggcggcaaccccgggctcggatcggcgtcaaagccgatcggccgacccgagctagcggcggcggcggcggtagggatggcgctcacccgtgcacgtggggagggggttccggcgacgaacctcgacggaggaggggcggacgaggtggacctcggccgcgcgaagctaacggcggcgacggcgcaagacggcggcgagtctagcggcggctag

SEQ ID NO: 19335 - DNA, 349 bp, Oryza sativa
  Clone ID: PAT_MRT4530_24805C.1
acatagataacaaagagtaattgctatattagtccgcctgggtagacgatggcatgccaacacattatcgactgaaccacgatcatgcccaaacattggtaaaataccaatgccataaagtaaaccccatgcgcaggtgcatcccaagagttacataggcacggcctaatagtgaaacaacaaatttaggacccttagtgggaacacataaaaggggcttattgaccaagcgaaagacctactgaacaaacggacagggctcggtccctgaaatatggtgtcccatccgaccagtgggaccccacttgcctagtttcaagggcccaagctgatgataatctgtgaaaat

SEQ ID NO: 19336 - DNA, 927 bp, Oryza sativa
  Clone ID: PAT_MRT4530_24806C.1
atggggtacaaattagaagcacacggttgtgcttacagaggcgtgttcacatgcgctccgaaagctagggagaaaaggtttcaagagcttcctgctttttgggaaatgtctaatcctggtgatggcataaaatggacatacatgccgatcattagtagtattgaattaagcaaatcatcttctattttaattttcattagtagtatggacaagatgctcacaagaataatcaatctaattctaagaaaaacagatatctttgacacaaaagaaatggccattgctcctcctaggatccagccggtctctgcacacctgcactcctctgctagccctaaggattcagatcatcaggagaagaagcaggtttgttacacggtgtggatgaaatcgctggtgttcaacggccgcggatgcacggtgtacggccaggacggccgcgccgcctaccgcgtcgacaactacgcctgcaggcgcagccgcgaggtgttcgtcatggacagcggcggcaagacgctcttgaagctactcaagaagaattttggagtgttcaagacatggcaaggctactcctgctgcaacaacaataatggcgatgctgctgcaaccatggaagatcagccatggttcagggtgcagaaggagtacaagattctgaagaaggaagggcgatacaatgtcagagccgcggtcgaggttgctctgaccggagaggtgtacaggatcatcgacggcgcgtcacacaagtcggagtacagaatcgtcggcgcaggaggcgaggttcttgcggagatcaggaggaagcagacggacgcaggggttgtgctcggagacgacgttctgaccctgacagtgggccccaccgcggatcggctgcttgtcgtagggctcatggtcgtctgcggcctccttgaccgctgcatctga

SEQ ID NO: 19337 - DNA, 915 bp, Oryza sativa
  Clone ID: PAT_MRT4530_24807C.1
atgaagtatgtggactggattttcatgaggcacaagaacaatgcagtattcaatgaagtaatcaagataattgggcagttctatgctacagcttactttggcaccaccaagaagggcaaccatttcatcaagtggatgacgttggggaaatcttacagagttaccatgggtcagtttgctgctgccttagagcttgatccagaggatttgacaaggcctcatctctttgacttggaagccttaccgatgcacaggacaagcttcatgtatgagaaaggaactccttctaactgcatgggtaccactaaaggcttgcatcccaactataaggagtgtgatcacaaggtattccatcctcatggctccttccacttctttagcagctccgcctcctccatctcggtctactataggttcagcttcagccgcctcttcagttgccctcagcgcacgagctcttcttctcccatcaaggaggcgcttcaagcaattttttgtatgtgtgccgagacatccaagaaagtcaagaagattgagaggcgtcagaaggcagattggagggctgcaggcaaggatgcgtcagatgttttagaggatgaagcctatgaggatccatttgctgcttatgaggctgctagggatgtggctgccggtgagggtccctctcactccttccgtgaggactcctccacatccagtgatgatgatgatgatgatgatgatgatggtgatgagctgccggatatagagtcaccacgtactgatccagaggatgctgtggattctgctgcagaggagagtgatgctgaggacagtgatgctgctactgagaaggctgcttctggtgatgagtctaagcaagtcccttctgatgctgccattgagattgtgccttccgacgaagacgaggattga

SEQ ID NO: 19338 - DNA, 1378 bp, Oryza sativa
  Clone ID: PAT_MRT4530_24808C.1
ggctgcaggaattcgtgggccgctcctctctctctctctctctctctcttttcctcgtgagttcgcccgccgcctcgcctgcgccgatctccatcgaactcggcgagcagccgaggcggacctgctgcctccttccgccgcaagcatcctcgccgccggatcataatattgctgattttgtatgatttgattcttgttgggtgagcccaagatgtctggaaatgacgataagtctcaggctgcagctgagagaataaaagcacaggccttatctgctgccaagggattgagcagaactcaagccgagcgagctgctgcagccgctgcccgcaatgtcaatgcttatgggcagaaagaagagggaccttcgcgctggcaggagaggaaggaggccaagagacagatgtatctgatgagtacagagaaggctgtgatactgggagtgaaaccaaaagctgcgcaaacttcttcttcttctggtggcgcatatacccagtgccagaagtgttttcagcctgggcactggacatacgagtgcaagaacgaacgggtctacatttcgcggccctcgaggacacagcagctcaagaaccccaagctgaagaagacggctgctcctgtttcctatcagttccagaatcctgatcttgagaaggaaaaggaagaggaaaggaagctgatgaaagcaaagttgaagaaggagaagtctgagaaaagcaaacggaaaagcaagagaaaataccgttcacggagtgattcagatagtagtgaggcttctgtatttgactctgacagtgaatcatcagttaccggctctgaatattcttctggaagtagctcaagctacagctcctcagactcggaggacaagaagcggcgacccaaaaggaagcagcagaagaggaggcacagaagggaaacctcatcatcagcatcgtctgaatctgactccgaatctgcatctgcatctgacagtgattctgatgacaagggcagccgaaagaagagcaggaagcgaagcgctaggcgctgagtttgaagaactggagcaggcaacaaggacatcaattacgatgatatagtactatgtctaaatatcatttcttctcgtcaaaatcgtagatgcatgtaccaggcatcctccgacaagcatgtaacaatttaggtgcagggcgagtactgttctatcctcgattgtaacaatttctatcctcaactcaggtccagggcgagtactgttcttttttccattctacaatgaagtagtatttgaagctctagatcttcgtgttgtttgtatgccgttaatcattttgagaacctgtgaatcatgcaacaatgttttatctcccagttctaaaaaaaaaaaaaaaaaaaa

SEQ ID NO: 19339 - DNA, 243 bp, Oryza sativa
  Clone ID: PAT_MRT4530_24809C.1
atgtgggggcgtagcggagaggcggtgcggctggggtggcaggggcgaggcgagcggcaggcatggcggagaggcgggtacggcaggcgcacggtgctcggtgagcggcacggttggcaaaggcgcggcgagcagcgggcatggcggagaggtgggaggccactacgggcgaggcaaagcagacacatggtcggctgtcacaaggccatagtgcccgaagacggagccgttggcggatggtga

SEQ ID NO: 19340 - DNA, 670 bp, Oryza sativa
  unsure (1)..(670): unsure at all n locations
  Clone ID: PAT_MRT4530_2480C.1
cggacgcgtgggcggacgcgtgggcggacgcgtggttcacggagaaatcccagcctgcagctgcaggtggttaggttacccgttcagccgtcctcctcctcctccgccgccgccgtcgccggcggcgggtctgcgtttactcctccaaacccgtctcgcgtttcattcgcaggtacgcgcgctcacgtcgatcctttgctgtacattttgggtggttggggtgcattgatgtgggcatggatgttgtttcatcaccatacttgataatgctatgtagaaatacagacttctttttttcgtgtctccccgtattaaatttgcgcaattaatttgcagtgatgcgttttttttctctatatcagcagttaggagatcatgggattcactagacatttgggcggatgtgttgttcttgttaggttcgttcaaggattgaaagcttctgaaatgaacgccattggttgggacttcgagtgttttgatgttctgaaagcctgaaaccatgaagaatcgagcagtagagatgtcgagtgggcgtgtacacgtataaacatcactgcgagggaggattcgatatccatgaaatctacatcaagaggagcaattncagggtgctgttctcttatgtcggcgaaattntcctctttgcgaatgtactgcatgccttgct

SEQ ID NO: 19341 - DNA, 1643 bp, Oryza sativa
  Clone ID: PAT_MRT4530_24810C.1
ttttacaatcaaactaatgacaaggatttattctttggatgctcagaacatgatcaagatcttattttccttgacacaaatcaataataataatactaataataatacaaagaaacactctcatttggggaaaaaaaagagagaaaaattaagtactagtactactatttctcatctctattgacctaggaagaaagcttctgctcttcttccctcctctgttctttcatggcaacagctaaagaacagagggtggtcaccatgaactgcttctctagtgttcatcagctatgtgaggatcggatcgggttggattggattggattggattgggttgagtttggtcaccattgatctggttctgttcataatctcatgcgaagaagctggtgatatcaatggtgaatccggggtcgaactcgaaggcgtcgagggcggagaggtcggcgtcgaccatggcggtggcgggcgccggctgcgcggtcgccgtcgtcgtcgtcgcggcgacgagcgcggacaccacctcctggagctcggcgtcccgccacgcctcatcgccgccgccggccgccgcctggtggaacggcgcggcggccatcgagtcggaggtcgccggcgaggccgccgacgacgcggcggcggcgaggcggttctccggcgtcgacggcgcggagaacgggttgtgctgatccggcggcgccaggccgctcaccggcgacgacaggcagaacggcggcatggcgttccagccgccgccgccctgctgttgctgcggcggcgccgtcagcccctcgatcttcaccgtcaggccggagctcaggtcgtggaggcggctctcggcggcggcgttcgtgtccgtctccgtctccggcttgccggcgccggcggccaccgccttgtggacgcacgtgtgctcgccgtggtagatcacgtcgaacaccgtcgcgtcctcgtcggtgcgctgcacctgcttcgtcgccatgcatccctgcgagtggcggtgggtgcaacggtagtaaccccttgggtgcttggctccaagaatctctttctgcccatactttctccagctatggccatcatctaccggtggattctccacccctcccgtcgagctcaccctaatctgatgcctcttcttctccgtcgacgtcttcctcttcttggtggccttgaaaggcaagtcggagacgtcgctgagggggctgggagtcgccgagtcgaggtcaccggcggcgacagcggcggcggagcgcttgcggtggccgtcgaagtggccggacctgatcatgccgatggagcgctcggtgacggagaagatctgcgaggccaggtgcttgcagaggtcgggggagccggagccacccaggtgtccctccagctgcctcacgagctccttgatgtggctcagctccgtcaccaccagccgccctcctccattgccctccatgctctccatcacccctcaacccttgatcgatctcttcctgctctcaccaacctagataaattgctagctagctagctcgatcttgcaggttgcagctaagctcgcttcgcggtacaagaatggcaagaacgaccaagaagagtgatcaagaattgggtaaaaagatcgagatggcgagagtgcatcctcgtgc

SEQ ID NO: 19342 - DNA, 1351 bp, Oryza sativa
  Clone ID: PAT_MRT4530_24811C.1
ttttttttttctttttttttcttttttttttctttatatcgatcaaataacatttatttcataaaaattaaagtgaaccaactgcgtgcagtgaaaattgcccctctgagcatgacaaccatgtacataaacatatcttctctcctctcatggggtttaatctattctaatctttattctcacatgcccaccacggttggcttgcccatcctaggttggcttcacgggtaccaggaggattctttggcggctcattggcgttgctaggaggatccttcgtcggcacacctgtacctcctgcaagattattgccttaggtgccttcattggcaggaggatcatccttgggtgccacatttctacctccggtcaagattattctttggtggttctctcgcaataggatcatccttcggtggcacatttctacctccggccaaattattcttcggtagctccctggccgtaggatcatccgtcgttggcatatttctaccgctcccttgcaggagcttcatccttcgttggcacatttctacctccggtagaattgtgctacctgtggctctctcgcaggacaagcaatccggttcgacactgatatccttcttcgactgcacactttcggctcttctatgattattattcttcggtggcgaattggcaggaggaggatcgacgaccttcggctgcgcagttctaactgcagctggagactgtgattgctgccctatcctgactacggtgcgacgcaggtttgtgttcttggggatggtcacctccagcatgccggcattcagctcggctgtcacctggctgctgacaaactccttggtcaggagcaaccggagatggaaggagccaacgccttggacgtcgtcgagccgccgcgggtcgccgcgaccggccttacgcttgatctcgagcaattcgtcggtggtggtgatctccaggtcgtcctccgtcaggccgggcacctgcaaccacagctggacgttgccctcgtcatccttgatttcccaccgttctttcccctccggtggcgggacttggtacagtagagcggtgggaggaatgttgagcacagggcgatgtttctccggcgggccaacagaacgtgccaccggaagagtaggccgcctgcacttgacggcggcggaagccgggaagaacggcggcggcggcggcctccatgactgtgtatggctaacccgccgtgcgccggaggacgcccgcgtcaccggcgaccggctcgccggagcgtaagaggccacaaccatcgacattacgacaatcaacacacacgcgcttctctcttcactctggtctagtgatctgaagccatttgttg

SEQ ID NO: 19343 - DNA, 381 bp, Oryza sativa
  unsure (1)..(381): unsure at all n locations
  Clone ID: PAT_MRT4530_24812C.1
gcgaaaaaaaaaaaaaaaataaaaaaaaaaaaaaaaaaaatgacaataataataataataaaaaaaagaaaaaaagtatacactgacataaaagagaagttatactaataaaaaataaaanaaagggggggggctttttaaagatncannntttccttcccgnnggggggagggtattattttttttttnggggaacttaaattaattttattggccgtgtttttaaaacgtctagtttggaaaaacctttgtttttccaaatttaatgtctttggaaaaaattgttttttcaccatttgggttaatatnaaaaaggccccccccgattgcctttttaaaattttttccttttttatttggaaanttaacccccctttttt

SEQ ID NO: 19344 - DNA, 555 bp, Oryza sativa
  Clone ID: PAT_MRT4530_24813C.1
atgtccccagtgtcgccgccgctgccaaggtgctcgtccttgctgatggggatgggtggatctggaatgggttcatcgttggaagacgtcccactgtgccggtgctggtgtgatccaaggagaccacggacgaacggcattgatggagacaggtttgttcagcatcgccttctcgtctcaaccatcgtccccggattggtggtagtgctcgcgaggcaaggaggacaccagatgcaaactgtaaatctggcgaagcttcctcctgccggtcatgggcaacacgccgtcgtctgcccggccggcctcgaccacctcctaacggcctcgattgtgaccgcacgcaagagggatgcccccagcttagttaccgctggcgccatgctgctgttgacgggcctgttgtccctcaactcctgctttctgctcatcaagggatgggcaaagaacgtttttgggtgggtgtctgttgagcacagcgtcaaggccggctgcgacgtcgccggctacgacttcgacgccggcgttatgtcagaagaggaaggaccgacgttatga

SEQ ID NO: 19345 - DNA, 1934 bp, Oryza sativa
  Clone ID: PAT_MRT4530_24814C.1
cccgggctgcggctctgcggcacgaggttacgaagcagagccagccaccacgcacagctccgcaagtccacaactccctctccctctctagtctctctcctcccccttctcgaagcacgctgccgccgcctcctctccccgcgccgcgcgcctcgccgagttagggttccggcgagctcggggcctttctccggcgacggcgccctcctccggcccgagggctcgcttcgcgatcaaatagcagcgatggaaagggacacaagctctagtgatgtttctgcttctcatgtaggacgtgccaggcagcgaagacgtcctactgaggctactgcagatgggaatagaaccaatggaccagctttgcttgtcaatgatcagaataagtataagtcaatgcttatccgtacatattctacagtatggatgattggaggctttgtgttgatagtttatatgggtcacctctatatctgggccatggtggttgttattcaaatattcatggccaaagagctttttaacctactcagaaaatccagtgaagaaaaacaactaccaggtttcaggctactgaattggcacttctttttcacagcaatgttgtttacttatgggcgttttcttagtcgacagcttgttaacacagtaacttcagatcacttattgtataaggttgtcagtggtctcataaagtatcagatgttcatttgctattttctttacattgctggatttgtctggtttattttgactctgaagaaaaagacatacaagtatcagttcaaacaatatgcctggacgcacatgatccttttaacggtttttgcacaatcttcttttaccgtggcaaatatatttgaagggatgttctggtttctgttgcctgcttctctcattgtgattaacgacattgctgcctatctatttgggttctttcttgggagaacacctctgatcaagttatctccaaagaaaacttgggaaggttttattggtgcatctgtgacaactatcatatctgcttttgtgttagcaaatgtaatgggccgtttccaatggttgacatgcccaagaaaagtgagatatcatttcctttggaatgtgattgacctgtcgacagggtggcttcgttgtgaccctggtcctatgtttaagccagaacattattctttgggagaatgggtgccaaaggggttcccttggaaggaagttgttcttttgcctgtgcagtggcatgctttagcactaggtttgtttgcatcaataatagcaccttttggaggtttctttgcaagtggcttcaagagggcctttaaaataaaggattttggagacagcatacctgggcatggtgggattactgaccgaatggattgtcagatggttatggcagtttttgcatacatatatcaccaatcattcatatcgccccaaaactactctgttgagctaatcttggaacagattctaagaaatctaacctttgaggagcagaaattcttatatcagcagcttggggaaatctaccgtgaaaggcaattaatgcagagctgagaactagttttgctttatgagtgaagcatacagtatgttgtttttgagcgctcggttcccatgtatagcagcatagcttctctgtacggcgatagagcaacgtccctttccaaacccttgtacagaatagagtgtggatggggtttagcgatttaggtacttgattcgctctccacttacgttgccttctctggcgatcggtttatccttttacgctaattctcatcatttctgcccttgtaactgtaacaagggaaccggaaaaggttgtattcgtgtatatcacttcgtgtgttgcctcacatcaaatatgtgcaagatgcacaagataacacaggaaatgaggaaaatttattccccttttaaaaaaaaaaaaaaaa

SEQ ID NO: 19346 - DNA, 732 bp, Oryza sativa
  Clone ID: PAT_MRT4530_24815C.1
cggaagtccggcccgggtaccagcaggcatggcgccagcggtaactaagctggggggcatccttcttgcgggcggtcccaatcaagcccgttaggaggtggtcgagcccggccgggcagacgacggcgtgttgcccatgaccggcaggaggaagcttcgcctgccaccagcatgggagaccttgcttacattccacgaatcaagccctcgaaatacaagatcccaaaccaacaaaaaaagcactagtagtaagtaaagtaagtaatgatttgctctgaagaacaaagaacaacacaaaatgcaacagagaagactgctctaaccagatttacagtttgcatctggtgtcctccttgcctcgcgagcactaccaccaatccggggacgatggttgagacgagaaggcgatgctgaacaaacctgtctccatcaatgccgttcgtccgtggtctccttggatcacaccagcaccggcacagtgggacgtcttccaacgatgaacccattccagatccacccatccccatcagcaaggacgagcaccttggcagcggcggcgacactggggacatcgccagacggaaacatgaccgccaaccgccatgtggatacgggatcgatgtagagggtatgcagtagtgtcttcctcccgatgccgctgctcgtcgccgtttcctccacctaggaatcgccgcccactggacgcctccgcggatggaacgtacgcgtggg

SEQ ID NO: 19347 - DNA, 450 bp, Oryza sativa
  Clone ID: PAT_MRT4530_24816C.1
gagggaccccaaaggcatttgatatatatttcaaataaaggtgttcaacacaagaaagctttagacccggcaatatagcccccgacccttggggattcaggggtcaacaaaggggtttatgatcgggtttacaaacaaacaaaaagggccggtatttcggttcccacaaaggataagggtaggtttttttaagcggctgaaaggaagggcttcccgggggccccaggagaggggggaccctgggaacccaggggcttagcattgaccccatcagggagggttttacccccgcttttaagccggacgtattcatcgggggtgaacttggggaaaccccactttttaccctgaaagaactttgggggaccagggaacttggacttggcacgacggagggcttttctggcatggaccggattggtggggttgcccccaccaaaaggagggccc

SEQ ID NO: 19348 - DNA, 785 bp, Oryza sativa
  Clone ID: PAT_MRT4530_24817C.1
gcaccgtacattctccagccgcgccatcgttctttcacttcacccccaatgttgttctagcccccgcgccacccaagatagatagattcatcgcgatcgatcgagcgggaggtagagactagagagggatagtgtgtgctgctgctgctgcgtcggagtaggatatcgcgatcgatcggtcgatcgggcggatgcagcaggggagggggaggaggaggatgatgcagggatcgtcgtactacgccgtgctcggcgttcaccccggcgcgtccgccgccgagatacgcgccgcgtaccaccgcctcgccatgaagtggcacccggacaagatcaccagcggccgcgtggatgcggaggaagccaagagcaggttccagcaggtgcacgaggcgtaccaagtgttgtctgacgagaagaggagggcgctctacgactcaggcatgtacgacccgctcgacgacgaccaggaggaggacgtcgagggcttccacgacttcctccaggagatggtgtccctcatggccacggtaggaagagaggagcccgtgtactgcctggacgagctccgctccatgctggacgggatgatgcaggatttcgcctcgtccgaattgccttcgcccagcggcggcttcttcgccggcgcgccctcctcgccgttcgccgacaccggcgccgcgcagcagcagcgcggggtcggctccgcctccgcgcgcgcgcacgctcatccccaggtggtcggcaactctgcctgcctcagccggatggccttctccagctactga

SEQ ID NO: 19349 - DNA, 451 bp, Oryza sativa
  Clone ID: PAT_MRT4530_24818C.1
aacaaatacaacttggttttttacatttacaggtaatttggtgacttgtttacaaaaaaaaaaaattgtgcatcacagagcaaggtttattttaaaagacgggccaagccccctaagggacatataaaacatttcccaggttgagccacacaaaatgccaagaatgttttactcttcactaaggggggaactcaccgacgtaaattttatgacacaaacccgcaactatgaaacaattgcgttacggatttcaagaggggggccggagagattttggccaaatcaggtcagaatctgaagggaacgcaacaacaggactctcctctctcacaaggaaaaatgtgctaagaagcccaccaaaggggaggctggttttagggaaactccattgaaccccaggggatgtggtggtgggcgaaggctccccgaagggaatcaatccacggggggg

SEQ ID NO: 19350 - DNA, 2595 bp, Oryza sativa
  Clone ID: PAT_MRT4530_24819C.1
atgtctaaggatatcgctccgattggagaggaattatgtcttgtggacagtggtaccacaaactctatacttagggagatcaaatactttcaaactctcaaaaagagagaaggcaaagttttgactatcgctgggagcgatactgtgatagttggctcaggacgagcaattattacactcccaatgggtacacaaattacaatcgaggatgctttattgtatcctgattcaacccgtaccctactaagttatagagatatccgtcaaaatgggtttcacattgaaactcatatggataatcgagaagaatttcttctcttaacgaaacaaaacggatatggcaaacgcatttgcgagaaaattccatctctcacatcgggattgtactatacatacattaagcccattgcacatgttgcgtacaaagtaatttttcaaaatgttgatgcattccacacttggcatgatcgacttgggcaccccgagccgaaccacttaaattccttgaatgcattcaaggagatatctgtggccctattgtgccaagatcttgaccgttcaggttatctatttattgcccggttcgctgactctatctttgatgaggaacattttccggcattagggggagaattcaagtaccagaaagaatgccaggaaattgattgggatgcccagggtattccagtctcagacccacgtactactgaagctgaacttcaagttcagaaaattatacatttgcaaagacttgcaaataacctgccagatgcatttaccaattttaaaggtgtgactaaatctttcattcccgctcagaatgcgccagaaagagtggaggtaccaaataaaaccactcaacttccactcactaaaaagagaggaagaagtatggccactcagcgagaaacaattgctaataagcaaagaaagacggtaaatgcaaaccaacctttagttggtacacaccaaattgatactatatgtcaagcagatcatgatagtctgcaacctagctcggtggtgcacaatgctgagactaggaattcggaagaccatagacacattgtttcgggagatcacaatgagtctataagggttgatgaaattgccatcaattactctgaaactagagaatcttttgatagaagagctacaattgtcgacactaatttttctgaacaaattgctgaatgcctccaagttgatccagaacctaggtctataaaagagtgccaaaagcgctttgactggaacaaatggaaggacgcaattgacatagaattagcctcgctttacaaaagagatgtattctcggctgtaatgcctactcctcgtggtatcttccctatgggatacaaatgggtttttgtccggaaacggaacgaaaacaacgaggtgatggacgtagtgacagcatatctttatgggtcacttgattctgatatttacatgaaggttcctggtggaatcgacatcccgaatcagaagggatacactaaaaatgatgattgcccgtgcgtctttatcaaaaagtcccccacaggattttgtattatttcggtatatgtcgatgatctcagcatcattggcaatacacaagatattaatgaagcacgtcatcatttaaagacggaatttgaaatgaaggatttgggtcaaaccaaattttgcttaggtctacaacttgagcatttaccttctggaatccttgtgcaccaaagtgcatatacccagaaaattttggagaaatttaatatggacaagtcatatccttccaaaatccctatggtggttcgatctctagacgtggagaaagatccatttagaccaaaggaagatggagaggatgtacttggtcctgattttccatatcttagtgctattggcgcacttatgtaccttgcaaatagtacaaggccagatattgctttctcggttaatctattagcaagatatagcgctgctcctaccaaacaccattggactggagttaagaatgtctttcgatatcttaatggcacaagagatcttggacttttctttaaaaagaaccaggattcgactttaattgggtatactgatgctagctatctatctgatccccacaacgccagatcacaaacaggattcgtatttttacagggtggaactgctatttcatggaagtcttctaaacagactctggtagccacttccacaaatcattctgaaataattgcattatatgaggcgtcacgtgaatgtgtatggcttcgcagaatggttaaccacatattaacatcttgtggtattggttcattggaatcacctaccattatctatgaagataatgccgcttgtgttgttcagatgaaaactggttatattaagagcaacatcactaagcatattgctcctaaattattttatcctcatgagcttcagcaacatggagagataaatatcttgcaaactaagtcatgtgataatcttgctgatttattcacaaaatctctaccatactccacattctttaaatatgtcgaaggaattggtatgagacgacttaaaaatttgcaggattcaaggggagtatcttcctctggaaaataa

SEQ ID NO: 19351 - DNA, 650 bp, Oryza sativa
  Clone ID: PAT_MRT4530_2481C.1
gcacgaaacacgcgagcgaagaggaaggcgagccgtcgcgtaaaacagttataacacaataaacttaataaagttgacggagcttagggctcctcaccgggagaccgcgcaggcccccctttgtcggcctgggcctccttttttatctggttaggggtcaccacatgggcctctagctgcctaagaaaggaaacattctttttataatgagggctagtctacagccggaagtgacctttgacaagcagagcgcacgtctcttgccccgctcgtccgcttttccgggggacgcccatttcaaccttcatttaatggccagcgatttccttgccatgcttgtgctgaagcctagaatggatctgaccgggactgacataccaactccaggagtcagcacgccagctccggctagagacgagagccaggaagctctcatcattctgacgggacagggcgaggcgcgcgacaggccgcctgttgccacccatcccgcgatctgaccgatctgtgaccggtcacataccgcgactgcacctaaggcaaggaaaataggagggaaagagcggaaaccagattctcgccacaaacatgtcgacaaccgaaatagcgaggagggaattgttggcgaggaagacaatggcgagcttgag

SEQ ID NO: 19352 - DNA, 560 bp, Oryza sativa
  Clone ID: PAT_MRT4530_24820C.1
aaaaaaaaaaaaaaaaaaaggacaggccgaatctaaaagaatacacaagactaacaaacaacaaaacataaaaaaaaaataaaaactaatataaaaaaaaactaaaataacaattaactgaacaaaaaattaacaacataaaggggggggccttctttggggtccccctttttcttccccttgcttcccattcttttttttttttttggggtccccaaatttaattccgtggccctcgtttttccaaccggttgcggggaaaacccgggggttgccccactttttgtccctgcgcatcattccccttttctgtggtggtttttttcagagaggcccccccccttgccccccccctaacgccgggtcctttcggtttggtgcgtggcccccccccttcgggggccttttttccccgggggggtgtgtatccccccctccctttccctttccttttgcgtgcctttcggccccgcgccctggggtttctttctttgttttttggcccacgttgtgggttttccccctgctgctttatttggggctttctttttggttccctt

SEQ ID NO: 19353 - DNA, 2808 bp, Oryza sativa
  Clone ID: PAT_MRT4530_24821C.1
atgggtacacaaattacaatcaaggatgctttattgtatcttgattcaacccgtaccctactaagttatagagatatccgtcaaaatgggtttcacattgaaacccatatggataatcgagaagaatttcttctcttaaccaaacaaaacagatatggcaaatgcatttgcgagaaaattccatctctcacatcgggattgtactatacatacattaagcccattgcacatgttacgtacaaagtaatttttcaaaatgttgatgcattccacacttggcatgatcgacttgggcaccctagtatcgggatgatgagaaaaattattggcaactctattggtcatcatttgatcactgacaaatttcccaaatcctccgatttcgtatgcactgcatgtgctactgggaaactgattttgagaccatcttatctcaaaattagagccgaaccacttaaattccttgaacgcattcaaggagatatctatggccctattgtgccaagatctggaccgtttaggtactttatggttctgattgatgcatctactagatggtctcatgtgtgtcttctatcgacacgaaaccatgcctttgccaaattaatgtctcaaattataaggctgaaggcaaattaccctgaacataggattcaatcaatccgtatggacaatgctgccgaatttacatcccatgctttcgatgattattgtatggcattgggaattcaggttcaacactttgttccatatgtccacacacaaaatggtttggctgaatcattgataaaaagaattaagcttattactcgaccattattgatgaattgcaaattaccttcgtcgtgttggggtcatgcagttctgcacgctgctgaccttgtccaactacgaccaactgcatatcatgaaacttccccaatgcagttagtacgtggaaatcttccaaatatttcccatttgcggggagacttcaagtaccagaaagaatgccaggaaattgattgggatgcccaaggtgttccagcctcagacccacgtactactgaaactgaacttcaagttcagaaaattatacatttgcaaagacttgcaaataatctgccagatgcatttaccaattataaaggtgtgactaaatctttcattcccgctcagaatgcgccagaaagagtggaggtaccaaataaaaccactcaacttccactcactaaaaagagaggaagaagtatggccactcagcgagaaacaattgctaataaacaaagaaagacggtaaatgcaaaccaacctttagttggtacacaccaaattgacactatatatcaagcagatcgtgatagtctgcaacctagctcggtggtgcacaatgctgagactaggaattcggaagaccatagacacattgttttgggagatcacgatgagtctataagggttgatgaaattgccatcaactactctgaaactggagaatcttttgatagaagagctacaattgtcgacattaatttttctgaacaaattgctgattgcctccaagttgatccagaacctaggtctataaaagagtgccaaaagcgctctgattggaacaaatggaaggacacaattgacgcagaattagcctcgctttacaaaagagatgtattctcggctgtaatgcctactcctcgtggtatctttcctgtgggatacaaatgggttttcgtccggaaacggaacgaaaacaacgaggtggtgagatataaagcaaggcttgtagcacaaggttttacgcaaaaacctggcgttgatttcaacgaaacttactctccagttatgagtggtataactttccgatatttaatatcattggcagtacaaaatcgtctatttatgcagttgatggacgtagtgacagcatatctttatgggtcacttgattatgatatttacatgaaggttcttgacggaatcgacatcccgaatcagaagaagtcactttatggcttaaaacaatcgggcaggatgtggtacaaccgattaagtgaattcctttcgctaaagggatacactaaaaatgatgattgcccgtgcgtctttatcaaaaagtcccccacaggattttgtattatctcggtatatgtcgatgatctcaacatcattggcaatacacaagatattaatgaagcacgtcatcatttaaagacggaatttgagatgaaggatttgggtcaaaccaaattttgcttaggtctacaacttgagcatttaccttcaggaatccttgtgcaccaaagtgcatatatccagaaaattttggagaaatttaatatggacaagtcatatccttccaaaacccctatggtggttcgatctctagatgtggagaaagatccatttagaccaaaggaagatggtgaggatgtacttggacctgattttccatatcttagtgctattggcgcacttatgtaccttgcaaatagtacgaggccagatattgctttctcgatcacaaacaggattcgtattttacaaggtggaactgctatttcatggaagtcttctaaacagactttggtagccacttccacaaatcattctgaaataattgcattatatgaggcatcatgtgaatgtgtatggcttcgcagaatggttaaccacatattaacatcttgtggtattggttcattggaatcacctaccattatctatgaagataatgccgcttgtgttgttcagatggaaactggttatattaagagcaacatcactaagcatattgctcctaaattattttatcctcatgagcttcagtaa

SEQ ID NO: 19354 - DNA, 3200 bp, Oryza sativa
  unsure (1)..(3200): unsure at all n locations
  Clone ID: PAT_MRT4530_24822C.1
tcgctttgtgtctccgccgtgggacgcgccggccaagtccggcagcgtgaagcgtgtctcccccggccggggcggaaaccactccgcagcaagcacctccggccgaagaatcgcccccaatcggccaatcctccccaccccgacttgtataaagtagcccgctgccggagccccgacgtgccacgtgctgacgtcatctggccgtggttggacacgtgtcatgacatccaaggcttcaaagctggcggagcagcagagggaaccatttcttggagtcgccggccgccctgctggtggtgaccgcgcggttgcgccggccgacggcgaacatgacggcggtttctcctggttgacggccctcggttttgccttctgatctgcaaaactcaactgctcctaaagctgaggaagaaaatccagagacaaatgttgatctcgctctcgctaatttccatcgagaatatgaggtatttgaactgagaattgtccaccgcaagaacaggaccggctttgaagtaagcaaagatttccccattgtcataaattcagttatagcagggagatattatgtcactgaataccttggctcagctgcattcagtaaagttgtgcaagcacatgatcttcagacaggaactgatgtttgccttaaaataattaaaaatgataaggatttctttgatcagagtctggatgagatcaagcttctgaagtttgtgaacaaataagggattgggtttatgttccctctatccatcaagcgcttaagtgcctaatttttgcaaaaggtcacatggtcacagataaaataggtaattcactcaggtaaaagttcaacgaacacgttntgtcaagaaaaacatacacacaagttttgtaatctgaggcagttgccaaatgtctctgtcaaaacttatgtatattccctcttgatagggcaatgttctgttgaaattttcatggccgccaccacccgatctccctcaccggagcttcgcaagccaaaccatcgcgccatcgagttcgcctcgacgagtggttcttatataagtcctcgcgaaggaggcaaatatatgccgcgaagggcaaatgtgatatttaccgaggcgcagttctctctaaaaaccccgggaacgccagaactcctctcgctgctgataacgttacattcagagcgcatggggactagagttcatggaacagggcttgatacagttaaacatgtcggtttccgaatcgttagttttgggagccgacaggccactcagcgagaaacaattgctaataagcaaagaaagacggtaaatgcaaaccaacctttagttggtacacaccgaattgatactatatatcaagcagatcgtgatagtctgcaacctagctcagtggtgcacaatgctaagactaggaattcggaagaccatagacatattgtttcaggagatcatggtgagtctgtaagggttgatgaaattgccatcaactactctgaaactggagaatcttttgatagaagagctacaattgtcgacactaatttttttgaacaaattgctgattgcctccaagttgatccagaacctaggtctataaaagagtgccaaaagcgctctgactggaacaaatggaaggacgcaattgacacagaattggcctcgctttacaaaagagatgtattctcggctgtaatgcctactcctcgtggtatctttcctgggggatacaaatgggttttcgtccggaaacagaatgaaaacaatgaggtgttgatggacgtagtgacagcatatctttatgggtcacttgattctgatatttacatgaaggttcctgatggaacgatatcccgaatcagaagtgcatatacccataaaattttggagaaattcaatatggacaagtcgtatccttccaaaacccctatggtggttcgatctctagacgtgaagaaagatccatttagaccaaaggaagatggtgaggatgtacttggacctgatttcccataccttagtgctattggcgcacttatgtatcttgcaaatagtacgagaccagatattgctttctcggtaaatctattagcgagatacagcgctgctcctaccaaacgccattggactggagttaagaatgtcttccaatatcttaatggcacaagagatctaggacttttctttaaaaaggaccaggatcctactttaattgggtatactgatgctggctatctatctgatccccacaatgccatatcacaaacaggattcgtatttttacaaggtggaactgctatttcaaggaagtcttctaaacagactctggtagccacttccacaaatcattctgaaataattgcattatacgaggcatcacgtgaatgtgtatggcttcgcagaatgatggaaactggttatattaagagcaacatcacaaagcatattgctcctaaatttttttatcctcatgagcttcagcaacatggagagataaacatcttgcaaactaagtcatgtgataatcttgctgatttattcacaaaatctttaccatactccacattctttaaatgtgtcgagggaattgatacaatttggttccccttacgcacggagaagtccgccttggagaggctggatgggtaccagcttcgtctccggaaaaacgaggaggaccttcgccataaagatgacaaacgacgtgttgtagcgaacgccctaaagaagacgaacgcggagaacaaaactctcacgggcgaagtcaagtctcttcgcgcggagcttgagacggcgaacaagcgggataccgaatgggagcgtcaacttgctgcggccgaggagaagatcaagtctcttgaggctcgtcttgtcccggccgaagctgttgcttcgaccatggcaccggcagcggagtccgccaagcaagcctactacactcttaggctggccctcaacgatcttggcgcgcgcgcgaagggtgccccgggagatgacgggatggctttcgacttttctgagtggacgcaagagggggccggctcagttgtcgaagtggctagcgcctatggggactgctgcgcgcgtgttttggtgggtttcgtgctcagcttgcttcacgagcatggttgcggccatgtggaaaacttctccgagctcgtgaatgggactggcccgaaaactcccaggtctccggagcggctttaa

SEQ ID NO: 19355 - DNA, 2427 bp, Oryza sativa
  Clone ID: PAT_MRT4530_24823C.1
atgttgatgcattccacacttggcatgatcgacttgggcatcctcggtatcgggatgatgagaaaaattattggcaactctgttggtcatcatttgatcactgacaaatttcccaaatcctctgatttcgtatgcactgcatgtgctactgggaaactaattttgagaccatcttatctcaaaattagagccgaaccacttaaattccttgaacgcattcaaggagatatctgtggccctattgtgccaagatctggaccgttcaggattcaatcaatccgtatgaacaatgctgccgaatttacatcccatgctttcgatgattattgtatggcattgggaattcaggttcagcactctgttccatatgtccacacacaaaatggtttggctgaatcattgatcaaaagaattaagcttattgctcaaccattattgatgaattgcaaattaccttcgtcgtgttggggtcatgcagttctgcacgctgctgaccttgtccaactacgaccaactgcatatcatgaaactttcccaatgcagttagtacgtgaaaatcctccaagtatttcccatttgcgtaagttcggttgtgctgtatacataccgatctcaccaccacagcgtaccgctatgggcccacacaggaaagtagggatctatgtgggattcaaatctctgtcgatcataaagtatttagaacccttaacaggtgatctatttactgcccggttcgctgactctatcattgatgaggaacatttcccggcattagggggagacttcaagtaccagaaagaatgccaggaaattgattgggatgcccagggtgttccagcctcagacccacgtactactgaaattgaacttcaagttcagaaaattatacatttgcaaagacttgcaaataacctgccagatgcatttaccaattataaatgtgtgactaaatctttcattcctgctcagaatgcaccagaaagagtagaggtaccaaataaaaccactcaacttccactcactaaaaagagaggaagaagtatggccacccagcgagaaacaattgctaataagcaaagaaagacggtaaatgcaaaccaacctttagttgttacacaccaaattgatactatatatcaagcagatcgtgatagtctgcaacctagcttggtggtgcacaatgctgagactaggaatttggaagaccatatacacattgtttcgggagatcacgatgagtctataagggttgatgaaattgccatcaactactctgaaactggagaatcttttgatagaagagctacaattgtcgacattaatttttctgaacaaattgctgattgtctccaagttgatccagaacctaggtctataaaagagtgccaaaagcgctctgactggaacaaatggaaggacgcaattgacgcagaattagcctcgctttacaaaagagatgtattctcggctgtaatgcctactcctcgtggtatctttcctgtgggatacaaatgggttttcgtccggaaacggaatgaaaacaacgaggtggtgagatataaagcaaggcttgtagcacaaggttttacgcaaaaacctggcgttgatttcaacgaaagttactctccagttatgagtggtataactttccgatatttaatatcattggcagtacaaaatcgtctatttatgcagttgatggacgtagtgacagcatatctttatgggtcacttgattatgatatttacatgaaggttcctaatggaatcgacatcccgaatcagaagggatacactaaaaatgatgattgcccgtgcgtctttatcaaaaagtcccccacaggattttgtattatctcggtatatgtcgatgatctcaacatcataggcaatacacaagatattaatgaagcacgtcatcatttaaagacggaatttgagatgaaggatttaggtcaaaccaaattttgcttaggtctacaacttgagcatttaccttctggaatccttatgcaccaaagtgcatatacccagaaaattttggagaaatttaatatggacaagtcatatccttctaaaacccctatggtggttcgatctctagacgtggagaaagatccatttagaccaaaggaagatggagaggatgtacttggtcctgattttccatatcttagtgctattggcgcactgatgtaccttgcaaatagtacgaggccagatattgctttccaggtaaatctattagcaagatacagcgctgctcataccaaacgccattggactggagttaagaatgtctttcgatatcttaatggcataagagatcttggacttttctttaaaaagaaccaggattcaactttaattgggtatactaatgctggctatctatctgatccccacaatgctggatcacaaacataa

SEQ ID NO: 19356 - DNA, 2256 bp, Oryza sativa
  Clone ID: PAT_MRT4530_24824C.1
atggatctgactatcatgtcgctaaagattgccacatcccaacaatatattgttctcctgtatcagagatccctaaaggagaaaaagtcttctaaggaactaagatttgaagctcacttcaatcttacaaaagaaagacctgaggttgaaagttctcaccaggctcctattgaaccagagaacaacctcgttcttctcccagaggataccgctgcactttctgcaatggatgacatgctcatcgaatactgctcaacggactcacttggagatttactgagatatttgtggccctattgtgccaagatctggaccgttcaggttcaacactctgttccatatgtccacacacaaaatggtttggctgaatcattgatcaaaagaattaagcttattgctcgaccattattgatgaattgcaaattacctttgtcgtgttggggtcatgcagttctgcacgctgctgaccttgtccaactacgaccaactgcatatcatgaaacttccccaatgcagttagtacgtggaaatcctccaagtatttcccatttgcgtaagttcggttgtgatgtatacatactgatctcaccaccacagcgtaccgctatgggcccacacaggaaagtggggatctatgtgggattcaaatctccgtcgatcataaagtatttagaacccttaataggtgatctatttactgcccggctcgctgactctatctttgatgaggaatatttcccggcattagggggagacttcaagtaccagaaagaatgccaggaaaatgattgggatgcccaaggtattcccgcctcagacccacgtactactgaaattgaacttcaagttcagaaaattatacatttgcaaagacttgcaaataacctgccaaatgcatttaccaattataaaggtgtgactaaatctttcattcccgctcagaatgcgccaaaaagagtggaggtaccaaataaaaccactcaacttccactcactaaaaagagaggaagaaatatggctactcagcgagaaacaattgctaataagcaaagaaagacgttgatggacgtagtgacaacatatctttatgggtcacttgattatgatatttacatgaaggttcctgacggaattgacatcccgaatcagaagggatacaccaaaaatgatgattgcccatgcgtctttatcaaaaagtcccccacaggattttgtattatctcggtatatgttgatgatctcaacatcattggcaatacacaagatattaatgaagcacgtcatcatttgaagacggaatttgagatgaaggatttgggtcaaaccaaattttgcttaggtctacaacttgagcatttaccttctggaatccttgtgcaccaaggtgcatatacccagaatattttggagaaatttaatatggacaagtcatatccttccaaaacccctatggtggttcgatctctagacgtggagaaagatccatttcgaccaaaggaagatggtgaggatgtgcttggacctgattttccatatcttagtgctattggcgcacttatgtaccttgcaaatagtacgaggctagatattgctttctcggtaaatctattagcaagatacagcgctgctcctaccaaacgccattggactggagttaagaatgtctttcgatatcttaatggtacaagagatcttggacttttctttaaaaagaaccaggattcgactttaattgggtatactgatgctggctatttatctgatccccacaacgccacatcacaaacaggattcgtatttttacaaggtggaactgctattttatggaagtcttctaaacagactctggtagccactcccacaaatcattctgaaataattgcattatatgaggcatcacgtgaatgtgtatggcttcgcagaatggttaaccacatattaacatcttgtggtattggttcattggaatcacctaccattatctatgaagataatgccgcttgtgttgttcagatggaaacaggttatattaagagcaacatcactaagcatattgctcctaaattattttatcctcatgagcttcagcaacagggagagataaacatcttgcaaactaagtcatgtgataatcttgctgatttattcacaaaatctctaccatactccacattctttaaatgtgtcgaaggaattggtatgagacgacttaaaaatttgcaggattcagggggagtatcttcctctggaaaataa

SEQ ID NO: 19357 - DNA, 2727 bp, Oryza sativa
  Clone ID: PAT_MRT4530_24825C.1
atgatgagaaaaattattggcaactctattagtcatcatttgattactgataaatttcccaaatcctctgatttcgtatgcactgcatgtgccactgggaaactgattttgagaccatcttatctcaaaatcagagccgaaccacttaaattccttgaacgcattcaaggagatatctgtggccctattgtgccaagatttggaccgttcaggtactttatggttttgattgacgcatctactagatggtctcatgtgtgtcttctatcgacacgaaaccatgtctttgccaaattgatgtcacaaattataaggctgaaggcaaattaccctgaacataggattcaatcaatccgtatggacaacgctgccgaatttacatctcatgctttcgatgattattgtatggcattgggaattcaggttcagcactctgtttcatatgtccacacacaaaatggtttggctgaatcattgatcaaaagaattaagcttattgctcgaccattattgatgaattgcaaattaccttcgtcgtgttggggtcatgcagttctgcacgctgctgaccttgtccaactacgaccaactgcatatcatgaaacctcccgaatgcagttagtacgtggaaatcctccaagtattttccatttgcataagttcggatacgctgtatacataccgatctcacaaccacagcataccgctatgggcccacacagaaaagtggggatctatgtgggattcaaatctccgtcgatcataaagtatttagaacccttaacaggtgatctatttactgcccggttcgctgactctatctttgatgaggaacatttcctggcattagggggagaattcaagtaccagaaagaatgccaggaaattgattgggatgcccagggtattccagcctcagacccacgtcctactgaagctgaatttcaagttcagaaaattatacatttgcaaagacttgcaaataacctgccagatacatttaccaattataaaggtgtgactaaatctttcattcctgctcagaatgcgccagaaatagtggaggtaccaaataaaaccactcaacttccactcactaaaaagagaggaagaagtatggccactcagcgagaaacaattgctaataagcaaagaaagacggtaaatgcaaaccaacctttagttggtacacaccaaattgatactatatgtcaagcagatcgtgatagtctacaacctagctcggtggtgcacaatgctgagactaggaattcggaagaccatagacacattgtttcgggacatcacaatgagtctataagggttgatgaaattgccatcaattactctgaaactagagaatcttttgatagaagagctacaattgtcgacactaatttttctgaacaaattgctgagtgcctccaagttgatccagaacctaggtctataaaagagtgccaaaagcgctctgactggaacaaatggaaggatgcaattgatgcagaattagcctcgctttataaaagagatgtattctcggctgtaatgcctactcctcgtggtatctttcctgtgggatacaaatgggttttcgtccggaaacggaacgaaaacaacgaggtgttgatggacgtagtgacagcatatctttatgagtcacttgattctgatatttacatgaaggttcctgatggaatcgacatcccgaatcagaagtcccccacaggattttgtattatctcggtatatgtcgatgatctcaacatcattgggaatacacaagatattaatgaagcacgtcatcatttaaagacggaatttgagatgaaggatttgggtcaaaccaaattttacttaggtctacaacttgagcatttaccttctggaatccttgtgcaccaaagtgcatatacccagaaaattttggagaaatttaatatggacaagtcatattcttccaaaacccctatggtggctcgatctctagatgtggagaaagatccatttagaccaaaggaagatggagaggatgtacttggtcctgattttccatatcttagtgttattggcgcacttatgtaccatgcaaatagtatgaggccagatattgctttctcggtaaatctattagcaagatacagcgctgctcctaccaatcgccattggactggagttaagaatgtctttcgatatattaatggcacaagagatcttggacttttctttaaaaagaaccaggattcgactttaattgggtatactaatgctggctatctatctgatccccacaatgccaggtcacaaacaggattcgtatttttacagggtggaactgctatttcatggaagtcttctaaacagactctggtagccacttccacaaatcattctgaaataattgcattatatgaggcatcacatgaatgtgtatggcttcacagaatggttaaccacatattaacatcttgttgtattggttcattggaatcacctaccattatctatgaagataatgccgcttgtattgttcagatggaaactggttatattaagagcaacatcactaagcatattgctcctaaattattttatcctcatgagcttcagcaacatggagacataaacatcttgcaaactaagtcatgtgataatcttgctgatttattcacaaaatctctaccatactccacattctttaaatgtgtcgaaggaattgatatctag

SEQ ID NO: 19358 - DNA, 3572 bp, Oryza sativa
  Clone ID: PAT_MRT4530_24826C.1
gattggagtcttttaggactgtacattcgttctgttatatttttttttgtctctttgcacttttctgcaccctaaaacacactgcacctacctaccgttcatctgccttccacctagaccgtcggtttcatcgttctctttcctgccaccctggctagctctctctggccaatcacgcctcaactccctactggcattcttaatgaccttccccatcatgggcctttgaatcttttgcgcttgcaccccgagagtcactctcatcttccctccttccaatacaactagcggatgaggttatcgaagttgcgagcatgggtcgaacgatctgggcgttctctgcttactcgattctccccggcccaaagcaccgcagggcggcggcaattcgcctggccagcgattcctttgcagcggcggcggggaggttggggccgtgctgttgacacggctgcttgcagtagtttatgtcttttgggttcggtggttattcctggtgccccttcaactgctaaagtttcacctcgttattaatacagaaggagaaggcccatcacccttctccggggtatctgtagaagtggtaggttaatggaaggctgtacacttttaacaaagatggcgttgtctgtattgtaatggtcgaatattaatactacgttggtagacatgataatttcgtctgagttagctttcacgagagtgccatgaaataggattgacaatggcatcccgagtagtgtagtaaagcgattcagtaagatttgaacttgcattttgagatgaggatgggttcttcctctgtctgggtaccaaactccaataaagcgttgctgacgacaaaatatatcaatccgactgggtatatgtgattgaagcgggcactgttgaagttcgtgatattcagcctggaagctatgacctcattgagttacctgggctactgcctggcaaagtgaaatgcatccactcagacgataaatacactggcagttaaatattcagattttatagtggacacgctgtaagtcgataggttcatgtcacccagacgtactgtaaaagaggccgctgcaatcttttgcatattttgcgcaaataggctttttctttaattattatgagcttcatatatgacaattcagaatatacggtcgatgaataagtacaataagtaattttcaatccaaatccaatgatcaacaacttaagattaacgaaatccctacctcctctattctcgtatgtaggtcagcttttagcagacaatgaattttagtataaatacatcctctagttagttcagaattacggagcatagtagtaagcatctgatatatatgatgggttgcagttctccggaaattcgacgctttcgtatacgttctggttttgaatgatcaatctacttgatgttcttataaatgtaataaaaatacacgtaaacatgcctttgcaaaattgatgtcacaaattataaggctgaagggtattccagcctcagacccacgtactactgaagctgaacttcaagttcagaaaattatacatttgcaaagacttgcaaataacctgccagatgcatttaccaattataaaggtgtgaccaaatctttcattcccgctcagaatgcgccagaaagagtggaggtaccaaataaaaccactcaacttccactcactaaaaagagaggaagaagtatggccactcagcgagaaacaattgctaataagcaaaggaagacggtaaatgcaaaccaacctttagttggtacacaccaaattaatactatatatcaagcagatcgtgatagtctgcaacctagctcagtggtgcacaatgttgagactaggaatttggaagaccatagacacattgtttcgggagatcacaatgagtctataagggttgatgaaattgccatcaattactctgaaactggagaatcttttgatagaagagctacaattgtcgacactaatttttctgaacaaattgctgagtgcctccaagttgatccagaacctaggtctataaaagagtgccaaaagcgctctgactggaacaaatggaaggactcaattgacgcagaattagcctcgctttacaaaagagatgtattctcggctgtaatgcctactcctcgtggtatctttcctgtgggatacaaatgggttttcgttcggaaacggaacgaaaacaacgaggtggtgagatataaagcaaggtttgtagcacaaggttttacgcaaaaacctggcgttgatttcaacgaaacttactctccagttatgagtggtataactttccgatatttaatatcattggcagtacaaaatcgtctatttatgcaattgatggacgtagtgacagcatatctttatgggtcacttgattctgatatttacatgaaggttcctgatggaatcgacatcccgaatcagaagaagtcactttatggcttaaaacaatcgggcaggatgtggtacaaccgattaagtgaattcctttcgctaaaggaatacactaaaaatgatgattgcccgtgcgtctttatcaaaaattcccccacaggattttgtattatctcggtatatgtcgatctcaacatcattggcaatacacaagatattaatgaagcacgtcatcatttaaagacggaatttgaaatgaaggatttgggtcaaaccaaattttgcttaggtctacaacttgagcatttaccttctggaatccttgtgcaccaaagtgcatatacccagaaaattttggagaaatttaatatggacaagtcatatccttccaaaacccctatggtggttcgatctctagacgtggagaaagatccatttagaccaaaagaagatggagaggatcagctgggtcggatttcccataaggctgggtaggcccgagggagaggtggcgcccgcgcctcctcctcctcctccggcggcggcggcggcgtggatcggggcgatgaggcggtggcgaggattggcgggagccatggagattgccgccgcttggcgggaggaggaagggcacaagagatcttggacttttctttaaatagaaccaggattcgactttaattgggtatacgagtgcggactgtctatgtgatcgccacagcgccgggtcgcaatcatgctgcgtatttttacaggggggaactgctatttcatggaagtcttctaaacagactctggtagccacttccacaaatcattctgaaataattgcattatatgaggcatcacgtgaatgtgtatggcttcgcagaatggttaaccacatactaacatcttgtggtattggttcattggaatcacctaccattatctatgaagataatgccgcttgtgttattcagatggaaactggttatattaagagcaacatcactaagcatattgctcctaaattattttatcctcatgagcttcagcaacatggagagataaacatcttgcaaactaagtcatgtgataatcttgctgatttattcacaaaatctctaccatactccacattctttaaatgtgtcgaaggaattggtatgagatga

SEQ ID NO: 19359 - DNA, 589 bp, Oryza sativa
  Clone ID: PAT_MRT4530_24827C.1
tcaccgatccacggttgttgccatcaccgagacacgtgcgaacatcggcaccaaagtcggcgagctccgtggatttgagagaggagggttggcaccgctggagcttgaggcctcaccatccccctccaccaccgttgggggcggagtgcactcattggagctctgacccggcgggaggttgggctcgtcggctagcgacacctccacaatgagccctttattcaacgccatggccgcaagagcaccgtcgaccctccccttcacagcggctggaccaggcggcgaatctgccgctcctgagatcgccggtattggatccgccgttgtcaagctcgatggcgacggatccgccactcctaagaccgccagtggcggatccgcccttttcgagcctgccggtggtggatccgctcctcctgatctcattgcagccgtagccgtcgccgtcgcccccacaatcgttttggccatcgccgccgccatgtacgccgtcgtcgccaaggacgagggagagggggggggggagggagggaggaatatggcagggagaggagggagggaggacttatcggtggggaaggagagttag

SEQ ID NO: 19360 - DNA, 1403 bp, Oryza sativa
  unsure (1)..(1403): unsure at all n locations
  Clone ID: PAT_MRT4530_24828C.1
aaaaaaacaaaaaaacaccaaaaaaaaatttaaattaaaaaaaacaccaatagttttacacaaacaaaaaccctttaaaaacaaacaccaaaaataattaaatttaaantaaaacaaaaaaaaaaataaaaaaatacgcaagcaactctaatttaaactttgatacctcttaaaacaccactcccttttttttttttttttttttttttttttttttttttttttttttttttttttttaaacacggaaaaaaaatactaaggacatcatcattataaatatcctacttggaaagttgaactcatatttttgagaataatttaacataacatcagcttggaagacacataaaaaggacgggaggactcaaaatcaggaagctaacgcgcgctctgtaaatgacaaccatcagcttccgccttaacgcataacactttagcattcttgttcaaacgtgcagacatgctccccaacgccatatggaatcaaaagcctcgctgtggtcgctcagctgccacattcactcgaagtgggcggccatccaattcctgtccatcaagggcagaaatagcatcatcgagctcctccttggaggccatggaaacaaaaccaaatccccgagaacgcccagattctctatcgtagacaaccgaagcgttaaccacctctccatgctcgctgaacaattgcagcagcctagagtcatccacttgccatggcaggttgccaacataagccctgaaagcaggagcaaactgccttggaggtctctccacacgagagccccttggagccgccctgtttacgttcagaagccttccgttgatatcatagcggttaagcatctcaatggccttgtcggcttcctcaatcgtactcatggtaacgaacccaaatccacggctctgccctgtctctctgttgtaaatgacctcggcgacctcgacgacgccggcctgctcgaagagctgggcgaggccctcgctgtcgacgtcgtacggcaggttaccgacgtacaccttggcctcctcggggggctccgccgcgaactcctcctccaccgcttcctcctcctcctcctccacggaggccaccacctcctcctccgcctccgcctgctcctcgaccacctcctcctcctcctcctcctgggaaccctcatcggcctcctccgtctcgctccattcgacgccggcctcggcggcggcggcggcgtcggaggaggcgacgaggggcgcgagggggaggcggcgggaggcgcggaggaggggcggcgcgcgggagaagaggaggtggtggaaggggagggcggagagcttgtgcggggcctgggtggcgtcggcggaggcggccgcggccatggccatcgcgagcgaggtgacggaggtggtggccatggccat

SEQ ID NO: 19361 - DNA, 2436 bp, Oryza sativa
  Clone ID: PAT_MRT4530_24829C.1
ttgttggcggatggcatgaggcccttcggattttacatatacataccgatctcaccaccacagcgtaccgctatgggcccacacaggaaaatggggatctatgtgggattcaaatctccgtcgatcataaagtatttagaacccttaacaggtgatctatttactacccggttcgctgactctatctttgatgaggaacatttctcggcattagggggagacttcaagtaccagaaagaatgcgagagcgaaagtgctgataacgtattgattccagcctcagacccacgtactactgaaactgaacttcaagttcagaaaattatacatttgcaaagacttgcaaataacctgccagatgcatttaccaattataaaggtgtgactaaatctttcattcccgctcagaatgcgccagaaagagtggaggtaccaaataaaaccactcaacttccgctcactaaaaagagaggaagaagtatggccactcagcgagaaataattgctaataagcaaagaaagatggtaaatgcaaaccaatctttagttggtacacaccaaattgatactatatatcaagcatatcgtgatagtctgcaacctagctcggtggtgcacaatgctgagactaggaattcggaagaccacagacacattgtttcgggagatcacgatgagtctataagggttgatgaaattgccatcaactactctgaaactagagaatcttttgatagaagagctacaattgtcgacattaatttttctgaacaaattgctgattgcctccaagttgatccagaacctaggtctataaaagagtgccaaaagcgctctgactggaacaaatggaaggacgcaattgacgcagaattagcctcgctttacaaaagagatatattctcggctgtaatgcctactcctcatggtatctttcctgtgggatacaaatgtgttttcgtccggaaacggaatgaatacaacgaggtggtgagatataaagcaaggcttgtagcacaaggttttacgcaaaaacctggcgttgatttcaacgaaacttactctccagttatgagtggtataactttccgatatttaatatcattggcagtacaaaatcatctatttatgcagttgatggacgtagtgacagcatatctttatgggtcacttgattctgatatttacatgaaggttcctgacggaatcgacatcctgaatcagaaggtaaatcgtaatatgtattgtgttaagttgcagaagtcactttatggcttaaaacaatcgggcaggacgtggtacaaccgattaagtgaattcctttcactaaagggatacactaaaaatgatgatttcctgtgcgtctttatcaaaaagtcccccacaggattttgtattatctcggtatatgtcgatgatctcaacatcattggcaatatacaagatattactgaagcacgtcatcatttaaagacagaatttgagatgaaggatttgggtcaaaccaaattttgcttaggtctacaactttagcatttaccttctggaatccttgtgcaccaaagtgcatatacctagaaaattttggagaaatttaatatggacaagtcatatccttccaaaacccctatggtggttcgatctctagacgtggggaaagatccatttagaccaaaggaagatggtgaggatgtgcttggacctgattttccatatcttattgctattggcgcacttatgtaccttgcaaatagtacgagaccagatattgctttctcggtaaatctattagcaagatacagcgctgctcctaccaaacgccattggactggagttaagaatgtctttcgatatcttaatggcacaagagatcttggacttttctttaaaaagaaccaggattcgactttaattgggtatactgatgctggctatttatctgatccccacaacgccagatcacaaacaggattcatatttttacaaggttgaactgctatttcatggaagtcttctaaacagactctggtagccacttccacaaatcattctgaaataattgcattatatgaggcatgacgtgaatgtgtatggcttcgtagaatggttaaccacatattaacatcttgtggtattggttcattggaatcacctaccattatctatgaagataatgccgcttgtgttgttcagatggaaactggttatattaagagcaacatcactaagcatattgctcccaaattattttatcctcatgagcttcaacaacatggagagataaacatcttgcaaactaagtcatgtgataatcttgctgatttattcacaaaatctctaccatactccacattctttaaatgtgtcgaaggaattggtatgagacgacttaaaaatttgcaagatttagggggagtatcttcctcaggaaagtaa

SEQ ID NO: 19362 - DNA, 1445 bp, Oryza sativa
  Clone ID: PAT_MRT4530_2482C.1
tctcggcgggtacaccatcttttcattccgtattccttgtcgagatccaccaaccgttctcgaatgatcgagaaggcgtaaaatatggtcgtttgtctctacatgttccgacaaggccttatccgctctgggcgtccccagccaaagttcccttaggttcctcagaggccttgtcaagacggcgtaaagggacatgaggataggtttcaacgctaggtgtcgtcgtggtaagggatctctgagtaaaacacttggcgatattgtgtacctgatatcaactttgttgaagtagaggtaatgggaggatcgctacaccgctggtcgaaaaccagttgtagccccaactcgaccacttaaagtggaaatagtgggagaatcgctacactgctggtcgaggaccaggtagtagtcgtaattcgaccactagaagtaaatgtacgagagattgctatgattgactggttgagaaccagtgagtaggtgtctcttgaccatttgaagttggtacgagggccactatgctgccggtcgaagaccagtcgcagctgtccctcaaccatggttcgggaactagcgagcaagtagaaatatctctcgaacaccaatggaagttgcggtgcgagagattgctacggtttactggttcgggaaccagcgagcgagtagaattatctctcgaacaccaatggaagttgcggtgcgagagattgctacggtcttttctcgagtagtctagccatggccggtgctatgagataggtcgtcagtcttcgttggcaggttgggcgcgacgactctgcatttgtcgagatcgttctcgataatggggtgtactcgaccacaacctacttgagtgctcaattgttcctcgctgcgtactcgttcgatatcatgcgatctgacatcttttggtacgccgcggaccttgaggcttgaatgatctcgatagaccaagttgttgacgacgatggttccgatcttgtcggaggatatattccgatcgggttagatctccccacagccgaagtcgtcgaatagcttgttgttggagaatccatctcttaaacccatctcgtcgaaaccttgaagcaccaaaatccccctaccgggtgcaccactgtcggtgtttgagatcacaactagggtatttggattgtatggggatcattggtaccagggtatatgtgagattgaggtaaaagagatagagacaatgatttttatacaggttcgggccccttatctgataggtaatagccctactcctgttggtcaaagccggtgtcactcttattcattaactcgtagtcgacgacaggttagtcttcctcctcgagtccgaactcatcgagatcagagatggcgctagatccctgttgtcggcctccgtaggcaccggatggggtatgtctaggcttacctttgtcatcgttatatggcggcgt

SEQ ID NO: 19363 - DNA, 2677 bp, Oryza sativa
  Clone ID: PAT_MRT4530_24830C.1
ccggccgggaagctttgtgtctccgccgtgggacgcctcggccaagtccgggcgggtccttcgcaacatttgtgctcccgcaggaaaccactccgcagcaagcacctccggccgaagaatcgcccccaatcggccaatcctccccaccccgacttgtataaagtagcccgctgccggagccccgacgtgccacgtgctgacgtcatctggccgtggttggacacgtgtcatgacatccaaggcttcaaagctggcggagcagcagagggaaccatttcttggagtcgccggccgccctgctggtggtgaccgcgcggttgcgccggccgacggcgaacatgacggcggtttctcctggctgacggccctcggttttgtctttctaactttcaattcaggtatggcgatctaccgctcggacggcgacctcgccgccgtgtccttcgtgtccttctcctacatcgacctcgtgctgctcttcgtctgcttgcgcatgttcgagaaggcggagcccaactcgcgggagagggggaacctcaaggcggccgtgtggatcctgacgacgctgctcaccgttgttttttcctataaggtcgcggcgatcatgccgctgcccgtgcaaatactggtttgggcgatggccggcgcgactgtccttgggggcttctacgccttcttcgtgcaccgggaatccaaggaaggctaaagaaccgtggcaaaaattcaatgggggatgtgcccatcataaccctggttacgcatggtccaacattgatggaaaaaatcaagggccatggatatccttactgctcgaccattattgatgaattgcaaattaccttcattgtgttggggtcatgcagttctgcacgctgctgaccttgtccaactacgaccaactgcatatcatgaaacttccccaatgcacttagtacgtgggaatcctccaagtatttcccatttgcgtaagttcggttgtgttgtatacataccgatctcaccaccacagcgtactgctatgggcccacacaggaaagtggggatctatgtgggattcaaatctccgttgatcataaagtatttagaacccttaacaggtgatctatttactgcccggttcgctgactctatctttgatgaggaacatttcccggcattagggggagacttcaagtaccagaaagaatgccacgaaattaattgggatgcccatggtattccagccacaaactcacgtactactgaaactgatcttcaagttcagaaaattatacatttgcaaagacttgcgaataatctgccagatgcatttaccaattataaaggtgtgactaaatctttaattcctgctcagaatgcgccagaaagagtggaggtaccaaataaaaccactcaacttccactcactaaaaaaagaggaagaagtatggccactcagcgagaaacaattgttaataagcaaagaaagacggtaaatgcaaaccaacctttagttggtacacaccaaattgatactatatatcaagcagatcgtgatagtctacaacctagctcggtggtgcacaatgttgagactaggaattcggaagaccatagacacattgtttcaggagatcacgatgagtctataagggttgatgaaattgccatcaactactctaaaactggagaatcttttaatagaagagctacaattgtcgatactaatttttctgaacaaattgctgagtgcctccaagttgatccagaacctaggtctataaaagagtgccaaaagggctctcactggaacaaatggaacgacgcaattgacgtagaattagcctcgctttacaaaagagatgtattctcggctgtaatgcctactccttgtggtatctttcctgtgggatacaaatgggttttcgtccggaaacggaacgaaaacaacgaggtggtgagatataaagcaaggcttgtagcattggcagtacaaaatcgtctccgatatttaatatcattggcagtacaagtggtataactttccgatatttaatatcattggcagtacaaaatcgtctatttatgcagttgatggacgtagtgacagcatatctttatgggtcgcttgattctgatatttatatgaaggttcctgatggaatcgacatcccgaatcagaaggtaaatcgtaacatgtattgtgttaagttgtagaagtcactttatggcttaaaacaatcgggcaggatgtggtacaaccgattaagtgaattcctttcactaaagggatacactaaaaatgaggattgcccgtgcgtctttatcaaaaagtcccccacaagattttgtattatctcggtatatgtcgatgatctcaacatcattggcaatacacaagatattaatgaagcacgtcatcatttaaagacggaatttgagatgaaggatttgggtcaaaccaaatttttcttaggtctacaacttgagcatttaccttctggaatccttgtgcaccaaagtgcatatacccagaaaattttggagaaatttaatatggacaagtcatatccttccaaaacccctatggtggttcgatttctagacgtggagaaagatccatttataccaaaggaagatggagaggatgtactcaatcaattctatccacattcaacacctttgttgtaaataatgg

SEQ ID NO: 19364 - DNA, 1422 bp, Oryza sativa
  Clone ID: PAT_MRT4530_24831C.1
atgcaacaacaaggcgtaaatccaatggtcgacagaaaggaaaagggaaggttctgcacgctgctgaccttgtccaactatgaccaactgcatatcatgaaacttcccccaatgcagttagtacgtggaaatcctccaagtatttcccatttgcatgcatttaccaattataaaggtgtgattaaatctttcattcccgctcagaatgcgccagaaagagtggaggtaccaaataaaaccactcaacttccactcactaaaaagagaggaagaagtatggccactcagcgagaaacaattgctaataagcaaagaaagacgttgatggacgtagtgacagcatatctttatgggtcacttgattttgatatttacatgaaggttcctgacagaatcaacatcccgaatcagaagaaatcactttatggcttaaaacaatcgggcaggatgtggtacaaccgattaagtgaattcctttcactaaagggatacactaaaaatgatgattgcacgtgcgtctttatcaaaaagtcccccacaggattttgtattatctcggtatatgtcgatgatctcaacatcattggcaatacacaagatattaatgaaacacgtcatcatttaaagacggaatttgagatgaaggatttcggtcaaaccaaattttgcttaagtctacaacttgagcatttaccttctggaatccttgtgcaccaaagtgcatatacccagaaaattttggagaaatttaatatggacaagtcatatccttccaaaacccctatggtggttcgatctctagacctggagaaagatccatttagaccaaaggaagatggtaaggatgtgcttggacctgattttccatatcttagtgctattggcgcacttatgtatcttgcaaatagtacgaggccatatattgctttctcggattcgactttaattgggtatactgatgttggctatctatctgatccccacaatgccagatcacaaacaagatttgtatttttacaaggtggaactgctatttcatggaagtcttctaaacagactctggtagccacttccacaaatcattctaaaataattgcattatatgaggcatcacgtgaatgtgtatggcttcgcagaatggttaaccacatattaacatcttgtggtattggttcattggaatcacctaccattatctatgaagataatgccgcttgtgttgttcagatggaaactggttatattaagagcaacatcacaaagcatattgctccaaaattattttatcctcatgagcttcagcaacatggagagataaacatcttgcaaattaaatcatctgataatcttgctgatttattcacaaaatctctgccatactccacattctttaaatgtgtcgaaggaattggtatgagatga

SEQ ID NO: 19365 - DNA, 156 bp, Oryza sativa
  Clone ID: PAT_MRT4530_24832C.1
atggttgatgagcccagcggcagcggcttcgatggcggtggtggcgacggaggtggctgtggccaggcagcagtgagcaacagcggcggcatcgacgacggttctctgcaagagatccatgtcagcatattttcctatttgaaagagattgaatga

SEQ ID NO: 19366 - DNA, 612 bp, Oryza sativa
  Clone ID: PAT_MRT4530_24834C.1
atggtcggtggatggcgtgctggcggcgaacggcgtgcagggctgcgggcaagtgacgacggagggcgctggcggacgtcgatggcagctctcggcggcatgatgacggtggctcccagagtcctagtgaagagtgaagacggttgtaggtgccgcgcccggcggcgcgtcgacagaggctgccggcggctcctggtgaaaacggttgtaggcgccgtgcccaccggcgcatcaacggaggctgtcggcggctcccgtcgggtcaccgcgggggcggggacgctcatccctgatggacgagcctatggaatacctccgattaagctgcgctttatgatcgtcgtcttcaaagttgtttgctcgccgaaggttgaggttggtgcagatttaacggtgaatatagtgaatgtggaacgggttgctttgtttcgccaaaacccggtcacagtacactaccaccacgtcggagtgtggagagaatttggtgaagcgggtgacctttcctcgtcggtgcccagtcatggaccccggccttcatcaaacatggattttatggttgcttttgcctcgttggtgcctagcaacggaattgctctcccgtccatccggtag

SEQ ID NO: 19367 - DNA, 249 bp, Oryza sativa
  Clone ID: PAT_MRT4530_24835C.1
aacaacgacaaggacaaaaaggtaatcatcaaatcacagacaaatcaattcaaattttaagaaaaggttgaaaccccaaaactttccaaaggatacggcgccttaaaaacttaaatcggctagggcttttggggggcaaacttgggcttgatcttggccacctcctcggcggcgatctggaagggcttggggaggacggggtcgggcacccccggggaggggggaaaaagggggggggcaaaggactgg

SEQ ID NO: 19368 - DNA, 318 bp, Oryza sativa
  unsure (1)..(318): unsure at all n locations
  Clone ID: PAT_MRT4530_24836C.1
gtttgacgggatttctaaaaattataaaacagatgaaacccaacgagacaataaactctaaaaactataagatctaatttttaaaggttcgggcttctaaataataaaaaaaataaaccccaatgataatcatgtttgattttaaaaactcaatgacaataaagaagagcggcaggagncgagccatagaggagtatggtgactaagtcgctgatattttggtggaacttctaggaagtaaaaaaaatgaacctaaacaaggatccaatacgggattaatttaaaattcagggtttaaaaatataaaaagggnaaagg

SEQ ID NO: 19369 - DNA, 820 bp, Oryza sativa
  Clone ID: PAT_MRT4530_24837C.1
atgtcgtcgtcgtcctcgtcgtcggcgtcgtcggcggcggcggccgcgtttcggccggctgttgtgcagcgggagcagcaggtggtggaggagaaattccccgcggcggcggcggcgatgcgggagatggtcctcccgccggtggcggcggcggcggcggactccgagcaggagcagctctgctacgtgcactgccactactgcgacaccgtgctcgtcgtcagtgatctcagatcaaaccacgcacacttcctttccatttgtgttcatcttgctctcgactctcgagcttttcttgttcatccatggcggcgtgtgttgcaggatgagatatcgacggcgaactccccgacgcagctgctgctggagcagcacggcctcggcggcctcatggcgagcgcggcaagctgcaggaacaacaactccccggcggcggcggcggctccgccgccgccaacgtcgcaggggaaagcgggggcgaggagaaattccccgcggcggcggcggcgatgcgggagatggtcctcccgccggtggcgggggcggcgtgcggactccgagcaggagcagctctgctacgtgcactgccactactgcgacaccgtgctcgtcgtgagcgtgccgagcagcagcctgttcaagacggtgacggtgaggtgcggccactgcagcagcctcctcaccgtcaaaccgaggggcctcctcctcccgaccaccgcctcaggatcatcagagaaaggatgggctactaaaggaagggctttatgcagcggcagctgctgctgcggcggcggccaacatgggtgttgcaccgtactaa

SEQ ID NO: 19370 - DNA, 177 bp, Oryza sativa
  Clone ID: PAT_MRT4530_24838C.1
atgatcgagtccgtgatccccgtgatcgaaatatcgaaattgaccgtgtgcttgggtgaactccagagtccgcatgtgaaacttcaccgaaatagactccgggagaagatcgacgccgacagacattcaaatgaatcaaatcaagatgtactcactcacctactcttgtttgaaaaa

SEQ ID NO: 19371 - DNA, 427 bp, Oryza sativa
  Clone ID: PAT_MRT4530_24839C.1
ccggagcccggaggggagcatggaggccggcgagagggcagatccagcggaggccggcacggaggccaccgctgccgccgcccacgcgtccggcggtgtcctcggccgatgacgacgacgacgaggaggcagcagcgccgccgccggattctaggtttttcatttgttttgaaatttttttttccggatttttgtttttacgtacggatgatataagcatctgcacgcggaaatcgtgatttttgcatacccctgggtgcgtgcgggtcgctcacccgcacgcgaaaatctttctcgtagtagtggttctgatagcaaatagatatttttccttttgagttttgcccaacagatatttgaattgtggagtattatgtttgaaagatctcaaatgaaaaggttgtcaacaacaaaaaaaaaaaaaaaa

SEQ ID NO: 19372 - DNA, 423 bp, Oryza sativa
  unsure (1)..(423): unsure at all n locations
  Clone ID: PAT_MRT4530_2483C.1
ctgcagcccactactcttctagctctgccgacaaccacacctacaagagctacaactgaagcatcacatagccagatgaggcatcacatgtctggcttggattcaatttgatgttgcactttgtataactatatgcagtttcagtttcatcttctgtttctaccaccttgcaatgtgagtaaatcaatgttatattaacttgnaaaaaaaaaaaaaaaaaaaaaaaaaaattatgaaaaaaaaaaaaaaaaaaaaaaaaaaaaaaaaaaataaaaaaaaaaaaaaaaanaacaaaaaaaaaaaaaaaaaaaacatttaaaaaaccaancccaaaaactnntcacactattattgattgtttgaatacttacagttacaatcttttttaagagatgcattttaattaatgggcctgaaaatact

SEQ ID NO: 19373 - DNA, 213 bp, Oryza sativa
  Clone ID: PAT_MRT4530_24840C.1
atgaagagtatacccacgtcaacttctgctcctaacgtatacgaatggttcttatgctcgccaagggaagggggccaaacccataaccgttacccgaaaccaggagttaaaaaactagggatgcgggaagccattggaaaaagatatgcgaatccgctggttaaaccctttcttcaaccccttggtatgatacctcctttccctttgctttgc

SEQ ID NO: 19374 - DNA, 434 bp, Oryza sativa
  Clone ID: PAT_MRT4530_24841C.1
gggaagcagatcgtctgacgttaggcgcacaacgtcagagggacgtccagcgtcgatccatcatccgatcggcatctcacggcgctgctgcttccttcgttccgcatcgcacgagcgcggcgaggacggcccatcagcccatttacgagcaaccacggagggacaaaaatgaacgagactgctcgtcattcgtcaatctgccatcgcgcaaaaaaaaaaaagaaaagaaaaagcaatccccggcatggctgcccgccgctccgctgcggctcgccgcattcctcgacgcgggcgttgccgtccttgacaacgacggcttccacagcggcggcggcgccaagctcttcaccaccacccacgtcgaaggaatcgcaagagccgaacaaaaatcctcatactcatacatgcatgcgcttaaatctgaaagaatactt

SEQ ID NO: 19375 - DNA, 345 bp, Oryza sativa
  Clone ID: PAT_MRT4530_24842C.1
atggcggcggtcgccggaggtggaggagaggatgtccagggtgagccagtactcgacgctgtgctgcaggttcaggccgcccgggtagcacggcgcaccgctcgccgatcatgtccggccacgccgcgccggccgccttgccgtcccaccccagcatgccgaagtggaactccggcgggaggtcgtagaggcccatgtgcgaagggtcagctggcccatgaaaacgaacagatctcagagcatatcagtgatatcccacgagaaatctgtcgacagacgtttagcaaaatcacaggttataatgcatccctttgcaaaaccggtgaactcgaggtcccgtggtaa

SEQ ID NO: 19376 - DNA, 915 bp, Oryza sativa
  Clone ID: PAT_MRT4530_24843C.1
ctaatctctcctctcctttctcttttctctctctcttctctgttttctctcttctctccctcccagcttcttctccctcctctctctctcggctctttggcgatgacgaccgaccaaggggaggaggcggcggcttaccgacgatggcggcggcgacggcggcacgacgacggcgcacggcgcggcggcacgaaggcggcggtgcggcggcgcgagggcgacgcgacgacggcgcacggtgcggcggcacgaaggcggcggcgcggcgcggtggaggggaagggggaaaaaggaggggaaggaggggggaaatggcgtggggagggaagggaaaggggagggggtatttatagggctcgggggaggggtggccggctttaaacgatgacggaacggcgtggcgacgcggggctcgggcgatggcgacgcgcggcgatgggacggcgcggcgcgacggcgacagtgcgcggcgcgggcggggctcgaggcgctgatggcgacagcggtgacgcgatggcgcggtagcggcacggggctcggggcgcggcagcggctcatggcttggaggcgcggcagcggcgcaaggcgacggcgacgggatggcgggtgacgcaacggcgacggcgggtgacgcaacggcgacagcgcgcggcgtcttaaggcgctaggccgacggcgacggtcgagcggcgcggcatcgacagggcgcggggctcgaaggcgtggcaacgcgacggcgacggctcgcggctcgcggcgatggcgacggcgtgcggcacaatgggacgcgagggggcatggcagtggcggctcggcgacgcgacgggcgggcggcgcggcgcagggcacgaggtgggcgacggcgctgacaagacggcgcgcggcgcaaggcagcggcgcagcagagggcggtag

SEQ ID NO: 19377 - DNA, 321 bp, Oryza sativa
  Clone ID: PAT_MRT4530_24844C.1
atggacaagagttgtagggtcacgtacggcttaaatagtgcagcttccttcagtgtgaagcagacacctatccaagccatgatgatagggataggattcaccctccctcttccttacactggaaggctgcatcatcacgtcgttggcgacgctcaggccccaatccctgagtccaaggtagttgacaagctcttgcgggttgtgcctgagcatctctcgcacattgcttgctccatgaagaccctcctcgacattgacactctatcactctatgaggtaactggccgtctccacgacgacaaagagcacaagggtcgctcc

SEQ ID NO: 19378 - DNA, 2402 bp, Oryza sativa
  Clone ID: PAT_MRT4530_24845C.1
atggagtcggacagcgactcctcctggattgtagctaatcccgacctctctccctcgctaatccggcgcgacgcgcacgcgcgcgcagtacaaatccgcgccgcggacctgggcttggcgagcgtactagggcgtgcccccgttcggcccccggggggcccgccatgggttatgttttgcgggcgatagagtgggtcagcgattcggtggggcccgcacacgaggaggagggcgagcgggaggcgggggaaggagttgctctggagggaggggaggttgttggcgtgtagcggacaattggttaagtggtgactgcggcgattgagtgcgagccgggctagtgacagctggaggtgttggacgcgcggcagcgggtttgcggccgaaccgctgtactccgcgaaggatagtactccattgggtacagagctcgagtggtccccggtagaagcagatgatgatccaattacccactacatgtgcatgtagctatttattgactctattattgatttgtagctattgattgtctctcataccaaggtgattgtgagttctaccttgacaaatccatataacaccataccaacaggtcctatggtgaagtacttctgctcacagcattcttgtatttagctatcgagtgaagagctaatttgatagtaattccgatctagattaccgctaatggatatagcatctgtaaactttttttgaaaacgcatgaacctctgaacaatgattgacgacctttggataacggtttgtcagaatgcatggggcagtgaagcaactcaagttcttgagactgtggctggaacaagaagtttggcatgggggcggttagcaagagagttgaccaccctggaagctgtcacctggaggaaattgactgttgggggtgcagtggagccttctcgctgcaacttcagcgcttgtgcggcagggaaccgtgttgtcctttttggaggggaaggtgttaacatgcagccaatgaatgatacatttgtgcttgatttgaatgccagcaagccagaatggaggcacatcaatgtgagatcggctcctcctgggcgctggggtcataccctttcttccctaaatggatcacggttggttttgtttggtggttgtggaaggcagggcctgctcaatgatgtgttcatgttggatttggatgcacagcaaccaacttggcgtgagattcctggccttgcaccaccagttccacggtcatggcatagttcttgcacattggatggaacaaaattggtggtatctggtggctgtgctgattctggtgtgcttctcagtgacacgtatcttttggatgtaacaatggaaagacctgtttggagggagatacctgcatcttggactccaccttgtagattggggcactcgctctctgtctacgatggcaggaaaatcctgatgtttggtggtcttgctaaaagcggtcctctacgactaaggtctaatgatgtgttcacattggatttaagtgaaaataagccatgctggcggtgtatcaccggcagtggaatgccaggagccagtaatccagctggagttggtccaccccctcgccttgaccatgtcgctgtgagccttcctggagggagaattttgatatttggtggatcagtggcaggtcttcactccgcttcaaagctttacctgctggatccgactgaagagaagcctacctggaggatactgaatgttcctggccgccctccgcgatttgcctggggccacagtacctgtgttgtgggaggtacaaaggcgatagttcttggaggacaaactggagaggagtggacactaactgaactgcatgagctttctctgatgtttcctacactcaaccaaaaggatctggaattgtatagttggaagctctgaagtctgaccatggaagtcaagtccccagcaggcttccagcttcattgaagtgatgatgtacacagagagaagctattgttttcatttgaccgaagcctggacattttccccgttgaagccacacagaaactcaattgaaatgtgcaagcaaagtgagttattctccttggaagggtagtttgtgtttggttggaaagagatgatgactagtctcaagtagtagatccccttatctggttactccccgcttctctgcgtcgctatttgtttggccccctgcaaaataatagataataattatcacccataacctaataattatctgtttgttctcatcagatgtttcctacactcaaccaaaaggatctggaattgtatagttggaagctctgatgcaatgcaacaagcatgctcttcaaaggccaaaatgatagtgaagatgctgtactgatccaaaatttctgataaattgttcgatcttttgttgaacatgc

SEQ ID NO: 19379 - DNA, 414 bp, Oryza sativa
  Clone ID: PAT_MRT4530_24846C.1
atggcttatggggaacctggattggcaccaaccgacctcgccccggcgttccccaactattggcatacgagcgccgccatcgccttcctcccccaccgcgtcaatcatcgccgtcctcccccaccgcgtcgccgacccagcgccgccatcgccgtcctcctccacagcgtcgccgacctagctcctcgcctcatccctcccacaccagctccctcccccactgctgtcctcgccaccgccatcgccgtcctcccccagcacgtcgccgacccagcgctcctctccgtcgatctccaccacggtccctttcgcgccacaccggaagctgcccgccagtcctccggtcgtcgctggttgctgtcggcaggtggatgcagtactctggtcgcccgtctcccctccatcaccgagtga

SEQ ID NO: 19380 - DNA, 759 bp, Oryza sativa
  Clone ID: PAT_MRT4530_24847C.1
tacctgctggatccgactgaagagaagcctacctggaggatactgaatgttcctggccgccctccgcgatttgcctggggccacagtacctgtgttgtgggaggtacaaaggcgatagttcttggaggacaaactggagaggagtggacactaactgaactgcatgagctttctctggtaagctctttagtctgaggatggaagtcaagtccccagcaggcttccagcttcattgaagtgatgatgtatacagagagaagctattgttttcatttgaccgaagcctggacattttcaccgttgaagccacacagaaacacaattgaaatgtgcaagcaaaatgtttcctacactcaaccaaaaggatctggaattgtatagttggaagctctgatgcaatgcaacaagcatgctcttcaaaggccaaaatgatagtgatgatgctgtactgatccaatatttctgataaattgttcgatcttttgttgaacatgcaaaactgttcgattagttgtacaccatttttttttctctggcaatacatttagtgtcaattaccaaaggacaccatatctgcagaaatcacccccccccccctctttctctctcctctctcacatgtgttgtatgtttaatctttaaacattgtgatgacaatgtctgttcacatagaccacacggttatacttttgtaactttgattgtagctgaaagcacctggattgatcattggaaaacatggagattttgcttccatac

SEQ ID NO: 19381 - DNA, 684 bp, Oryza sativa
  unsure (1)..(684): unsure at all n locations
  Clone ID: PAT_MRT4530_24848C.1
ccacgcgtccgggcaggtcttcactccgcttcaaagctttacctgctggatccgactgaagagaagcctacctggaggatactgaatgttcctggccgccctccgcgatttgcctggggccacagtacctgtgttgtgggaggtacaaaggcgatagttcttggaggacaaactggagaggagtggacactaactgaactgcatgagctttctctggtaagctctttagtctgaggatggaagtcaagtccccagcaggcttccagcttcattgaagtgatgatgtatacagagagaagctattgttttcatttgaccgaagcctggacattttcaccgttgaagccacacagaaacacaattgaaatgtgcaagcaaagtgagttattctccttggaagggtagtttgtgtttggttggaaagagatgatgactagtctcaagtagtagatccacttatctggttactcaccgcttctctgcgtcgctatttgtttggcctactacaaaataatagataataattatcacccataacctaataattatctgtttgttctcatcagatgtttcctacactcaaccanaaggatctggaattgtatagntggaagctctgatgcantgcaacaagcatgctcttcaaggccanaatgatagtgatgatgctgtactgatccaata

SEQ ID NO: 19382 - DNA, 415 bp, Oryza sativa
  Clone ID: PAT_MRT4530_24849C.1
cagggcgaggacaacccagtgtgcagacccacgggtgcgcggaggagtctccaccccagcgccgggagcaaggacaagacagctgcagggtgtaccacggggatgtggcaccatgctggtcaggcgagcacacgaggagaacagtcgacaaggtgttcggcagacagtcctcagactggctcaagtcccacagccagccagcacagcatgccagccagcgcagtggcgagggccagcaagtagttcaggtcaggtcacagcagtgccagcagtgcttgcgcgtaattcatggcaggattcaaagcaaaagtacgggggccgcaaataaaaggttgtggattgattggtgagacgagatcagatctgtcccaggtgtatctccgtctctgcagttgccatgttccatctccagtgt

SEQ ID NO: 19383 - DNA, 579 bp, Oryza sativa
  Clone ID: PAT_MRT4530_2484C.1
tggggtagcctatctaactgttgtcgacttggcggtctgaagttctgactcgtagtcgacaacagggtagccttcctcctcgaatccgtgcccgggtatgtggtatccataaccctgacagtagcctccgacttcaatgcaaatgaacgagttcatattctcaaccgcagaccttggaggaactgttatcgagcgcacatgaccattctcggtgagtgtagagataacatttttgcggtgcgggagattgctatgtactggttcgagaaccagcgagcgagtagaatcatctctcgaacaccaatggaagttgcggtgcgggagattgctacgtactggttcgagaaccagcgaacgagtagaattatctctcgaacatcgatggaagttgcggtgcgagagattgctacatactggttcgagaaccagcgagcaagtagaattatctctcgaacaccaatggaagttgcggtgcgagagagtgctacgtactggttcgaggaccagattgctacgtattggttcgagaaccagcaagcgagtagaattatctctcgaacaccaatggaggtgctagag

SEQ ID NO: 19384 - DNA, 2795 bp, Oryza sativa
  Clone ID: PAT_MRT4530_24850C.1
aaacggcgacgagagcacgagggcacgattcctagggacttgagcatctaatggcaaatggcacgagccaagacgataacattgagggtaattttaagctattgtggagtttacggaagtatttgatactgcttggaaccatagcagtcggtgtgacatacaatgctggattaacaccaccagggggattttggacactaaataaggataagcaccaggctggtaatcctgttcttcctgttggttactttcaacggtatgaggtattcttttactgcaatgcaacggcctttgctgcatctcttgtcttaatcatcttgcttctaagtaagagtgcaaccaagcatgtgttgtggctccggtcaatgcaatttaccatgatactggacctattcagcctgatgggggcttatgctgcaggaagctgcagggcacttaagtcatccatttatacctggattctagtttttgctgttttcttgtatgttggggtacatgtcctagtattcatgagggttattccagataagttgaaagagatgatacagaaattatggggtgtccacgacaggcaaagtgacagacatcaagacaaagatgttgaggatgctcgcaagttcatcttgattcttgtaacatttactgctactgtcacataccaagcaggtttgagtccaccaggtggcttttgggctgaaaatgattacaagcaccagccagctacttctgttcttcgcagtaactatcttgaccgttataaattatttgttagttgtaattcaacttcttttgtagcttctttggtcacagtcatattgcttctgagcacagaattgagcaaacatgggataaggtccaaagcagtcattgtatgtgttgtagctgatctattgtgcctagttggtgcctatgctgcaggatgttgtagggatgtagcaacatcattctacgtaatgtttattatcatgatagttttaatctgccttgcactgttggttgggatctttgcatacaaacctgttgcaatctggctacagaatttcaaaaaagtgagtctgcggtgtgtgagtgcaacgggttggatgctctcatcgagctccaggagaaacggattcagtaatggagatcataaccatgacactgagattgttggcaccaatgatgatactgaacctgttgctaatggccatattcacagcaaccaagcagcaccaattcaaaatgttaatggcaatcaaattgaggagcacttgaataagacccgcaaaaatctgctgcttcttgccattcttgcagtatccctaacatatcaatcaggtctgaatccaccaggtggcttctggtcaggaaatgaattccgtcatgcagacggtgatcacatccttgaagaataccatcattcagctggtgatcgcattcttgaggacacataccattcccgctttattgcattcttttatctcaacgcagtggcctttgtggcatctgttgttatgatcattttgctcttgaacaaggtgatgatcatgaaggttacaaaacagtgtacattgcagatagtcatgattgtgaatctcctttccctgactggagcatttgttatggggagctgcagggaagcaaataagtccatttatatatcagtgttactctgtctggtacttgcctacgttcttgttcatgttctaatagcaatacatgttctatgtggaatggcatcgccggcatcatctgtgtcaccgcagaaccgaacagaggatactaaggagttggggaggaggcgtaatctactattgacactttcagttctagctgcaactgtcacataccaagctggcatgaatcctccaggaggtgtatggtctgatgacaaggatgtcagtggcaagccaggcaatccgatcctccaggacacccacccaaaacgctatgatgtgttctattactcaaattcactatcctttgtgtcttctgtagttaccacaatactacttgtgaacaaggaatcctgtgagcatgggataaaatcacatgcattgcgagtgtgtttggtggtgggcttggttggcctcttaatcgcctatgctgctggaagttgcaggaaagcaatacagtctatttatctgatcatcattgctgttgcagttttgatctccgttgtgattcaagtctttctactctcttcaacaaatagtaatacactgcagacgtttttgtcaatacgggatgtcaatcaagacagttcttctgggccgcaagaaagtacagatcctcaagagaaaaaagagaggaaaaggaaaaagtatctgatgctgcttgcagttttagcagcttccatagcataccaagctggtctgaatccacctggtggcttttggccggatgacggtggccacaaggctggcaatccaattcttcatgatgtgaatcataggcgctacaaaacattcttctgcttcaacgcattctccttcatgtcatcaattgttgtgatcatgcttctgctgagtagaactatcagagagaaggatgtacatattgatgtattgtacttgatcatgatacttgatttactgggtctcatgacagcttttgctgcaggaagctgcagaagattcaggacatcagtctatgtctatgggctagtaatctgtgttgtggtataccttttgcttgtgaccgttttatcaagtggaattgcaaaatatctgagatcgaggaaggttcaaattccttctcaggaccatcctgaaaatgcttcaagagcagacacacccaatgcctgaacatcaagt

SEQ ID NO: 19385 - DNA, 1847 bp, Oryza sativa
  unsure (1)..(1847): unsure at all n locations
  Clone ID: PAT_MRT4530_24851C.1
aactgcaatcagctgcttcattccaccaagtccaggtcctcccttacaaaaattaattacatatacaaatagttctcccttccatgttactcctaccatatatacgtgtctctgtatatacagtatttattcggtcgtaggattattaatcacaatatcaatctgtactgggtctgtttttcatgaatagtgacagacaaacaaatatatatccaaataatactagtaagaaaagtgttgtgtttgtgaggcagaggcatcgccagctatgaagactaagctgtgcctgatcgccggaagagagcaaaataacgaggcgacgacccccgttagggcgtaggcgatggcgcagaagggcaacgcttcaggctccttggctgacaccgctgccgttcccagtccatgggcactggaagctgtccctattcctcgtgcgatggggtctttgaggcgaagcttgtccatcactgcttgcgcaaaatttgcgccgatcagccccgtgaggacaaccaccgctgcggttactgaagtatttacaccttcaaagagagaaactaccctcaaagctaatgccacggttatacacctgggcaatattgatatggtcaatattggctctagctctaccactcgtcctaggatggcagttgaatataacgagaatgttgatgccacagcgattgatgtgaaaatttccgctgcatgcctccttacaagctttctctgattgaacattgaaaatgcaaacgatatgatgacagaccccaagacatttccgggcattagggggagaattcaagtaccaaaaagaatgccaggaaattgattgggatgcccagggtattccagcctcagacccacgtactactgaaactgaacttcaagttcagaaaattatacatttgcaaagacttgcaaataacatgctagatgcatttaccaattataaaggtgtgactaaatctttcattcccgctcagaatgcgccagaaagagtggaggtaccaaataaaagcactcaacttccactcactaaaaagagaggaagaagtatggccactcagcgagaaacaattgctaataagcaaagaaagacggtaaatgcaaaccaacctttagttggtacacaccaaattgatactatatgtcaagcagatcgtgatagtctacaacctagctcggtggtgcacaatgctgagactaggaattcggaagaccatagacacattgtttcgggagatcacaatgagtctataagggttgatgaaattgccatcaattactctgaaactggagaatcttttgatagaagagctataattgtcgacactaatttttctgaacaaattgctgagtgcctccaagttgatccagaacctaggtatataaaagagtgccaaaagcgctctgactggaacaaatggaaggacgcaattgacgcagaattagcctcgctttacaaaagagatgtattctcggctgtaatgcctactcctcgtggtatctttcctgtgggatacaaatgggttttcgtccggaaacggaacgaaaacaacgaggtggtgagatataaagcaaggcctgtagcacaaggttttacgcaaaaacctggcgttgatttcaacgaaacttactctccagttatgagtggtataactttctgatatttaatatcattggcagtacaaaatcgtctatttatgcagttgatggacgtagtgacagcatatctttatgggtcacttgattctgatatttacatgaaggttccttgcggaatcgacannnnnnnnnnnnnnnnnnnnnnnnnnnnnnnnnnnnnnnnnnnnnnnnnnnnnnnnnnnnnn

SEQ ID NO: 19386 - DNA, 223 bp, Oryza sativa
  Clone ID: PAT_MRT4530_24852C.1
gacattaacttaaacaaggattcaattgtgggggtatgtacaaacataagcgggttgacatacatatgataaacgttaaccctttcaatttgatttgaaaactaaacatggcatactcaaccgttagtaagctagttagagatcgattaaggacgcactatcaatcagcgcgcaaaaccatgtgaacaccagtcctagcgctcagaactgttacacaacttac

SEQ ID NO: 19387 - DNA, 3279 bp, Oryza sativa
  Clone ID: PAT_MRT4530_24853C.1
atgggtacacaaattacaatcgaggatgctttattgtatcctgattcaacccgtaccctactaagttatagagatatccgtcaaaatgggtttcacattgaaacccatatggataatcgagaagaatttcttctcttaaccaaacaaaacggatatggcaaacgcatttgcgagaaaattccatctctcacatcgggattgtactatacatacattaagcccattgcacatgttgcgtataaagtaatttttcaaaatgttgatgcattccacacttggcatgatcgacttgggcaccccggtatcgggatgatgagaaaaattattggcaactctattggtcatcatttgatcactgataaatttcccaaatcctctaatttcgtatgcactgcatgtgctactgggaaactgattttgagaccatcttatctcaaaatcagagccgaaccacttaaattccttgaacgcattcaaggagatatttgtggccctattgtgccaagatctggaccgttcaggctaaaggcaaattaccctgaacataggattcaatcaatccgtatggacaatgctgccgaatttacatcccatgctttcgatgattattgtatggcattgggaattcaggttcagcactctgttccatatgtccacacacaaaatggtttggctgaatcattgatcaaaagaattaagcttattgctcgaccattattgatgaattgcaaattaccttcgtcatgttggggtcatgcagttctgcacgctgctgaccttgtccaactacgaccaactgcatatcatgaaacttccccaattcagttagtacgtggaaatcctccaagtatttcccatttgcgtaagttcggttgtgatggatacataccgatctcaccaccacagcgtaccgctatgggcccacataggaaaatggggatctatgtgggattcaaatctctgtcgatcataaagtatttagaacccttaacaggtgatctatttactgcccggttcgctgactctatctttgatgaggaacatttcccggcattagggggagacttcaagtaccaaaaagaatgccaggaaattgattgggatgcccaaggtattcctgcctcagacccacgtactactgaaactgaacttcaagttcagaaaattatacatttgcaaagacttgcaaataacctgccatatgcatttactaattataaaggtgtgactaaatctttcattcccgctcagaatgtgccagaaagagtggaggtaccaaataaaaccactcaacttccactcactaaaaagagaggaagaagtatggccactcagcgagaaacaattgctaataagcaaagaaagatggtaaatgcaaaccaacctttagttagtacacaccaaattgacactatatatcaagcagatcgtgatagtctgcaaccttgctcggtggtgcacaatgctgagactaggaattcggaagaccatagacacattgtttcgggagatcacaatgagtttataagggttgatgaaattgccatcaactactctaaaactagagaatcttttgatagaagagctacaattgtcgacattaatttttctgaacaaattgctgattgcctccatgttgatccagaacctaggtctataaaagagtgccaaaagcgctctgactggaacaaatggaaggacgtaattgacgcagaattagcctcgctttacaaaagagatgtattctcggctgtaatgcctactcctcgtggtatctttcctgtgagatacaaatgggtttttgtccggaaacggaatgaaaacaacgaggtggtgagatataaagcaaggcttgtagcacaaggttttacgcaaaaacctggcattgatttcaacgaaacttactctccagttatgagtggtataactttccgatatttaatatcattggcagtacaaaatcgtctatttatgcaattcatggacatagtgacagcatacctttatgggtcacttgattcagatatttacatgaaggttcctgacggaatcgacatcccgaatcagaaggtaaatcgtaacatgtattgtgttaagttgcagaagtcactttatggcttaaaacaatcgggcaggatgtggtacaaccgattgagtgaattcctttcgctaaagggatacactaaaaatgatgattgcccgtgcgtctttatcaaaaagtccaccacaggattttgtattatctcggtatatgtcgatgatctcaacatcattggcaatacacaagatattaatgaagcacgccttcatttaaagacggaatttgagatgaaggatttgggtcaaaccaaattttgcttaggtctacaacttgagcatttaccttctggaatccttgtgcaccaaagtgcatatacccagaaaattttggagaaatttaatatggacaagtcatatccttccaaaacccctatggtggttcgatctctagacgtggagaaagatccatttcgaccaaaggaagatggtgaggatgtgcttggacctgattttccatatcttagtgctattggcgcacttatgtaccttgcaaatagtacgaggccagatattgctttctcggtaaatctattagcaagatacaatgctgctcctaccaaacgccattggactggagttaagaatgtctttcgatatcttaatggcacaagagatcttggacttttctttaaaaagaaccaggattcaactttaattgggtatactgatgttggctatctatctgatccccacaatgctagatcacaaacaggattcgtatttttacaaggtggaactgatatttcatggaagtcttctaaacagactctagtagccacttccacaaatcattctgaaataattgcattatatgaggcatcacgtgaatgtgtatggcttcgcagaatggttaaccacatattaacatcttgtggtattggttcattggaatcacctactattatctatgaagataatgccgcttgtgttgttcagatggaaattggttatattaagagtaacatcactaagcatattgctcctaaattattttatcctcatgagtttcagcaacatggagagataaacatcttacaaactaagtcatgtgataatcttgctgatttattcacaaaatctctaccatactccacattctttaaatgtgtcaaaggaattggtatgagacgacttaaaaatttgcaggattcagggggagtatcttcctctggaaaataa

SEQ ID NO: 19388 - DNA, 588 bp, Oryza sativa
  Clone ID: PAT_MRT4530_24854C.1
atggcggcgacgacggcggcggcggcggtgccgggggtggtgagggcggagaggctcctgcgcggcgggtgcgtggtgatggcggcgacggcggcgctgctcctcgggttcagcgccgagaccaagacggtgctcttcgtccgcaagaccgccgtcgccaaggacgtccaagccctctgggtgctcaccgtggcggcggcggcggcggcggggtaccaattcgcgcagctcgtcaggtgcatgtactgctcctcctccggcgacgccggcgccatggcggtggcgtggacatctttcctgctcgacaagggatgcgcgtacgtggtgttcgcgagcacggcggcggcgctgcaggcgtgtatggtggggctgatcggcgtggaggccttgcagtggagcaagctctgcaacatctacacccgcttctgcgagcaggccgccgccggcatgctctgcagcttcctcgccgccgccggcatggccgtcctctccgccttctccgcccgccgcctcttccgcctctactcgccggccggccaccgccgcagctgcccgcgcgcggcagtactagctacctctccgcactag

SEQ ID NO: 19389 - DNA, 2440 bp, Oryza sativa
  unsure (1)..(2440): unsure at all n locations
  Clone ID: PAT_MRT4530_24855C.1
ctccccccttttccctcctcctccacctccactgccatggccgcctccgccgctcctctctcccgcgtggtagccgccgccggttgccgccgctaggggagcgcgacgggggagcggtaggggcgacccagctcgctctgtcgccccgcggctggtgggggtgcgcgcgggggagagcggttggttagtatggtgctggatctcaatgtggagtcgcgtgtgggatcggcagngacgaaaagctcgggcacacatgggcccacacaggaaagtggggatctatgtgggattcaaatctccgtcgatcataaagtatttagaacccttaacaggtgatctatttaccgcccggttcgctgactctatctttgatgaggaacatttcccggcattagggggagaattcaagtaccaaaaagaatgccaggaaattgattgggatgcccagggtattccagcctcagacccacgtactactgaaactgaacttcaagttcagaaaattatacatttgcaaagacttgcaaataacatgctagatgcatttaccaattataaaggtgtgactaaatctttcattcccgctcagaatgcgccagaaagagtggaggtaccaaataaaagcactcaacttccactcactaaaaagagaggaagaagtatggccactcagcgagaaacaattgctaataagcaaagaaagacggtaaatgcaaaccaacctttagttggtacacaccaaattgatactatatgtcaagcagatcgtgatagtctacaacctagctcggtggtgcacaatgctgagactaggaattcggaagaccatagacacattgtttcgggagatcacaatgagtctataagggttgatgaaattgccatcaattactctgaaactggagaatcttttgatagaagagctataattgtcgacactaatttttctgaacaaattgctgagtgcctccaagttgatccagaacctaggtatataaaagagtgccaaaagcgctctgactggaacaaatggaaggacgcaattgacgcagaattagcctcgctttacaaaagagatgtattctcggctgtaatgcctactcctcgtggtatctttcctgtgggatacaaatgggttttcgtccggaaacggaacgaaaacaacgaggtgttgatggacgtagtgacagcatatctttatgggtcacttgattctgatatttacatgaaggttcctggcggaatcgacatcccgaatcagaagaagtcactttatggcttaaaacaatcgagcaggatgtggtacaaccgattaagtgaattcctttcactaaagggatatactaaaaatgatgattgcccgtgcgtctttatcaaaaagtcccccacaggattttgtattatctcggtatatgtcgatgatctcaacattattggcaatacacaagatattaatgaagcacatcatcatttaaagacggaatttgaaatgaaggatttgagtcaaaccaaattttgcttaggtctacaacttgagcatttaccttttggaatccttgtgcaccaaagtgcatatacccagaaaattttggagaaatttaatatggacaagtcatatccttccaaaacccctatggtggttcgatctctagacgtggagaaagatccatttagaccaaaggaagatggagaggatgtacttggtcctgattttccatatcttagtgctattggcgcacttatgtaccttgcaaatagtacgaggccagatattgctttctcggtaaatctattagcaagatacagcgctgctcctaccaaacgccattggactggagttaagaatgtcattcgatatcttaatggcacaagagatcttggacttttctttaaaaagaaccaggattcgactttaattgggtatactgatgctggctatctatctgatccccacaacgccagatcacaaacaggattcgtatttttacagggtggaactgctatttcatggaagtcttctaaacagactctggtagccacttccacaaattattctgaaataattgcattatatgaggcgtcacgtgaatgtgtatggcttcgcagaatggttaaccacgtattaacatcttgtggtattggttcattggaatcacctaccattatctatgaagataataccgcttgtgttgttcagatggaaactggttatattaagagcaacatcactaagcatattgctcataaattattttatcctcatgagcttcagcaacatggagagataaacatcttgcaaactaagtcatgtgataatcttgctgatttattcacaaaatctctaccatactccacattctttaaatgtgtcgaaggaattggtatgagacgacttaaaaatttgcaggattcagggggagtatcttcctctggaaaataa

SEQ ID NO: 19390 - DNA, 1152 bp, Oryza sativa
  Clone ID: PAT_MRT4530_24856C.1
atgggggacaccgagaggagctctatactggtccacacgctggccatcatcgctgctgcgtggtcgtcgtcgtcgccgccgccgtcgtccgccattacagccgactgatccctcctgctcggctccttcctgtaggactgaggagcaagcgaatccggtgagcaagtgcgtcgagaaccaagaggagagatgggggacaccgagaggagctctatactggtccacatcttggtcatcgccctctgcctcaccgcattcggcttcgccatcgccgcggagcgccgccgcagcacgggctcaattgttacagacagcttcaattccacattttgtgtttatgactctgatattgctactggctatggtgttggtgcattcctgtttctcctctctggtcaatcacttcttatggtcgttaccaaatgcatgtgttttggcaagccacttgcacctggaggaagtagagcatggtcaatcatatactttgcatcttccgagtccctgcgcaaaggagtttttatcgcgggagcggtcttcgtggtgttcactatgattctgaacgtgtacttctacatgtactacacgaaatcgacaagccaggctgccaaaaagatcaacaagactacccccaatgtcggtatgactggctacgcatgacaattggatttcggtgcatcctgggcagaagattagtttttggataacttggctacggtgtcattgtactatcagatgcttccgaagaagcatgtggtgcagggttgtgcaggttttggcctgtcagagctaattctagtcagtttatggctgggtgcctgggccaagccctatattgctaggatgggagtgattcgtttttgttttgtgctggttagggttaagcacatcatgttctgtttgtaactggtgaagctgccgcctagagcagcttggcaggctagcaatttggtgtgtgttgtagtctgttgtaagtcgattgcctgtattttatttgtgtgcgctagagaagagatgaatctgctggtttcagtaatttcctggccaaggacatcaatttatttgctttgggggatctgagccaatctataaaaatcctatattagtgtgaaaaaaaaaaaaaaaaaaaaaaatcaacagttctttccctcgtgc

SEQ ID NO: 19391 - DNA, 2871 bp, Oryza sativa
  Clone ID: PAT_MRT4530_24857C.1
gggctgaggaatcggagctagtacagtactgatctcctcctatacatggcaaaggagaaagctccttgctgcagtacaaacaacagcagcaaagcaccggcgacggcgaggccgacgaccaaggggtcaacaacagcgtccggcaatggcaggccaccgccgacgacgctgcacgacgtccccgacaagctcctggagctcatcctccaaaacctcgattcgtctctctcgctcgtccgcgccgcggcgacatgccagcggtggcgccgagtcatcacccaacagagcttcgtcctcgactacgacataccaccgcatcagatcgtgggccactaccaccaccgtctccatccaccatccttcactactcccaaacccagaggctgctgcagcagcgtcgcgttcgtccccacctcgccggagtttctcaccaccggccgccgccgccgccgcttctccctcgacttcctccccggtggcggctcgcggtgggagatcgtcgatagccgtggcagcctcctcctcctcgccaagaaaaagaaatccaactggatgcgccgctgcttccccgacctcgtcgtctgcgagccggtcacacggcggcacaaggtgatccctcgcatggaggtgatgaagtaccaccactgcgtcggcgtgttcctcctcgacttcgaccgcaacggcagcttctccatgtccaatttcaaggtgacatgcgtggtgtaccagccatacttcggtgtgtccggagatgttggcacgattactgtttgcgagtacatggaggacatgtgggattggacccggcacatgaagcccgacgaagatgatgaggtacccaagcttttcgagtggtacgtcgtcgtcacgcatctcagaaccagacccggtatccatctccatgatagggattcccttcgttttcttggccatgctgggggctcgatattctgggcgatcaaggaagacgaagggtcactgctaattctcgatgagaatgggattgatccccacattttacgcacgccagcgggtgtgcgagggtcagagctgcgagctatcgtcgacggcaatggcgaccgtcacaacgtgcgcgtcgtcgtcttagagggagagactctccgtgttgtgacatggttgtgcgacactgatgagttggttcttgagaagagcctccatttggtggaggctactcgtaggctacaaggctacaaggagagctgtttttgcggcggagtggacatcgtcacggtgagcacgtcgtgtgctgttgtgacgccggtggaggagaagacgacatggatggtctccatcgaccttgagaccatggaggtgacggaatgcaagtacgcaagtgttgcgtatccgtgcggtgacaatgatagccacggcgacgtcacgtcacgtcttcacacacctggtgccactgcccatggcgacgccgacggagacgcgacgccgacggagacgcgccgccgcggtcggcgagggggcaagcttaacaaggcgcggaggaagccgccggtcgacccacccaaggtcgtcgacggcgggacgacgacgacgaccgtggacgacgtccccgaccacctcctccaggacatcctcctctgcctcggctcctccgcctgcctcgtccgcgcggcgtacgcgtgcaagcggtggcgccgcgttgtcaccgccgccggcttcctcgacgccttccgctcactccacggcgcgacccaccacgtcgccgggcactaccacaccgtcgacgacgcgtacgacaggcaggcggcgccgggggcattccctgatggtggcaggagcttcgtcttcgtcccctccgacgagctcgccgacaccgatcgccgccggttctcctccctcgatttcctcccggactgcgagagcggctactcctgggagctcgccgactcccgcggcggccttctcctcctcaccaagatgaagcaacgcaccggcgacggctcaccggcgcggcgccactgcttcaccttccccgacatcgtcgtctgcgagcccctgacgcggtgccaccagggtatcctctgtcctcccgacctcagcggttaccagtgcctcggcgtcttcctcctcgacggcgacggcgacggcggccgcatcggcatgtccaacttcaaggtcatctgcgcactctacgatcgttacctgctgaactatattctccctctcagcgagacattggcctgcacgttcacctccggcagcggcggcggcggctggcgcctaccgcacagcacagccgccggtggcgacgtcacactagagcatgtaaggctcgacgccacgagcttcgtggggcgtgcaaatggccgcgtctactgggaaatcgagggcgacgaaggcggcgacatgctcgtcctcgacgagaccaccgcgggattctccctcgtgacgttcccggagaacgtccgcgagagctacgacaagcggacgttccggatcatcgccggcggcgacggcgtcgccatgcgcgtggtccgtgtgataaacaacgacctcaaggtgttcgcgcagctcgacggcgacggcgagtgggtgctcgagaagcgggtttggttgccggcggcggcacggggcctgccagggtacgacgaggggtacttccaggagcagaacggagaagccatcgttgtcgcggcgagcgcggcgtatgtgctgctgacgccgccggtggaggacacttggctcttctccgtcgagctggagacgatggcggtggagcggtggcatgagaggaacaagtcggaggtgggtaaaatggacatcggaggaatgaaaaaggagaaaaggcccgtgggctgcccggccaggaaggcccgtgggctgcccggcctagcctaa

SEQ ID NO: 19392 - DNA, 125 bp, Oryza sativa
  Clone ID: PAT_MRT4530_24858C.1
gactagttcctaaactcttttgatcaaatttgatgggagaattagaaataatagtaagcacatcctttttctgttccacatatgttgtttgcattgcacttgtgtgatgctgttcttgaagtaat

SEQ ID NO: 19393 - DNA, 1494 bp, Oryza sativa
  Clone ID: PAT_MRT4530_24859C.1
ggcacgaggattggaggagggtagggaagcttcggtctcttcgttcgtcgtcagtggcgattcccgcaccccccctccctccggccgcaaaagtcaatgccaatgcaaacaaccgacaaaactgatgctgtgaaatctatgctttccggagagaatagtgaaggctcagatggatcaaagtcatcggacacagttgagtgggacccatgggaccctccgcatcctccttgtcctactttgccacccacagcaagccttatgagccaagtggaaatggtcaaacagcatcattttcaagtactggccgtacttgctgcttccagggccacaaatataattgccccagaccgtactcctcaggaggtgcgccgtaaatttgctgaaatatgcaatgaactggcggacatccttgaaaaggacagtgttcggagattcctcaacttgtacagaagaaatatgcgtatcatgggttggggtctggtcatcacatctcaaacaatgaacttcattgtttcattcaatgccctgcgttgtgctaaggttgtcttggagggcaaggcacctaagctttgtcagatccgtgccaaccccaactacatgactagctatgggtacttccccctccacaaagctgctgaaaaattctcagttgacatgattaagttgctgctttgttatggtgcatcggcgaatttacgcacatcaggccaaaaggtcatcgagggcctcctcccactccatgttgccattgagaacacttgcatgcacaagtatctggaggacaatctattaactgaccggaagctcaagcaagtggatcttgacttcatctacaagctcatccatctgctttgtctgcctgagatgaagattttcttggacacgacaagactgcttgcagataacacagataatattgttgatgagctatggaactacatcaaggaggggaggcttgtccatgctgctattttgctccttgcagctcaacgaaaaattcgtacctgtgcttcctctaatagaaacatcagctgtaacctgaatggatttgatattatcagggatcgtgttatgggatccatagtttccatagaaagggaagggcgtggattaacaagtggtaaaaatagcaaggcacataagcagctggaggagaagcggaaattttttcataattcattgatgctcatttttgtaatttcgaaaaccggtgaagctcttgatgagtatatccagtctcattcagaggtctctcatcaggaggtgcttgagggtgtttcatcaattctcgatgatcatggttttgctcctactggaaaagggatcagcataggagacctggaatgccgtccctatgactgcaatgcgtcgaatagtgtgccgaagtgcaactatgaagattctggtacgaccaaggcagttggagaatctcctaatctgaatgttaaagctaaaaaatctgcaccagtagttatgctttatggatttggctga

SEQ ID NO: 19394 - DNA, 726 bp, Oryza sativa
  Clone ID: PAT_MRT4530_2485C.1
atggcgaaggtacatcctaacgtggtgcccgtggcggcggcggcagggccggccggcggcgagcggcggggggaggaggaggaggaggcggcggcgctgacggtgtggcggaagtcgctgctgttcaactgcaaggggttcacggtgttcgacgccaaggggaacctggcgtaccgcgtcgacagctacgacacggagagcggcgacgaggtcgtcctcatggacgccgccggcgccccggccttcaccgtccgcaggaagaggcagctcagcctgcagggggagcagtggctcgtgttcgccggcgaggcggacggccggcggccgcccgtgtacgcggtcaggcggacgggccgcggcggcggcaagtcgctggcgcgcgtgacgccgtgcgcgggcgcggccgcggccggcgcgtcggcggcgtacgaggtggagggatcgtacgcgcggcggtgctgcgtggtgtacgacggcgagaggcgggcggtggcggaggtccggcccaaggaggcggtcggcactgacgtgttccggcttgttgtgcagcccggcgtcggcgtgtcgctcgccatggccgtcgtggtggcgctcgaccagatgttcgggaggccgtctctcctgaggagctggtcctcgtagacctctcctctcagtttttacttaaatttagtagctagtttctttctgtctgaattttttttgcccctatttcttggggttaat

SEQ ID NO: 19395 - DNA, 462 bp, Oryza sativa
  Clone ID: PAT_MRT4530_24860C.1
gttctagatcgcgagcggcgcgccttacgtaagaagtggatgcgcacgtcgccgccgtattagttctatgtgtactactctgtcgtcgtcttattacattggaggatgcctacaggtggatcataccagcatagttgtttttttaaagcccgagcgaccctcgcctgagcatgcagtgaagacgcacccatcaccctacgacagcgtaggcaaaccgaactgcacagccagaatcgaccactgcagatgctatgataaacagcatgcggtgggctcggggtcttactaaggggggagagatcctaccaccaccattcgctggtgctgaactcaggttatcaaagagcacatttacttatgaagaggtgtggagggctaagggcggactctctgatgctaatctcatcgtacaagtgtggtttagatatgtccatagaggagcgctgcctactggaaaagaga

SEQ ID NO: 19396 - DNA, 422 bp, Oryza sativa
  Clone ID: PAT_MRT4530_24861C.1
cccacgcgtccgcccacgcgtccgcggcgacctcgccccgtgcagaagcaactcgatctgctatttcccggtgcatggctgtccgagatcaccgtcgagtcctaccgggtgcccgacgatcggtgagctgagcagagcagatcagagcactgtgacatctactatcaggcaagaaatcccagaagctagtaattcatcgatcatcacaatcacaacaatctcctgttattaatcgatccttattaaccccatgttaaattcctcccttgttatggtgttgttgttacgagctagtagtagtaaatcgattggttgattgaacagagtgggagtagcggcaatattagcagtggtaattaattaaggagtatctgttcttgttagcagaaggacctcctaattatgaagtggtagcagtagtg

SEQ ID NO: 19397 - DNA, 1600 bp, Oryza sativa
  Clone ID: PAT_MRT4530_24862C.1
gcatggaaggaaggtagcattaacattgcaattaagatgttgttaacaaatgtaccatcaaggaggacaataccactactgctaccacttcataattaggaggtccttctgctaacaagaacagctactccttaattaattaccactgctaatattgccgctactcccactctgttcaatcaaccaatcgatttactactactagctcgtaacaacaacaccataacaagggaggaatttaacatggggttaataaggatcgattaataacaggagattgttgtgattgtgatgatcgatgaattactagcttctgggatttcttgcctgatagtagatgtcacagtgctctgatctgctctgctcagctcaccgtccttgcatatcccggtaccgccaagtctatcttggccatgaagaaaaaacatctgagcttgcaggtgttgataattgtagtagatcgatcttgaagaggacgagcgtggcctcggtgcacaatccgaggagcacgagagctgccgacaccgcagagcgtccagctcgacctcccctggctcgagatagttccaaggcgagagaaagctatgatgctcgttgacattgtgtatttttcctttcatggtccgactggccgagcaaacctggcccggtccacgtccacgaccgggcccacccgtgattagatacgtgtcaaccatcctcagttcctctgacaggtgggtcccacgaggcacgatcgtcgggcacccggtaggactcgacggtgatctcggacagccatgcaccgggaaatagcagctggggacgtgaatttttacgaaattacggatgggtccatcgagttgcttctgcacggggcgaggtcgccgccgaggccggcggcgagggcgcgcgccggtgacagcgtagacgtcctcctcgatctcctcgctcgtcagcgtcaccgagaaccgcgccctgtcgagggcctccgcgcgggccctcgcggccctccgctccggcggcggagacgcgctcgacgccggggcgaccgccgggcgacgtcgactgcgcagcttccacgggcgcgaagcagccgccgccggggccggggcggctaccgccgccgcaacttccgcgtcggccaccacgtcgctcccatccacctcgcggaggtggagcaggagccgctccttgaccccgtcgagctgctccggggaacgcctggcggccgcgatggcgtccccggcgcggttgacgtgggcgcaccgcaggacgcggtggctcccccacgtcttcagcgacgggaacgacgagaggaccgcggcctggtggcgagcgctcgacgccgccgcctccaccgccgcggcgccatccgcgacgggatccgggggaggaggcgggtgcggctcggcggagatcaccatggccgcggccgcgggcaaagccgcgacgacgaacgcgcgcgtggaggccgccgtcacccagacctcctccgactccgactccggtggcggcgacagcgggggagggggagggggagcgcgtgggacgtggagaggagggcggctttggctttggggctcggggggggcgatggaatggaagtgtgcctgtgcca

SEQ ID NO: 19398 - DNA, 1685 bp, Oryza sativa
  Clone ID: PAT_MRT4530_24863C.1
tttttttttttttttgggatctagaaggccgctttttttttttttttttttgcaacaaagttgaattattttattctatagtacatgtccacgtcaaaaccttcgttgtccactgaactatatagaatattcaaggtgtacatgcaaacaacaaatggatttttacacctttcttatggagttttacatggactttatggaaagcatgttgtgacatccaatctcagatggaatatctcctacttaccaagcttaagagtaagttagtgattgatctgctgactgttggattactgatttttgccacttagccagaaatggttggtcccaactcccaaactgttcattgggcaatcagttggcagaataccttctcaccttggcttaccttcacaatgcaacttccatactaactaactggatcaaagttatcctatatctggatgagaacttggagatgccatttactagtttcagagacttggcaaggttgggtaacctttcacaggcccgactagtgatagagcttcttgtaatgcttccaggagataatctgggtggtcctcaatgcgtgcatggccaaattgtgccggtattttgcgtagaactcttccaacaatcttgcgagcatagccgccataagctatccctccaataaaggcttgctgacaatcagtcactccagaggttgctgccccagggttacatgtagattggaaaagaccagctttctttagggattctatggtgtatgagttggtgccaccagccaactgccaaagattatagccttgaagatgggactgcattgttgtgtatattgcattcattaaattaactgttgaatcgccaacatcaggcaggctgactgcaatcagcttcacattattgattgactcacccaagttgctccagagggtattgaacatatcagttccctttccagtggtatgtatctctattgcatcaacatcattccttttcaacagttcagcagtcatagcaggatctcgaacatacgacatagctcttattctgtcataagggcaaaccgacaagcatcgtccacagccgtagcaccgctccgtaattacaccaccctcaagttttccacatgaaggatcagactgagagtgctcttcctcaatcataaccctctctaacaatattgcatcagcaggacagactttctcacatggctttgagcaatctggtgggcaatcctcaggatcaaattcagctttacggaaatgaagatctctgcaatcgtcattaacactaaccatcacccatggcctttgaactgctggcacaattgaggctgctacatcaataccttcattcactgcacccaccacagatgcgtctgctgcacaatcaatgcaatccactccggcaagcgtgtatacaagggagagattcctgacatcggcagcatcctcgaagctggcgccgcagatgagcttgacccagtccccgcgccggagggccgcgacctgcggcgggtggtggtcgccggcgaggcggcccctgcgagcggaggccgcggctcggacggcggcgtgggaggcgagcagagacctcgccgtcggcggcgccatggcttctccggtggctgcagcttcactgagccaatcgcgatagcctcatcggcggcggaaatatcttggagaccggagaagcac

SEQ ID NO: 19399 - DNA, 116 bp, Oryza sativa
  Clone ID: PAT_MRT4530_24864C.1
attagggttacagtataccaggcggactttcattaaacaagcatacctagaccgacacaaagagccttgctcccagaaaagacacatatgtcccttatgtcgatttcgagcctcat

SEQ ID NO: 19400 - DNA, 186 bp, Oryza sativa
  Clone ID: PAT_MRT4530_24865C.1
atggccttaggagtatttttatggatggtggatgtcagggggactatatacgagtgtaaaaaagacccagccacagcgctgttgcaagcatggagcgataataatctgcagtgcctagtcgttggggaaaacgaaggagggaatggggaagggtacgtgaacaatagcacgattggttttatttaa

SEQ ID NO: 19401 - DNA, 403 bp, Oryza sativa
  Clone ID: PAT_MRT4530_24866C.1
gttgttttttttttttttttggtttctccttcttttttttttttttttttttgtttttttttttttttttaccgaaccaaaaaaggggaagcatggggcaaagggtgttgggggccccccacaaaaaagccaacccgggaacaggcagccgcccactggggggggacccacacaaaccaagggggcaacccacaaatatttttccccccccaaagtttaaattaaaggggtctaagggtggcggggaaaccaaagacaccacattggttaaggggccacccccacagggggacaggggtcaagggcccaaaacaagggactagctgccgggggccaccaaaggcaaagctttaaaaagcccgttggccgcccccgggcacaaacggggaatggaagggcccaa

SEQ ID NO: 19402 - DNA, 685 bp, Oryza sativa
  unsure (1)..(685): unsure at all n locations
  Clone ID: PAT_MRT4530_24867C.1
nnnnnnnngnaattgtaatacgactcactatagggcgaattgggtaccgggccccccctcgagtttttttttttttttttttttttttttttttttaacttgaaacacaaacgctttatttaaaggagcatctcagttacgtgtggcggacaaaaaaaaggagcanattgtgacagaccattcccatcggccaagtggtcgaacccgacatccaaaacccagcgagcagccaagctcagcgcaacctccgggcttctcgctctgactccaaaagggtgagcacgtcgccctcgcgcacggggccttttacattgcggatgatggatcggctcgtgtcgtccatnaattccacgcgcacctgcgtgcactgtccctganaaccggtcctgccaagaacttggtgacctggccaacttgataagctgcccacngntnggtgttccatgaatggngggnccctccttgccnaattcctgcacccccggggggatcaataattcccaggatctcttttattngggtttngngggggttctccncnccnnaatnaanaattttttcccncccccntgttntngttttaaactccctttttaatccaaccctttttnccctttgtcccccncattaatnggttaattttccccctttcccccnttttttccatttncaatttaaaaagncc

SEQ ID NO: 19403 - DNA, 1113 bp, Oryza sativa
  Clone ID: PAT_MRT4530_24868C.1
atgccgacgcgccgccgctcgcgcagcaggagcgggacgaggcggcaccagcgcgacgacgacgaagaaatgcgagggggccagcggcgccacggcgagacggggggaggaggaggagaaggtcatccgcggcgtctccggtcggagatcggcgaggtgagtggctccctgtggaggatcacccgcggcgagctcttggtcgccgaggtctttgcgaggtcgccgccgccgtcgccgctgccgccgacgccgttctcatctcaggtgacgaagattattcccggaactgatggggttttgttcggtggtggtggtggtcagggaggagaagcttcctcgtcgtcgttattcaagccggcgccggcggctccccttccaacggtgaggacgtcctcctcgtcggccgtcgccgccgacggcttgaagttgaagcctccaccggaagcagccgcgacggcgacctcctccaagaagaggaattcgggccctgaatcctcatcgacggcgagctcgaagaggccgaagacggttcatcgtcaacaaaacaaatcgccattgccgccgccgccgccgaagcgcgccgcccgagcccgattcgctgccataccattgccgccgccgcccagcaacgaggaggtgctcgccacgcaaaagcgggtggacgagatgcgcaagaagtacgccggcctgatcgccaagtcccaggacgtgatcggcgtcgcccaccgcgaggccgccgtcccggagaaggcgaaggggcgccgagccaacctcgccgccgtcgcggccgccgcggaggacgagctcctcctcctgcggcagcggtgccgggggcgagacgccgagagggcgaaggctcgggaggcgctgcgggagatggagagggaggcgcggcgcgccgggctgttcgccatggaggcgatacgccgcgagcacctgcgggcgctcgacatcacccgcgacatcgagtacgcggtgagcccggagtgccaccgcggcgaggacggcgtgctccgcgtcatcgcgccgtcgcgccacagcccggtgtcgagcatgctcgggctcctactgcgaccacaagacggcggcgagctggagctagacgaagagtag

SEQ ID NO: 19404 - DNA, 483 bp, Oryza sativa
  Clone ID: PAT_MRT4530_24869C.1
aatacaaagaaaaactggagcactgagctacatttattagtataattaatagaatgtaaacaaagaacaaaagactgaaagttataatgtacatttacttgagtagagaaatagaacttgaaaaaagagtagtcaaatagaacatactagtaatacacaagtatcactgggttaactaatggctatactactagtcaatggtagattcctaagctaggacaaagctttcttcagtcaatgttatttcaatattacgtttttttctctctagggcatgttcaatctcaagcctcaaaaccaaacaaacaatgtcaagcattcctggttaggaaaaatgcatcgagatttcaagggatcttcaagcaccattcttcctcaagcaccaaccaaacacacccctggtccatctgaaaatctgagaacaaatttgctttgtagagattgatccatatgctaagctatgcttgtacttgctacaaaacg

SEQ ID NO: 19405 - DNA, 243 bp, Oryza sativa
  Clone ID: PAT_MRT4530_2486C.1
ttaggtggcaacaggcggcctttcgcacgcctcgccccgtcccgtcggaatgatgagagcctctaggcactcgtccctagccggagccggcgtgggaactcctggagttagcacgtcagtcccaggcgtggtagacaaggatgaccggtttgtgactggtctgacgccggtcacgtcatcggcagacaaccgtgctcccacgttgcgcctgcttccggcggagtggaggtaggtatggcccat

SEQ ID NO: 19406 - DNA, 1317 bp, Oryza sativa
  Clone ID: PAT_MRT4530_24870C.1
atgagtaggctctccttcaggccgcgcccgctcgacattcacaagaagctccccatcgtcaagtcggcgcgtgagcttgaggacgatgagaccacgctagcgcttcgggctgcgccgccggtgctgcggcactcccagccggagcccgcggctgatggcgaggcacatccaacatccagcaagaagaatgtgcaagaaataccctacaccacatggttgcatttcttagagaaattactgcttgcagccagggctgagattggtgagtttgttgaatatgatttggacaatgaagatgaagattggcttgaagactataacaatgagcggaaaaatctgaaccctgaaaagttggaggtcctcctattcaaactggaaacattggaccacaaagctcgagaaagagcaggcatcataacccccacctttttaggaccaataccagttattctgcagcttgattctgccatggaggctttgcagtacttgtctgttcgttatgctgtgttccaggctgtatataactactggaaatcaaagagagagcggtggcaaaagcctattttgcgacgtttgcagccgcctccgccagttaatgacacaaatccatacaatgtgttcagaccaagggagaaggcttatcgtcttcacacaaggaggatgcaaagacgagaaaatagtgtccaatcattcgacaaactccgtgtggtccggcgcaatctagagcaggctaaggcactaatgggcgcattgattaagagggaagagagaaaacgtgagactatggagtgtgaggttcaccttcgacgtatccagatgagatacaagcatgaggcacagcttattgatgatgggattgctctatcaggcctccagcaagctggatcaagtgaagatgattatgcagattcagatgatacggccaacgagcaaccatatgtacgatcggttgcttttcatcctagattccctgataataagctatcagctgttccgccattgcgtttgaagcgcgagcgtgagctaaaaagaagaccccaccagaatggctggttgttcaaaagggttcctgaaatgcgggatcctgaggagccagtaatgctatttacaagaccaattgaccctgataagctgaagatggctggtatcaggccaccactagatccacctattgatagtggtactactgctccaccattccggtggcaagctagaattggacggggaggtcgcatcatctttgaccgctggaatccttttcttcaagtcccggtcggccaggaaaccaatcatagaccctcaatgccagaaggatga

SEQ ID NO: 19407 - DNA, 3191 bp, Oryza sativa
  Clone ID: PAT_MRT4530_24871C.1
ttttttttttttttttttttaaagggcaacagttcagagggcttttggtcttcttcgggttacagagaaaaactacattgttaacatcaactggtgtaatagttatgatatattacatcgaattgctacacatgcttataaacagaacatacagtcgaagaaactattaattctttggacagtaaataacaggcaaatctgaatataactgaggggattatacatgacatcagagaaactatgaactattgactatgagatgaatgcataagattagctaaatagacatcctaaaatgctgaagttagtactttacaggagacagctatgccaaaagccatttttatagtcaccaacactgttgctctgcaaagaatttcccctccatggagtcattggctcaactactgtgtgagaaccaagaagcactcgtgatgagagcctaaagggtctcaacctccagttagaaatatacaggtgctgttgatctttacatgtcatgtcaccactgctaattagttatcagctgttcccaagttatattgaagtaaccatgccatttgctctttactgactgtagcccaaatgactgaaaagcccgcatcttcgattagctgggaatgtacacgaaacttgcaggtccaaggctagcaaatcaacaccagatacatttaacatcacagttgacgcctatgaaggatctcgcaaggcaggactagccatctaacacggtgagcaacagccaggggcggcctgccaacagcttccagtatcctagtaaaggcaaccttcgcagggacacatgtgacaagcccacttccccctggtttgatcagcccaccaaaaatgccactctgcttatgtgcttttgcttgaccacctactccatgatgcttttttccagtggaaatggaagagagggttcggaccttctggcttgacaggcttgcttttttggattgcttcttttgagatttagaggctgacggcctcctaacatttgagatgcttttcttatcaaccttaacctgatgatttgaatttgagtactttctaaaatctgaatttgagtactttctaaaatctggtttcatctcccagtctggatatgcaagggtaccttcatcatcacaatccaatgcccctgaggggttagatcggggaattctttgcatggcagtcctcctgcctgtacaccaagcaggttgccctccagttctcccttccaaactaacatcaccacaaaaaaccaggtggtcagtggaaccatcttcaagtatttcaatttgaacaggatgcccaacaattgctttgccattcagtctgctcattaaggaaacaagaggaacatgctctccctggtagctagcctggaccttcaagtcaacatcaaacaacattgggcccctgccacgaagacgtgaactgtacttttggtagaatgagggtccgctccaatatgcattccgatcaaaatgaaatatcttatctgaatccctgtttaggggagaaaccttggaagaatcatttccatagtcgttaaaatagctgtagcttcggctaaaatctcttgtagccttcaaacatgaagaatatgttctaccatggtacaagttaacctctgaatgacctgtgtcctcaaaaaaatctgtttcttcggaatcgtaattgacctcttcgttttggtaaaaattttgccccagcaattgctgattgggaatttgcatactcccttctctgggatttctaccatttattttatacggagatccttccatgaaaccatctgatttgtctaaccagggatttccatctgccatatccgatctcttaggtgcattacggctattacgtttacctttcatatgccattgggagacgcccaactcagaagagccatcctcttctgattcattcacttgacacatataagaagaataggtcagctcatcagcatcagcatcaatattcgcatgcctgaacttgtcagaagctggtaagaaataaggatcatgggcatgtgatgctggatgcagaatcaaatccgaacattgtaaaagttcagcgtcatcttctgtctcactctcagagcattccctctctgaagactcatatatgtgcttctcaacaagatcagaagatgtctgctcctcagaaaaagcaggatgatgaagataactttcagtctcaaaatcacctcctgtagaagccacttgtacggaaggtaaatcactatgactatgagtttcaccagaatcagtaggtaggaatacatatctacttcttttagctcggtaattggcaggtgatcgatccatttctccctgagttaggacatccccatagccatcattgtgctgtgactgatgaggcaattttggactgctgtgcaaaatctgaaccagaggttggcgtctgtcacatttttcaatagattcatcaaaatcacttccatctgatctaatcttttccgcagttgtgattttctccttgctatccaaattttctccggcctgtatatgcctcacatgcgagatgtctcccaagtgattgccaaaaagattatcagaaatgccccgagtaggagaatcttgaaagtttctctttgagccagcatggaggacatattgctcagcttccttttttatatcagaagaagcagttatgcccttccgtttcttactctttttgctcttgtagcgggtacttccaagatctttgttatgtttagagcaaacagaaacgttagcaggtctggaaccttgagtctgatgctttgatgcaagcagcttcttctccaattcaagagcatgaagaatagcatcttctctacgtgcatacttctctcttttcttaacagaagtcccttcagtagcctctgccttctcaatacatgcatcaaactccccacacctaaatgctttgacgcgctttgatttttcaatgttgtaccagtcgacactggcatcctcacggccgagaagcttgaccggcgtgccggaccttggcgacatgatctgcgacggcggcagctcgtcgggccccagaatcctgccgggccaccatgacccgttcctccgccgcacccacacaatggtccccggcgaggtatccccaacgccgcagcaggccacctccccgtctcctcctcccccctccgagcaccccgccatccctccccggacgcgtgg

SEQ ID NO: 19408 - DNA, 1685 bp, Oryza sativa
  Clone ID: PAT_MRT4530_24872C.1
tttcttccatctccccgtttcaaaccctagggggggttctctacccctgtttccctaaccctcgccccccaatccgcccgttccggccaccccaccgtcctggaatcccctctccgtcatctgcgtcgccgcttcgctcccgcccgatccccgcgccgtccgcggtcgtgccctcgaccacccctcaccccctcgtccacggtgttcggcgtagagcggggggctcgttccgcgcgggcgctctcccgtgccccccgcgggaagggaaggctctccattgaggcctcgctgatgaagttgcggccatgagtaggctctccttcaggccgcgcccgctcgacattcacaagaagctccccatcgtcaagtccgcgcgtgagcttgaggacgatgagaccacgctagcgcttcgggctgcgccgccggtgctgcggcactcccagccggagcccgcggctgatggcgaggcacatccaacatccagcaagaagaatgtgcaagaaatacctacaccacagtatgatgatgttgatacatacgaaagggactatactcgtacctttgcacagccaacatcctacatacgtgccagaggagagaaattactgcttgcagccagggctgagattggtgagtttgttgaatatgatttggacaatgaagatgaagattggcttgaagactataacaatgagcggaaaaatctgaaccctgaaaagttggaggtcctcctattcaaactggaaacattggaccacaaagctcgagaaagagcaggcatcataacccccacctttttaggaccaataccagttattctgcagcttgattctgccatggaggctttgcagtacttgtctgttcgttatgctgtgttccaggctgtatataactactggaaatcaaagagagagcggtggcaaaagcctattttgcgacgtttgcagccgcctccgccagttaatgacacaaatccatacaatgtgttcagaccaagggagaaggcttatcgtcttcacacaaggaggatgcaaagacgagaaaatagtgtccaatcattcgacaaactccgtgtggtccggcgcaatctagagcaggctaaggcactaatgggcgcattgattaagagggaagagagaaaacgtgagactatggagtgtgaggttcaccttcgacgtatccagatgagatacaagcatgaggcacagcttattgatgatgggattgctctatcaggcctccagcaagctggatcaagtgaagatgattatgcagattcagatgatacggccaacgagcaaccatatgtacgatcggttgcttttcatcctagattccctgataataagctatcagctgttccgccattgcgtttgaagcgcgagcgtgagctaaaaagaagaccccaccagaatggctggttgttcaaaagggttcctgaaatgcgggatcctgaggagccagtaatgctatttacaagaccaattgaccctgataagctgaagatggctggtatcaggccaccactagatccacctattgatagtggtactactgctccaccattccggtggcaagctagaattggacggggaggtcgcatcatctttgaccgctggaatccttttcttcaagtcccggtcggccaggaaaccaatcatagaccctcaatgccagaaggatga

SEQ ID NO: 19409 - DNA, 2306 bp, Oryza sativa
  Clone ID: PAT_MRT4530_24873C.1
ccggggcgccgacccgccctcgtccctcttctcctagccgacgcgacgacgacgacgacgtcgccgagtgtcgcctccgcgcgcgcggcgcgctgctcccctgcacgccgccgccgacccacggagaggactccccacccatcccagctccaagtcttgagggttcttgcattgggagagggggagatgagcggcccaatgcaacgctcgtcgcagccacagtttatctctagcgtcgagcggaacaatcaatcgaatggtcctggcactcctcttattgacagcatagatgttgatcagattgttattccagagaaaaatagttggaagaacctattttcatacatagggcccggatttcttgtctctattgcgtatattgatcctggaaattttgagacagacctacaggctggagcacagtacaaatatgagcttctttggatcatacttattgcgtcatgtgctgctcttataattcaatcacttgcagctaggctaggagtcgtgactgggaagcacctggccgagcattgcagagctgaatatccaaaggctacaaatttcatattatggattcttgcggaactagctgtagttgcatgcgacattcctgaagtaattggaactgcttttgctttgaacatgctctttaaaatccctgtgtggtgtggtgttctgataactggactcagcactctgatgctactgttactacaacaatatggggtccgtaaactggaatttctgatagctattctggtgtcattaatagcaacttgtttcttagttgagcttgggtattctaaaccaaattcttcagtggttgtgaggggcctttttgttcctgaacttaaagggaatggagccacaggtcttgctatctcactacttggtgctatggtgatgccgcataatctttttctccactcagcattggtactatcaagaaaagtgccacggtcagttcatgggatcaaagaggcatgtagattctatatgattgaaagtgcatttgccctcacgatagcgttcctcattaacatatctatcatatctgttagtggtgctgtctgcgggtcagataatttgagtcctgaagaccagatgaattgcagtgatcttgatcttaacaaagcttcgtttttgttaaagaatgtcctcggaaactggagctcaaagttatttgcagtagccttgttggcgtctggccagagttctacaattacaggaacttatgcgggacaatatgtcatgcaggggtttctagatcttcggatgacaccctggatacggaaccttctaactaggtccttggcaattctgccaagtctgattgtttcgataattggaggttcctcagcagctggacagttgattatcattgcatcgatgatactgtcatttgagcttccttttgctctagttccactcctaaaattcacaagcagcaggacaaaaatggggcagcacacaaattcaaaagccatttctgtgataacatggggaattggttcgtttatcgttgtcatcaacacctacttcctgataacaagctttgtcaagctgcttctccacaacggtctatcgactgtatcccaagtattctccgggatattcggtttcctggggatgctcatatacatggctgcaattctctacctcgttttccggaagaacaggaaagctaccctgccattgctggagggcgattcgacggtccgcatagtaggtcgcgacacggccactgaaggagaaggttctcttggccatctgccccgggaggacatctccagcatgcagcttcctcagcagcgaactgcttctgatctcgattagaaagatggcatacaaatactcaaatcaatcaccaaagaaatataccactgatgataatcatgcagctagtagctacctacatagcccaaagagttagccagctgatccctcaggtattcacctggatcatcctagtgaatactgcatactactaattccacatatatagtgacaataattttgtcttgatatctggtactgccgattgtacacgatggttagctaactgtgatcctgtgacaccaaagcttcttacttagaatcttatacatttcgaatatatgtcctcttgtgcacatgctaaattttcaggaatagcagcagtgcactggctcatgtcattggatatcatcaaaatgccatatctattgaacaatcctaagctccgattgaattttcctctcctgtactcaatccatttttaatgtctgacgctgtttaacttggaaaaaaaaaaaaaaaaaaaa

SEQ ID NO: 19410 - DNA, 513 bp, Oryza sativa
  Clone ID: PAT_MRT4530_24874C.1
ttcgtttctcttctcctagccgacgcgacgacgacgacgacgtcgtcggtgtcgcctccgcgcgcgcggcgcgctgctcccctgcacgccgccgccgacccacggagaggactccccacccatcccaggtacggcgcctcgccgcgttctcttctccaggttcgctttgcagaactccctaacaagaaccagatccaacccgaccaccgctccaagtcttgagggttcttgcattgggagagggggagatgagcggcccaatgcaacgctcgtcgcagccacagtttatctctagcgtcgagcggaacaatcaatcgaatggtcctggcactcctcttattgacagcatagatgttgatcagattgttattccagagaaaaatagttggaagaacctattttcatacatagggcccggatttcttgtctctattgcgtatattgatcctggaaattttgagacagacctacaggctggagcacagtacaaatatgagcttctttggatcatac

SEQ ID NO: 19411 - DNA, 177 bp, Oryza sativa
  Clone ID: PAT_MRT4530_24875C.1
atgggagagggagctgctcatggaaggggctcgagctcggcggtggatgtgtccgccgccggcgtcaaccgcgccgacacggtgcagcaccagggccggtaccccgctccgcccagcgcgttcccttactcgctcggccccatcctcgcgctcggccccaacgtcccctcccgctga

SEQ ID NO: 19412 - DNA, 657 bp, Oryza sativa
  Clone ID: PAT_MRT4530_24876C.1
ccagtatcctctgcagcatttcagacaacacaatctcaaccagcatcctctgcagtatctcagaattctgtcagtgctgctagaccattacgagttcagacaacacaatctcagccaccatcctctgcagtatctcagaattctgtcactgctgctagaccattacggggttactcacctcagaattctttcagtgcaccagttagggttcagtcgacatcatatcatcaggttgctccaggtatatctcaaggacttcaggttcagtcaacatcataccttcaggttgatccaggcagggcggttagtgctgaactgcagctttctcagtgttcctcgcttcaaactcagggaattcaacaccagcatgatccatcggcagatatttaccaaaacatatggaaggaggcacttgctaagctggcatcagagctgggggtttctgattacaatattgatccaccagggcgtcttccaagcactcctcaacccaatcagctgcatgctcaaatgaggcctggtcatcaacctactcaagcaacggcaaggcagggagttcaagctaatggtggtcatgttgcagcagcatcacagaaaaggacttccaatggccaccacttgccaaatcacaaacaattcaaccctggtgccaattga

SEQ ID NO: 19413 - DNA, 542 bp, Oryza sativa
  Clone ID: PAT_MRT4530_24877C.1
gcaagtcctctgtaatcgcaccctactatagcagccgaatgatgatacttactggaatgcactactccactatatcactgaagacattgatacacgcactcaagctgttgctcgtcatgacaagtgactgaataggatgtctactccaataataaggaagagaaatcatgttgatacattctacttcaaacgctgacagcttcacctgatggtcggcttgaccatgtcctgacacatacattcataagcctaaagaattgctaataaaagggatgacttatgcaacaaataacactatgacctaagctgtgaatcttgcagatggctgctgtagatagagaagctgtgaccggtatactcatatgttgctctataaggatctagatttcggagcttatgatctcaattgccctgacctatcagtgacagacgctggatgtgatggtgcattcaacaacttactaccgctggggctgatcactggaggtgccatactgctatgcagctaggcaacaattacacactttgttcaatgagacatg

SEQ ID NO: 19414 - DNA, 1603 bp, Oryza sativa
  Clone ID: PAT_MRT4530_24878C.1
aaaagggcaacgtgcaaaaaaccttcctcaaatccaacctccgaccgcgtcaatggccgcccaatcacacgtccccacgtgtcccccctcacctccgccttcttaacctcgccacctcctcctctcctcccacctcgcctctctctcctctctctctctctagtttacttttcttggagccaccaagaaaccagccatgtccgtgctcggtgtcttcttggcgtcgctgcttctggcggcggtggcgccggcgagggcggcaggaggggggtgcgcggcggagaggttcagcagcaaccgcgtgtacgcggcgtgcagcgacctgccccacctgggcgcgtccgtgcactggacctacgacgccgcggcgtcggcgtcgctgtccgtggcgttcgtcgccgcgccgccgtcgcccggcgggtgggtggcgtgggggctcaacccgaccggcggcgggatggccggcacgcaggcgctcgtcgcgctgcccaaggggggaggaggcgggtacgaggtccagacgttcgacatcgaggggtactcgctctccgcgccggggaagctcaagtacccggcgaccgacctcgccgcggaggtcgccgccgacggccgcgtcagcgtcttcgggaagctggcgctgcagaacggcaccgccgaggtgaaccaggtctggcaggtcgggccggtctccagcgggtccatggtgccgcacgccatgagcagcgacaacaaggccgccatggggaagctcaacctcctcaccggggcagccacctcttccggcggcggcggcagcaacctcaggaagaagaatacccatggaatcctgaatgctgttagctggggtcttctacttcccatgggagccatatttgctagatatctcaagacattcaaatccgccgatcccgcgtggttctaccttcatgtagcttgccagctgattggttatggtgtgggagtttctggctgggccactggcattcatctaggtaacctgtctaagggaatcacctattcgcttcacagaaacatcgggatcacagtatttgcgcttggtaccctacagatctttgcgcttttcctgaggcccaagaaggatcacaaataccgtatctactggaacgcctaccaccactcggtcggttacaccatcatcatactcggcatcgtcaacatcttcaaagggatgtccatcttgaacgtggagcagaagtggaagacgggctacatcatcacgatcagcatcctgggtggcattgccgtgatcctggaagctgttacatggagcatcgtcttgaagaggaggaaggaggagaacaagtcctataacggcgcttcaaacggtcacttgccactctctatgtaattcttgtagaggcaggagggacttgtgatccctacttatatattcaggaggctatattcagttatgtttatgcttataggattaggccttgtgatcttggtatctcttcttttgtatgatatttgtatactgcacactatactggagatgagagatgccagtacagcttgtttgattttttgttctgtttgtgaattgctgagttgaacatccactttgtatgattttggtgcc

SEQ ID NO: 19415 - DNA, 324 bp, Oryza sativa
  Clone ID: PAT_MRT4530_24879C.1
atggatgaggcccagacgcagaatcggacggcccgcaagacgccgaaccaacagcaacatgtctcaagcaatgatgttgtcgtcggtgatgtcggagatcttgttacgctgctcagaaaaacgccaaatataatccctaagagattcatcgggcctctagatcacgttgtggagttcgaagtgtgtgctgggccgctcgaaggtgccttgaaaattggcgatgaagtggtcaaagagctcgccccaagaaccgattgtgcctctgttgacggtcgttatagaccaatttcaaccatcaatataactataataatggagaattga

SEQ ID NO: 19416 - DNA, 1720 bp, Oryza sativa
  Clone ID: PAT_MRT4530_2487C.1
atggccgaacgggcagtggcgcacaacctctctccgagcgctagcggtgacgacagcgagcagaacccgcgtcgtcgagctcgtactccaccgcccccctctcgccgaagtcttaggcgggaggaggcgctcgagggggtcgaaagatccgcgacttcgccgcacgcgggcgatggagaaggacggcgagacggggagcgtcgtctcctcgtctacggtgatggcagcacgccccagggcgcgctccaggctgcgggcgcgctcttgcgtcacccgcccgtcgtccctgatccagagactccaacccgccgttggctagatgacgtggccaacttggtcatgacggcgcagcagcgcctaggcgccggcgggcggtcctccgccaccaaggccactggcgttgctactgccggctccgtgtcgtcgaggcgaagggcgcggcgagcggcagccgttacccgccgttcatctgccattccctcgtcaacgcctcccacccaagaagatgtgcgtgaggggccggatgcccgcctcaatatcgagcgccggcgcaatgatcgccgtgctgcccacgcatcggagggcgcttcctcgtccggagcgccacttcggtccgggcacgggggccagccccccgtgtccccggttggcggtgccggctgtcgagcctttgtggcgagccttcggaacgtccgttggcccccaaggttccggcccaccatcaccgaaaaatacgacgaaagcgtcaaccccgccgagtttctccagatctacacgactgggatcgaggccgccgggggtgacgacagggtcatggcgaatttcttccccatggccctgaaaggacaggcgcgggattggctaatgaacttgccacccgcgtcggtccactcttgggaggatttgtgccagcagttcaccatgaacttccagggcacatatccgcgcccaggtgaagaagcggacttacacgcggtacagcgaggggacgatgagtctctttgctcgtacattcagcggttttgtcaagtccgcaacaccataccgtgcatccttgcacacgcggtgatctacgcgttcagggggggcgtgcggcacaaccgcatgcttgagaagatcgcctccaaggagccccagaccactgcggagcttttcagctcgcggaccgtgtggctcgcaaggaggaggcatggacctggaactccaccggttccggtgtggcagcttcggccgcccccggatccgccgctcggtcagggcggcgggacaggaggaggaagaagagggcgcttcgcgggccacccgaaaggggaggcctggagcgacaaaaagaaggaggccggcgctcccagcagggagcgcccgaccagcaagtggtgcaccgtgcacaacacctccctccacgacctcgcggactgccgcgcggtcaaaagtttggctgagcggacgaggaagtgggaggaggagaggaggcaggagcgccgtgagggcaaggccccggcggctccctccagcaaccggcgaagtgaggccaagcagaaggcccccgccgagaacattgacgatggcgacgatgacctagggttccaggagcccggggccaccatcgccaccgtcgatgggggagcacgcgctcacgcttctcgtcggagcctcaaggccatgaagcggagcttctggccgcggcccctacccatgaggcgacgcggcgggcgcggtg

SEQ ID NO: 19417 - DNA, 1283 bp, Oryza sativa
  Clone ID: PAT_MRT4530_24880C.1
gctcataagtttcttcttcgtttctgctcccagtgctaaggcagcacagtcgttcgtcgccatgccagggctcaccatcggcgacaccgtccccaacctggagctggactccacccacggcaagatccggatggacgacgtgggtcggcgacacctatgtcatcctcttctcccaccccggtatacacactacacactacactcgctcgattctcacattctcattcggtagtagtttgtgtggatcgatgtgcatccgattgattgattgaatgatccgtcgatcgatcaggcgacttcaccccggtctgcaccacggagctggcagccatggccggctacgccaaggagttcgacaagaggggcgtcaagctgctcggcatctcctgcgacgacgtgcagtctcacaaggactggatcaaggacatcgaggcctacaaggtcattttaattaccttcctggcctagttaaatttgtgtgaaaacgtagtaactaattaactagatcgatcgtaataatatatatttttttggttatagcctgggaaccgcgtgacgtacccgatcatggccgatccgagccgcgaggccatcaagcagctgaacatggtcgacccggacgagaaggattccaacggcggccacctcccgtcccgcgcgctgcacatcgtcggccccgacaagaaggtgaagctgagcttcctgtacccggcgtgcgtggggcggaacatggatgaggtggtgcgtgcggtcgacgcgctgcagacggcggcgaagcacgcggtggcgacgccggtgaactggaagcccggcgagcgcgtcgtcatccctcccggcgtctccgacgacgaggcgaaggagaagttcccccaggggttcgacaccgccgacctgccgtccggcaagggctacctccgcttcaccaaggtcggctagatcatatcgatatcgacctcgctcttcgtacatcatgtgcgccacgcgtgcgtgatagcgtgtgctggcgtgatgactatgcgagatgcatccctgtgtgtgttggtgtggataatgccgctacgtttggaacagtagtgcatttactctgtgctactgtctgaactttggctgtttggcagactgtttatgtacccgtatgttcgcccctgtactaatagagtgggtgttgtggttggcaagtaaaaaaaaaaaaaaaaaaaaaaaaactgtttatgtacccgtacgttcgcccctgtactaatagagtgggtgttgtggttggcaaaaaaaaaaaaaaaaaaaaa

SEQ ID NO: 19418 - DNA, 183 bp, Oryza sativa
  unsure (1)..(183): unsure at all n locations
  Clone ID: PAT_MRT4530_24881C.1
gattcggcacgaggtgccgngtnatantggggaatgtngaggtggttttccctggatcaaatcaatgccagccanccantnaaagtttngacactngtgtngatnatctccnaaggccaaancattacatcatangggatgcntatgtgcatanccacatttatgcngaatatgcngttatna

SEQ ID NO: 19419 - DNA, 330 bp, Oryza sativa
  Clone ID: PAT_MRT4530_24882C.1
cccctgaaatattggtctcatttaatgacatgctgccaaccctgaaacaaattgccagcgcgtccatgtttcgttaacagtggcaggaaattcccaaatttgttcagttttgagcaagcttgcatgagaaacccaggtttccataactcgtacaatcctacacggtcttgtgcactaaaattttttcaggtttactaaaaattgtttcaattgcatacattttgtagatttcagcacaatttaaaggcctttaaggaccaccaaattaccaccggtaaattcctggtttcttagtccggcaaaggccgagcgtttaatcgtacttggaag

SEQ ID NO: 19420 - DNA, 240 bp, Oryza sativa
  Clone ID: PAT_MRT4530_24883C.1
atgggttacccatgggtaaaatgtaaaacctggttgttgtccactatatcttcaggtctcggacgggcatacccacgggccgtggtggcgacggcgccagaggacgccgcgtcagcggcggcggcggcggcggcggaggaggaggccgcgtggggcttccacggcggcgacgaggaggactacgcggcggcgctactgtggagcgagccggacccctggttcgatctcttcctcaagtga

SEQ ID NO: 19421 - DNA, 144 bp, Oryza sativa
  Clone ID: PAT_MRT4530_24884C.1
atgacgctgcatcgacgcacctcttcgcctcctgccttcggtgtgatcgccagcgatattgaggggcggagcggcgggcggcaaccagcaaggcaggtcagcagccagcaaccattaggcctaaccttaggtattttgatttag

SEQ ID NO: 19422 - DNA, 2175 bp, Oryza sativa
  Clone ID: PAT_MRT4530_24885C.1
atggcctcctccgtcgtcaccctcaacgtcggcggcgaggtcttccagacaaccgtcgccacgctctcccgcgccggcgcctcctcccctctcgcctcgctcgccccgaccccggcctccgcgccgcacttcctcgaccgcgacccgcgcctcttcgcgaccctcctctccttcctccgccgcggccgcctcgcgccgacgtcgccggactcggatcccccctccccggcgctcctggccgaggcacgccacttcggggtcgagggcgcgctcctcgcctcgctgtcccccgcctccgccttctccccgctggccctgcggccctccgcgctgctcccgctcgccggccgcgtgcccccgtccgcggtggccgtgccgccctccccgcatccggcctctgtcttcgccgcgcatggcggggtcgtcactcggttcgacgccgcgctcgcctcgcgcggcagcgtgctcacgccgctccccgccgtggattccctcgtcgcggtgtcccctacactcgccctcgccggcgcacgcgatttcgcaggggtgcacctctgcctgtacccggatgatgcccccgccacggctcgcgaggtgctttcctggccaggatccccctccgccaccgtgctgtcgatggcagccacttctgccaccgaagtgtcatccccttggctgttcaccagcttcgagtcggcacggcggaactcgagcgctgtagtgacgtttgacatgaattccctctcacctgtggcagaaattggccggaaggaggtgtatggtgcggacgtggaggcagccatcccggcttccaggctcagctggcttggcaggcacaatctcctgctcgccgctgggtcgcactctggtcctgccggagtggtgggggacatttgcctctgggatgttcgggcgagcgcgactgtgccagtgtgggagttaagggagaaggaggactgcttcgcagacattgccgcatcagaggcactgtcatcgttgttcaaggtgggggcagcatccggtgaagtgttcatggctgacttgagaatgctcggtggtggtggcattagcattgaaccgattgagtgctatctcaattgggtatttgtggcgcgcggtggagaggttgaggtgtggacacaggtggaattggctcaagaagctggtgggaagaagttgatgaggaggaattgggtggggaatggaccatcctttgtgattgcaggcggaagtggccacgagagtgtgaaggagaagaccaagattgtgagctgggcctttggaggcagcaggatggcattggcgagggatgataagcggtccattgaggagaagccaggacgagaatccatggccatgggcgacttcctaccggcctccaccgccgctgccttcttcgtcctcttgctcggtgtcaatgcggccgtcaacttcacgttccatttccataacaactgcccggagaccgtctggccagcggcgctgtcctcggcgggccgcccgccgttcccgacgaccggcttcgcgctgccgccgggcgcctccctctccgtcgccggcgtcacagccacgtggtcgggccgggtgtggggacgccaccggtgcgccacgggcggcggccgcttctcctgcgagtccggcgactgcgggacggggcaggtcgcgtgcaacggcgccggcggggcgccgccggccaccctcgccgagttcaccctcggcggcggcggaggcggcgccggcgccctcagcgacttctacgacgtcagcaacgtcgacggcttcaacctgccggtcgaggtgcgcccggagctgttggagcggcggcaggagggcgccgccgccgcgctgtgccggacgacggcgtgccctgcggacatcaaccgcgtgtgcccgagcgagctggcggtgcgagcggcagatcgcggcggtgcggcggcggcggcggtggtggcgtgcaagagcgcgtgcctggcgttcgggacggacgagcagtgctgccgcgggcggttcgcgtcgccggacaagtgcgctccgagcgagtactcgaggctgttcaaggcgcagtgcccgcaggcgtacagctacgcgttcgacgaccggagcagcaccttcacctgcgccaacgccaccggctaccgcatcaccttttgccccgccgccgccgccaaaaactaa

SEQ ID NO: 19423 - DNA, 1194 bp, Oryza sativa
  Clone ID: PAT_MRT4530_24886C.1
ttacatggctagtttaaccatgaagcgatcagacacgccgaaagtgtcttcgtctctttcgaaaatatcctcgtttctttctaataatgaatgttttctctgtgcaacccagatggtgcacaccttttttctatcctcaaacccctcctctccgagatcctcctccgcctcccgccgctgccatcctccctcccccgcgcctccctcgtctgcacccgctggcgccgcctcgtctccgaccgcggcttcctccgccgcttccgcgcccgccaccgcaagcctcccctcctcggcgtcatccaggtctgcgcctaccccatcttcgcccccgcgctggacccgccggaccggatccccgccgcgcgcttctcctggcggctcgacaaccgccacgacctcaacgacttgctgggagtccgccacggccgcgcccttgtccacgtcaacacctgccgctattctcagcgcaggctcatcgtgtgggaccccgtcgccggcgaccgccgcgccgtggctattcccggcgggttccgtgacaggggggtggtcgtccgcgccggggaggtgcgctgcgtcgccggcgacggcgacccgggccacgtgcacggcggctgccattcgagtccctttgaggttgtcatactaggcactaataagaatcggacacacgcgttcgcttgtgtttactcatcggagaccggcatctggggcaatataacagctcagatcgatgttccacccgatatgcatcctgatgggaatggccaccacagatttggggatacaatctgcagatttgcgcctgcagagaacggcgggcttcttttccttgttgtcacacattatactctcaatgtatggaagagtgagaccaatgctgatggtgtcgctggatgggtgctggagaaaactattgaactggacaggctcctttctttggaaccagggcctcagaaaacggcaccgatgcttctgggcttctctgaggaacataatgtggcttttgtgtgcaccatgttgggagcacgacaagcaacgaggaaggtggcagcggggcaatcccacccagagaccttacgagtagagaagatgctgatggcggcaacttgggtggtagaggtcttcttggaggttcgggggaccggcaacgatgacttcaggatggaggcctacgaaatcttcggtctggtgtag

SEQ ID NO: 19424 - DNA, 508 bp, Oryza sativa
  unsure (1)..(508): unsure at all n locations
  Clone ID: PAT_MRT4530_24887C.1
atggcggcaggatcaggtgcatgcangtgtggccgattgaaggcatcaanaaattcnaatacctctcttacctgccaccgctcaccgtggaagacctcctgaancagatcgagtactcctccgttccaagtgggtgcctgcctcnagttcagcaaggtcngatttgtctaccgtgannaacacangtcccccgatactacaacggcaggtactggaccatgtggaaactgcccatgttcggatgcaccgacgccacccaagtgctcaaggagctcgaagaaggccaaaaaggcttccccganncattcctnccnttctccgcttccanaacntcaggcangtgcagctcacagctncanccctacaaccccnggctgcgaagaatctggtggcnactaanccntcatcntcatatatagccccgtntaatgttcatctctgatccnataatgtctcccnccnngtttcntgtgttccatttgttcatccnctnttgaatttaccgggc

SEQ ID NO: 19425 - DNA, 282 bp, Oryza sativa
  Clone ID: PAT_MRT4530_24888C.1
atggtgagaaagcagcacgacacccaaaacaaagaagaaaaagacctccacagcaaccccaaagaacgaaacacaaacccaataaaaaaagaacagcccgcgcagaaaccgcccccaccgccacaacagaaaaagagaaacaacgacagcaaagaaccgaaggaacaaacaagacccccccccccccccccgctggagagacacaccgccaccggccgtgtacgtaccacacagccgaggcgcacgcacgcccacatcgatcaccgcaacaacgccgaataa

SEQ ID NO: 19426 - DNA, 1008 bp, Oryza sativa
  Clone ID: PAT_MRT4530_24889C.1
ccctcccgcccccccctcccccgtcgggcccatgcgagctcaccgccccatgccggggcgatcccgccccggcggcgcagccccgccccccgccaccgccgcccagccagcatttctgctccgcgccgccgctttgctgctgcttctcccacgaatgcagggaggcagcggcggggatagctccggcccccggcggcggcggcagggcgccgcggcccgagacgccgcggccgagcaggtaggagtcgcagaaccggcgggactggcacacgttcggccactgcctgcgcaaccaccggccgccgctggagctgtcgcggtgcggcggcgcgcccccgctggagttcctccggtacctggaccagttcgggaagacgaaggtgcacgccgcggggtgccccttcttcggccacccctcgccgccggcgccgtgcccgtgcccgctccgccaggcgtggggcagcctcgacgcgctcgtcggccgcctccgcgccgccttcgaggagcacggcggccgccccgaggccaaccccttcggcgcccgcgccgtccgcctctacctccgcgaggtccgcgacagccaggccaaggcccgcggcatcgcctacgagaagaagcgccgcaagcgcgccgcccacctcctcgtcttcgtctcaggccgccgccgccgccgccgccgccacctccccggcgagcccagccgctagcccgacgccgccaccgccaccgccgacggagagatcagccgacgtgcggccgatgccaccggagggccacttcttcatcccgcacccacacttcatgcacggacacttcctcgtaccgggcggcgacgccgaccaccaccaccaggtctccaacgccggcaatggcggcaacaccaacaccaacaccaacaccaacaccggcggcggcggcggcaacggcgacgagatggcggtggcgatggcggcggtggcggaggcgcacgcggcggggtgcatgctgccgctgtccgtgtttaactag

SEQ ID NO: 19427 - DNA, 327 bp, Oryza sativa
  Clone ID: PAT_MRT4530_2488C.1
atgggtcatacctacctccactccgccggaagcagatgcaacgtgggagcacggttgtctgcctatgacgtgaccggcgtcagaccagtcacagaccggtcactcttgtccaccgcgcgtcagtttagcatgccgcacgtctgcctttcttcatacaatgacttccttgctatggttgcgatgaagcctggaacgaatctggccgggactgacataccaactccaggagttagcacgccggctccggctagggacgagtgcctggaggctctcatcaatccgacgggacggggcgaggcgtgtgacaggccgcctgttgccacctaa

SEQ ID NO: 19428 - DNA, 2775 bp, Oryza sativa
  Clone ID: PAT_MRT4530_24890C.1
atggaggaagccgccgcagcagttcaccggcggtggcggcggcggctgctgccgaagctgatgctactcctgtgcgccgtcgtccatggccagcagccggacagcctcggcttcatcagcatcgactgcggcatccccgacggcggcggctactccgacgagtccacccgcggcctccgctacgtccccgacgccggcttcctcgacgccggcgcgggcctcagcgccggcatcaacccgccctacaccgaccgcgacctcgccgcccgctacctcaccgtccgctacttccccggcgccgcctccgccgccggcgagcggggcggctgctacacgctccggcagctctcgccgggagggaggtacctcgtgagggccaccttctactacggcaactacgacggcgccatcgccatgctccccgtcgtcttcgacctccacctcggcgccaaccggtggaccgccgtcaacgtcaccgccgccgacgccatctacatcttcgaggccgtcgtgtcgccgccggcggacttcctccaggtgtgcctcgtgaacatagggaagggaacgccgttcatctccgggctggacctgaggccgctgaaaccggagctgtatccggaggcgacggcgaaccagtcgctgcttctgctcaaccacgaccgcccgccggcgaggttcgccttcaaccgctaccagttctggcgcccggcgagctactacaaactattcaggtacccattcgatccgtacgaccggctgtggcagccgtacggcgacgacccgtcgtggacgaacatcaccgtcgccgccgccgtcgacgtcaccaacatcagccgctccgacgacccctccccgatcctccgcagcgccgccacgccggcgaacgccaccgtccgccgcctcgacttcccctggagctccgacgacgccgccaccaccacctacctcctgctgctctacttcgccgagctgcagcggctgccggccggcgcagcgcggcggcttcgacgtcctcgtcgatggcgacgcctccgccggcggcgggcggcgagggtacacgccccggtacctcgcggcggaggtcgtgaggtcgacgcgaaggcgatgatggaaattcgcgataactatgaactgaagaagaattggatgggggatccatgtgctccaaaggcatttgcctgggttggattgaactgtggttattcttcatctgatcctgcattggtaacagctttgaatttgtcatcaagcgtgttgattggtccagttaatctttcttttggtgatctgaagtccctgcaatacttggatttgtccaataacagcttatctggcccaatacctgattttctagtgcaaatgccagcactcaagttccttgatttgtcaagcaataaactcagtggatcgattccttctgacttacttcaaaagagagaaaatggatcacttgtattaaggattggcaacaatgcaaatctctgctataatggggctaataatacctgtgctccggagagtaagcaaagcaagagaatccttgtgattgcaatagctgttccaatagttgcagcaactctgctgtttgtggcagcaaaatttatccttcacaggaggaggaataaacaagatacctggatcacaaacaatgcaagacttattagccctcacgaaaggtcgaacgtattcgagaaccggcaattcacctacagggaattgaaactcatgacatcaaacttcaaagaggaaatagggaaaggaggattcggcactgtcttcctaggatatttggaggatggaactccagttgctgtcaagatgtgctcaaaaacatcttctgaaggggataaaaagtttttagctgaggctcagcacctgactagagttcatcacagaaaccttgtttccttgattggatattgcaaggataagaaacatctggcacttgtttatgagtacatgcaaggaggaaacctggaggatcgtttaagaggagaggcctccattgctgcaccactcacctggcatcaacgtctgaagatcgctctcgactctgctcaaggattggagtacctgcacaagtcatgccagcctccattgatccacagggacgtcaagactcgcaacatcctcctctccggcgacctcgacgccaagatcgccgacttcggcctgaccaaggtgttcgccggcgacgtcgtgacccacgtcaccacgcagccggccggcacgctgggctacctcgacccggagtactaccacacctcgcgcctcagcgagaagagcgacgtctacagcttcggcgtcgtcctcctcgagctcgtcaccggccgcccaccggccgtccccctcggcgacggcgacggcggcggcggcgagagcgtccacctcgccgtgtgggcgaggcagcggctggccgagggcgacatcgagagcgtcgcggacgcggccatgggaggctgcttcgaggtgaactcggcgtggaaggtggcggagctggcgctgcggtgcaaggagcggccgtcgcgggagcggccggccatggcggacgtcgtcgccgagctgaaggagtgcctcgagctggaggcgtcacgcgcgctgggacgcggctacagctgctacagcagcggcagcggcggcggcagctcggtggcgacgacgacgacgacgagcggcgccgccaatatcagcgcggcggcgtcggcggcgagtgtcagtgacgcccagatcggcgagctgaggcaggagagcgtgctcgagctgggaccaagatga

SEQ ID NO: 19429 - DNA, 480 bp, Oryza sativa
  Clone ID: PAT_MRT4530_24891C.1
atgccggcatgctgcgatggagaggaggacgacggcggggatggagaggagactggcggcggtgaagaaaggctgccgcggtgcgggcggcgcgcgacggcttggcgcggcggccgggaggcaacacagaggggaggaacagaggtgacggtggatgggaaagcagaggagggactacaaggcggcggccgcggaggtgaccgcacgtcagcgctcggcccgacgccatggcggcttgggtcgggcggagacggcggtggcagtggaagtggaggaagggcagaggcacggggaggaggagccgggcggcgaggttgggggtgtcgatggcgggccgcacacatggcgctgccactcggcggcgtcctggagcgaggccaagacgacagcggggagggcatggcgcaacgcggcggcgcgggcgacggccgaacacatcgcgcgcgcaagaggacggaggcggtgcggcgcagcggctag

SEQ ID NO: 19430 - DNA, 507 bp, Oryza sativa
  Clone ID: PAT_MRT4530_24892C.1
atgaagaaggccatagcgagcatagcgtcctccaccttcgtagcttcctctggatctggcagccaccgccgcccgccgcctacatccacgcgccagctcgctcgcacgggcgacccacctcgatgccatcttcccaccgccctgccacagcccgctgtcgaccatagcagccgcgcctccatgcctgccgcaaccgccgacgccgcgcccgcaccgccacagcccagatccagcggcggggacatcggatccagctacgggggtgccagatctggcgatggcggcgccggatcagccgccatgcgccggcgtcgcgtggccttcccggctctccgcgccaccccttcacgccgggacggccacgcgcaccgggtgacggtgggagcgtggagagatgctgcaaggtggccacgagtccgctacaccgtcggtggcagtaccatagtgttacgagtaagacctctgttcgccgctagtctgaagataaggagtagtcttcgccgctag

SEQ ID NO: 19431 - DNA, 135 bp, Oryza sativa
  Clone ID: PAT_MRT4530_24893C.1
catggacaccacgcagctatcgagcgggcacacgagaacgtggcacgacgtgtacggtggcaacaccgagaggccgaggaggggcagcgagggaggaatcctcaccacaacgagacaaggcacaaaacgacaacg

SEQ ID NO: 19432 - DNA, 197 bp, Oryza sativa
  unsure (1)..(197): unsure at all n locations
  Clone ID: PAT_MRT4530_24894C.1
ccacgcgtccgggtggaacgcgtacttaccccaagttaggtgcatgccatggnaccacttatggcgagcgcctcgncaccggnacctacgctggnnctgctcgcgncgagcggcgnncttctcgnacnctttatgctnncggcgcgagcgaccggcgggagnggggaggacgnnngnnacatggggatgatggacag

SEQ ID NO: 19433 - DNA, 108 bp, Oryza sativa
  Clone ID: PAT_MRT4530_24895C.1
atggctagatttgaagtggtggcgatctcaaggagacatgggaggacgaggtcgagcttctacagtgccagctccatcacgactgttatgtcttgtgttcttggttga

SEQ ID NO: 19434 - DNA, 750 bp, Oryza sativa
  Clone ID: PAT_MRT4530_24896C.1
atggcagcacgacagcggaggagggcaggagcagcgagaggacaagctcacccacgccccccgcgcctctccgcgacagtcctcgccgacggtggccacgcctgcgtccctgatagtcctcggcagcggctgcgcccctccgcgacctccccacgagcgtcctcgccggcagcggccacggccgtgctcgcgaccatccttgccgacggcggctatggccgcacccgtctctgccaccgtcctcggcagcggctgtgctcgcgcccctccgcaaccttcgagacctccccacgagcgtcctcagtggcggcggccacagccgcgctcgcgacaatcctcggcaacctccgcgacctccccgcaagcgtcctcaccggcggcggccgcggccacggccgctctcgcgaccttcttctccgttggcggttgtgtccacgcccgcctctgcgaccgtcctcgccggcggcggcgcccctccgcaacctccccgcgagcgtcctcgccgacggcggcctcgtcctctcgccgcttgccttctccctgtcttctcgtcctcttgccgcgagctggagctgcctcatcctcaccgctcgccggcgccgcgtcgccttctccccacgcagacgtaagagaggaggatggcgacgtgagagaggaggacggaaaagtgacaggagtggcatggtttcaattttaaaaattttcagtggcacccagccgataacgcgaatagtggtggcatttttctga

SEQ ID NO: 19435 - DNA, 649 bp, Oryza sativa
  Clone ID: PAT_MRT4530_24897C.1
cgcctccggcctcgtctccttgtctaccgcacgcagccatccttgccgccatccgcccgccgccagcagccatccccaccgccggccgcccgtcggcgtcggctcctcgctagcccgccgcccgcagctatccggcccatccccgccgccatccggcctatccccgccgccggccgcccgtcggcgtcgactcctcgcccgcccacagccatccatgccgccggccgcccatcggcgtcggctcctcgcccgcccaccgcccgccgccggccacccgtcggcaggtcggcctattgttggtatttcttaacgacatcactagaaatataatttccagcaatggcgcagaaatacttctggtatattatggttacagagttcatccgcaagcgcacggatataccattatctggaactcctgttccggccggtgtgggtgtcgtctctgaaaactaacaacagcatcgagttcgcgacccttgagaacccaaaggccatcggtggtggagaggctcctcttgctgctggggcgactgctgctcagcgagatggcgtcgcatcctttgtggtctccatgagcacttggcagtgggaggacggagaggggtccaacgctaggactggtgtgggcgtggcaaaggcgagctag

SEQ ID NO: 19436 - DNA, 189 bp, Oryza sativa
  Clone ID: PAT_MRT4530_24898C.1
atggcgattggcgacacaaggatggtgaacgacgtttatagtgcgacacgaaattttctgaacctcacatgccaccaaaagaagaacaatgttagctacatattccacaatagaaagctgggcagagatagtgccgagccgagcggcccaagcggcgatggcaccgagaaaagcggcggtggggcctag

SEQ ID NO: 19437 - DNA, 838 bp, Oryza sativa
  Clone ID: PAT_MRT4530_24899C.1
ctgagatccctctcccctccccgccatcgccatggctcccccaccgccgccgccgccgccgtcggaggaagagacgagacactagaaaagacggttcttgaccgagtttgcggccgatccgggcttggatttgccacgggaaaggaaggagtttcgggggctgatagagtgaaaggcgacgagggagaagatggcctcggaaatggttaaggcggcgacgagtgagaagctcaaggagatggattgggccaagaacatcgaaatctgcgagctcgtcgctcaggatcctgggaaagcgaaggatgtgatcaagccgataaagaagtatttaggtagcaggagcaagaacactcaactttatgctgttatgctgctagaaatgctcatgaataactgcggagaacctatccacaagcaggtcattgataacggtcttctcccgatacttgtgaagattgtgaagaaaaagacagaattaccagttcgtgaaaaaatatttcttttgctggatgcgacccaaacatcccttggtggagttaaagggaaattccctcagtactatggggcatattatgagttggtgtctgctggcgttcagttttcgaatcgcccaaatgttgttgttacacaagcacaagctccagtcccggtcccagaaccaacaatcgaaccaaataataacagtttatctaggagattggacgaaggacagaaggaagtgcatgcgcagcctgtttccgagtcaagtataattcggaaagcttctagtgtcatggaagttctaaaggacgtgcttgattcggtgggtcctagacgccctgagggagcaactggtgag

SEQ ID NO: 19438 - DNA, 1983 bp, Oryza sativa
  Clone ID: PAT_MRT4530_2489C.1
atggggcttctgatgtttttatatgccaatatgatattggcacctaccatgtatatcttctttgcctctgccctcccagtcatcgccttcggagcgcaactgagcagagaaacaaatggtatactcaccacagtagaaacactggcatctactgcattatgtggcatcatacattcaattcttggagggcagcctctgttgatagttggagttgcagagccaactataatcatgtacacgtatctctacaactttgccaagaaccagcaagctctgggggaacgactgtatttagcatgggctggatgggtctgcatctggactgcgctcatgttgtttcttctggcaatgttcaatgcttctaatgttattagcaggtttacaagggttgcaggagaactttttgggatgttgattactgttctgttcctgcaacaagccattaaaggaattatagaggaattcaaggtgcctagagatgcagaccatagttcacctatatatcaattccagtggctgtatgtcaacggcctgcttggtgttatcttttcaattgggctgttatacactgcattaaggtcaagaagggcaaggtcatgggtgtatggtcaagggtggctcagaggcttcattgctgattatggtgtcccacttatggtgattgtttggacagcattctcgtacacgttaccaaaggatgttccttcaggagttcctaggaggctgttcagtccacttccctgggagtcgagttcactgcaacattggacggtagcaaaagatctgttttcagttcctccagcatacatatttgctgccattctgccggctttgatggttgcaggactttacttctttgatcatagcgtggcttcacaattggcgcaacaaaaagagtttaacttgaagaaaccctctgcctaccattatgacattttggtcctcggattcatggtcctgctttgtggtttgatcggcatccctccatctaatggagtacttcctcagtctccgatgcatacaagaagccttgcagtccttaaggggcagctgctacgcaaaaagatggttcaaactgccaacgaaggcctgatgaatcgtgctagcagtttggaaatctatggcaagattcaaggggttttcatcgagatggactgcgaaaaaaatgtagtcttgtatggaaaatgttcaagcaaatcaacttataggtcaaaaattgtcctgcagactgattctgttgacaaggagttaaagagcttgaaggatgctattctgcaagaagttgataaagaagggacattggctgaagaatttgaccctataaaacatattgaagcacatttgcctgttcgagtgaatgagcagagactaagtaacttgctgcaatccttattagttggtgcttgtgttggagctatgccagtcatcaagatgataccgacatcggtcctctggggttactttgcttatatggctattgacagtctacctggcaaccagttttgggaaagggttcttgagggtccccatgcctctttcatggaatcagtgccttcaaaaacaattactgtcttcacgatcttccagttggtttacctcttgatatgcttcggcattacgtggataccaatagcagggatcctgttcccgctgccattcttccttatgattcttatcaggcagcatgtcctcccaaagttttttgagccaaatgaccttcgggaattggacgcagctgagtatgaagagcttgaaggtgtccaccacgatcacacgctggaggatggtgaatctgattcaggaagctgtggcagccgtgacgacgctgagatatttgatgagctgacaactaaccgtggagagctaaagcacagaacttccagccaccgtgaagaaaggcacctgcaggtgcattcaaacgccattcaacccagtaaacagaagcaactggattttactgaaggtgggtgtaaattggtgtaa

SEQ ID NO: 19439 - DNA, 300 bp, Oryza sativa
  Clone ID: PAT_MRT4530_248C.1
atgccgggatcctatcgggacgagatccccttgtcccgacgagctgagcagcgaggagaaggtggccgcctgcgaagactttcaacgcgggccaaggaagagggcttgctcagcgggaggaggacatggccatcggcgacgagcttcggcgagacgggatccccttgtcccgacaagctgagcagcgaggaggaggtggccgcttgtgaggacctccgtcggccgccggtgacgagctccggcgtaaggcgtgacagtgaaggatctggtcaacgcagaagatacggccaccggcgatga

SEQ ID NO: 19440 - DNA, 3534 bp, Oryza sativa
  Clone ID: PAT_MRT4530_24900C.1
atggccacgggaatggggcacgcggtctcgcgcttctctcctcctcctcccactgagatccctctcccctccccgccatagccatggcttccccaccgccgccgccgccgccgtcggaggaagaggcgagacactagaaaagacggttcttgaccgagtttgcggccgatccgggcttggatttgccgcgggaaaggaaggagtttcgggggctgatagagtgaaaggcgacgagggagaagatggcctcggaaatggttaaggcggcgacgagtgagaagctcaaggagatggattgggccaagaacatcgaaatctgcgagctcgtcgctcaggatcctgggaatagcgaaggatgtgatcaagcctgataaagaagtattttaggtagcaggagcaagaacactcaactttatgctgttatgctgttagaaatgctcatgaataactgcggagaacctatccacaagcaggtcattgataacggtcttctcccgatacttgtgaagattgtgaagaaaaagacagaattacaagcacgtgtaaaaatatttctttctctggttgtgaacctaacatcgcatggtctagataaaggggaattccctcagtactatggagcatatgatgaagttggtttctgcctgctttaagttttcgtatctcaaaaacatcgatgaatgcatctatttatgacatcaagggatgaagtggtggtatcataggcaatagaaatgaacgaagagcttcacaaggtccttgtacagcatgatgcgttgcattcagttcagccaactacaacagtagcttctactctcaaggaggaagaggaagaagatgccgaaagcctttaccggaggcttcgaaagggaaaagcattatcggaagattatacagatgactccataccatcatttcgatctatacctgaagacaagatgcgccgcccactcaccattgagccatccaacactgataagaaactgggggcactgaatattcgctcgccatatcctgaagcgaggcctgacgtgctgattccaccaccgcctgccaagcacgccgagagggagagaaaaacaaagaaagaggcccacgaacgccgcttcagtgcagcctgcgcatcgtcgtcctcctcctcctttcctctcttctcgcaacccttcctcctcctctcgctcgctcgccggaggcgatgacggcggaggcggacgacccgacggcggcggagacgctggagaagttccgcctctacgagacgcgcgcgaggctccacatgctcgggccgtcgcgggcgtactgattccaccaccgcctgccaagcaccccgagagggagaggttctttcgggagaagagcatggatgccaacttgctgggccatcttaggggcttatcattgcacagccgggacggcagtagctcgtgtagcggcagcacagattatggagactgaggtgtaggtatatgcggtacataaaggattattttttgttcttcaggatgatattctgcttgcccggcaattgatgttgagagaggcagcctcagcctcatcgtcgtcatcttctcgctgaccattgtacacttggttttctaattcttttataattcttcccccttccgcttacctgacattatcggaaagttgaacaatgctgtgttgtgagctttcagttctataaagatgcttgtgtggcaaactgagtgaaagaccattctcatttctagaagatcacggcattttgcagggacacggtatttgaaaagaggcgtgaatgaccatggaaaagttgctaacgatgttgaaactgagcaaatagtctttgaggaggaagctggttcctggaagggaagaatgagtgcagtagtacagatgcggggatcgatccctctcttttggtcgcaggaggctggccgacttagtcctaagcctgatattattgtgcagagatatgatcctacatatgaagcaactaagttacattttgatgatgtcgctcagcgctatgggcatcctatcataatacttaatttaacaaagacttttgagaaaaggccccgagagatgatgctcaggcgtgaatattttaacgcagttggatatcttaatcaaaatgtcccagaggagaagaaattgagattcatccactgggatttccataaatttgcaaaaagtaagtctgcaaatgttctgggtgttttaggaggtgttgctagtgaagcactggatctcactggattttactacagtggaaagccaaaagttcaaaagaaaagggatggttccattgatataagagctagttctggagacctttcaaggctttcgagtaatgcagattcacttggtcccactgcttctcaagatataagaaaagatgacagcaaacaagaacttcttggtgatgatagcagcattgcttcagctttaatggatttgtaccagagcatgggtgatgcacttgctcatcaatatggaggctcagcagcacataacacagttttccctgagaggcaagggaagtggaaggctaccactcagtctcgggagttcctcaaatcaattagacggtattacagcaatgcctatactgatggtgagaaacaagatgccataaatctatttttgggttatttccaacctcaagatggaaagcctgctctctgggaattagactctgattactatcttcatgtgacaacatatggcgatgatcttatatctgatagctaccatatgacctcctcaactggaaatagtgcacctggggaatctggagctgcattgagccctggagccacattgagccctgttccagcatgtaaggaggacttctcaaggatgaaacttacttcatttgacaaacttattgaaaggacttgcagttcaataaggaacgtgcggcttcactgtgatgctgatctgaaacagagcggaactgttggaacttctggaatggccccagatgcagtggagatacagcttagaaccccaaactggttgtttggtcaaagaaaacacgcagagactgtcccaacagtaaaagttattccagtggaaaatgcaaatgagggtaacggggaggacacgaatgtttctctatgtggggaattgaattggctttcgtcagcagatacatgcgaggaggacaatttcagaaggtatcttgcattcacaacagcggacgtagagaatggctggtatggtggaacactgatatatgatcaagatgaaaacagcggggcttataaacattactctgaattttgccagggctcagtcatggatcccctcgagcacgatcccgagaaagaaatgcattatgcggaggccctcagcgtggatattgacatcactgatgatgcaacggtagaagcagaaatgcaagctgccctggacgattaccagataataggttcagacctcagcattattccatcttgtggatcgctcgctgaagatccaagccagctgacgaggtggatcattgatttctacagcagccttgtcattcataaaccagttgcgtag

SEQ ID NO: 19441 - DNA, 501 bp, Oryza sativa
  Clone ID: PAT_MRT4530_24901C.1
atgacgccggaggttcgttctggcagagtgccagtgacagcaggaggcatgagctgcaagggctgcactggggatactcgcgctccttcagttcaagtggtctacctccatcctcttggatgcatcactcaatctcctctcgagggcatctgggaggactcacccggaggacggatacacttgaactgcaggcagggaacatgcagcacacgctggaggatcatgtgcaagttgactagcaagcgttttgccgctaccaaggatttgatatccgccatgagccatagcaagaagcaagcttggggggagatgtctctcccccaactaagatacctttcacgctctatgatcaagatcatacacccacatatgcacacatatgctaagcttctacactggaagatagcatcaatatcatccaccatatccatgttatcattatccacaaataagctctccatccatgcttcctttccaaagaaaaatcctttgcaaaaataa

SEQ ID NO: 19442 - DNA, 622 bp, Oryza sativa
  Clone ID: PAT_MRT4530_24902C.1
gctgcaggaattcggcacagggctattccaaattttaggtctctgttcagcttgttttgcggtagtactaacgtgtacatactgacatggcttcagtatacatctttttaccataagttgatatcactttgagaatcagcaacaaccgcatgaaaaaattacctgaaccaattgaaatatcaaattagtaactcaattggccttcttagaagcttgaagccagtgcagtctttttactcgatacttttatatgtattgactgtgttgtgtattttctttatgcttcttcatgatgttgtacttttgtcccggagttgctttactttccaattgtctatgtacatttgagtagtattatttgataggtcagttttatttccagatatatacataccttagaatgactatataacttcttgtaagtgacataatgtgatcgcgcatgttcttcatttgagttagatggtttatgacgtgcaatcagctgggggatttggcctttggtggatcatatgactgtttttctaatattgaaggaaatgcagtattttggggtatatggcatggattccagtgattcatcgctcatctagtcacgtttccatgtgcatatttgtgtggc

SEQ ID NO: 19443 - DNA, 219 bp, Oryza sativa
  Clone ID: PAT_MRT4530_24903C.1
atgggtgctagccctagcatcggcatccccatgccgcccgtgcgagagcagagagcgagacggaggaagaaaggagagaaacagagaaagagaaagagcggaaagaaagcaggcgctgacatggacaccctgacatgtgggacccacgtgggtcccacgctaactcagccgccacgtcggataaagccagagtcaaaaccacttaaggaactcaagtga

SEQ ID NO: 19444 - DNA, 518 bp, Oryza sativa
  Clone ID: PAT_MRT4530_24904C.1
atacgacccgagccttgttctcgcaggggtgcggagtctgacctttgagcacgaggaggcccaggcagggacgccggtcctctttgtcggctacaccaccaacaccatcatggcacacacccccacgacgatcacgcgcatcaggcccatcaacgtggacccgctcagcccgccacagtaccgtcccaccaatatcgactgcatagctgtcgattcacccatgagtaaccggtgcaacagcggggtaattttgaccccggacggctccagggtcctggccgtctggatgcactgtctgtgggggaaagaatggttccggttcggcctgaggagccacgcgctgattggggttctcggccagatccgagagggcaaagtccccaagctccgcaccccaccggccgagttcattcccattaccacagttgaggggagcgcgatgggcctctcgaaggagtggacagcgaatgtgtcggagaaggacccgcgccaccagctgctgcaagtccatcgcgtct

SEQ ID NO: 19445 - DNA, 333 bp, Oryza sativa
  Clone ID: PAT_MRT4530_24905C.1
acgtcgccagatatcgacatcagagattagcctagacagactcaatctggtgcccgcggaggccgacaagagggatctaacgccgtctctgatctcgtctcgacgagctcgtattcgaggggggaagactaccctatcgtcgactatgtgttgatgaataagagcaagaccggtttcggccaacaggagtaggattgttaccctcctatgaagaggcccgaacctgtataaaaatatttgtttctgtctcttttacctcaatctcgcatataccctggtaccaacgattcccataccatacaaataccgtagtcgtgacctaaaacgttgaca

SEQ ID NO: 19446 - DNA, 555 bp, Oryza sativa
  Clone ID: PAT_MRT4530_24906C.1
atgtacaggggagggctccggacgccgaacgcggcgcagatacagcagatcacggcgcacctctcgacgtacggccgcatcgagggcaagaacgtcttctactggttccagaaccacaaggcccgcgaccgccagaatgccgccgccgcctctgcatctcccaccacctcctctcctgcgcccactactaccaccaccacctcgccgccgccgccgccgtcgttccgccgccgcagcttctgccgccgctgcacccctcctcctcctcctcctcctgcggcgggaggcggcggcgtggtgttgccggcggcggaggcgatcgggcgttcgtcgtcgtcgtcggactactcgctggggaagctagtggacaacttcggggtggcgctggaggagacgttcccggcgcagccgcagcagccggcgacgacgatggcgatgacggccgtcgtcgacactacggcggtggcggcggcggcaggtggcttctgccggccgctcaagacgctggacctcttccccggcggcctcaaggaagagcagcatgacgtcgtctag

SEQ ID NO: 19447 - DNA, 741 bp, Oryza sativa
  Clone ID: PAT_MRT4530_24907C.1
atgtacaggggagggctccggacgccgaacgcggcgcagatacagcagatcacggcgcacctctcgacgtacggccgcatcgagggcaagaacgtcttctactggttccagaaccacaaggcccgcgaccgccagaagctccgccgccgcctctgcatctcccaccacctcctctcctgcgcccactactaccaccaccacctcgccgccgccgccgccgtcgttccgccgccgcagcttctgccgccgctgcacccctcctcctcctcctcctcctgcggcggtggcctcatcgaccacgctaattcccttctctcccccacgtcggcgaccacccccacctccgccgccgcagcagcagcagcagcagcttacaccaccagctactactaccccttcaccgccgccgccgcaccgccaccgcccaggacgtcgccggcggcgagccccctcttccactacaaccagggaggcggcggcgtggtgttgccggcggcggaggcgatcgggcgttcgtcgtcgtcgtcggactactcgctggggaagctagtggacaacttcggggtggcgctggaggagacgttcccggcgcagccgcagcagccggcgacgacgatggcgatgacggccgtcgtcgacactacggcggtggcggcggcggcaggtggcttctgccggccgctcaagacgctggacctcttccccggcggcctcaaggaagagcagcatgacgtcgtctag

SEQ ID NO: 19448 - DNA, 291 bp, Oryza sativa
  Clone ID: PAT_MRT4530_24908C.1
atggccgcgcaggagagcgccgcggggacgacgaaccaggtgatgcggtggcggtacggggacgtcgacgacagcaacttcgcggtgcacggccgcgccgtgtacctgctggtcgggctgctcgtcgccgtcgtggtgttcgtcgccctctgcctctacctccgctgggcgtgccaccggtacacgcccgacccggaggcctcctcctcgtcgtcggcggcgggggcggcgggggccgcagcggcggcgtcgatgcacgggctcgacgccgaggcgatcgggggcctgccg

SEQ ID NO: 19449 - DNA, 183 bp, Oryza sativa
  Clone ID: PAT_MRT4530_24909C.1
atggcggctcggcgagtggagcggaggctaatggagaaggagatggaggcgcggctatggagctcgcgggatcctgtgctgttgtcgacgaagatgaggtcgaaggcgtcgtccatcaagaggagttggaaggagccgatggcatggtcggttcccttgaaccggtcaaagaagaagatgtag

SEQ ID NO: 19450 - DNA, 508 bp, Oryza sativa
  unsure (1)..(508): unsure at all n locations
  Clone ID: PAT_MRT4530_2490C.1
ttttttttttttttttttttgntggtttttttttttttttttatcactatgctcaaagannaacgatggcggggtttaaacatcctcctacatttggcatccatcagtatcactcactcaattgttcgttcggtctgccccaattacaagcctaacacaggcaatgtacctaggagaactgtacaacacgagttccctacgattcctttttaacaggaaatgggatcggcagatcaccaatgtgatgatacagagagatacatgatgctgtcgacatcagaaaaatgacagcataaagctcatcgggtagatcttccgggcagtgcacgtccaagcacattactatagtctctctgccagctacgtactaccggtctaaccatatctaccatttgggcaaaatgcaggcacaaaagccacagattacccaggctgcatgcgctttgatcagtacgtgttctgggggttgaatcgcctactggcgttacgcttgtagtagggcgtgtcg

SEQ ID NO: 19451 - DNA, 689 bp, Oryza sativa
  Clone ID: PAT_MRT4530_24910C.1
agcactgttaatacgacgattaggggcatttgttttttgtcaaacatttaccgagttttttttttcttgtaaaagaacaccctataaactgcgacaaggagtaataagtttccgggcaggagtagagaatgaagagtacatacgatacatgagctgatactgctagcagacaggagtacatttttttcatactacacatcatccagatccagttattgcaggaaggcatctcaacaccacgaacacagcattccatgcgagataggactggcacgattcaggaaggtcgtatacatcaggaggattcagggaggtcgtcacatcaggaagaagggcgagccgattccgaataagggagagttgcagactccacgcatgttgaagcctcggagacgctccaggttcatcacgtcggagtgatccacgaacagattcacccgtggcccgtatcttctgacgaaccactcggaggtgttggggttggaagcctcgaacatggtcttctcgagcccgagccggcctacaatcttggcgaccatgtctgcccgtatagagtcagcgcgctggcaaatgtcgtcggcatcgatcatgatcatgtctgcccctgcttccaagcacctctaggccctccttatcaacaggtcaacatcctcgactctttctgaattctgcttcactggaactatgta

SEQ ID NO: 19452 - DNA, 195 bp, Oryza sativa
  Clone ID: PAT_MRT4530_24911C.1
ggattgatcgatcaattatttacaccaaacagcggtgtctgacagttcatggaaattttttggttcctcaaaaacagaacatgaaccttgttaaagggtacatcaatgcttacaagcttaaaggcgttttggcggcaacggtaagtccctaccgttgctttccaacatttcagggacttatctcatggacggttg

SEQ ID NO: 19453 - DNA, 1767 bp, Oryza sativa
  Clone ID: PAT_MRT4530_24912C.1
atggccagtgccagatgtggccagaccatggcaccatcacatctcaaatcggtgtattatgggatacatttgacacttacacaaaaatctaatgagggggataatgagactatgttaactgaaaacctagaattggagaaatgtgacattccatccttgtctgacattgcaaaacagatggaagaggaagagtgtgatgaagaggatagctttcaagaggttccttacaagaagaacagacccatgaaagcagaacctgctattacttcaagaatgagcctgaggaatagagctgaacttctaaccaaaaagaagaatctggagtccacgggtaattccaacccttttgctgtttttcagttaattgatccctttgagttgaataacattgctattgctgctaatatttccttagatagtaacttagtagaaatcaataatactgtcagggttatggataagaaggagaaggaaaaggagactcatgacataccacatactgatttgagagatgtcttggaaaataaatccgaagaggttgacattgtggataacactgaacaagaggatttctcttgggcttgggaatcttcaagaggtgcatctggtgtaattctattagatactaacaatgaggtgattgagaggttggggactcatgttggtgcttttttcctgagtactgatatcaaatataggaaagacaacagtatatgggaagtaattgtggtctgtggtcctgttgtggattctttgacagatgagttcttagaagagttgagatgtgatttggcatacacaactacctttatccctggcagattcattctgaaaggttgtataatcctacatgaggttcttcatgtgttgaaaacaaaatcaaagaaagggattattatgaaaatagattttgaaaaagcttatgacagtgtgagctggaatttcttatttgaggtcctagagaagaagaactttccaaatagatggattgattggatcaaggcttgtgttatgggtgctattcttgatagtgctaagagatcatttgttcttataggccttgttcctgagattttcccaggaaggatcacctatttacaatatgctgatgacattgttatttttatttcttttgatgctaagcaagtgattgtcacaaaaattctcttatactgctttgaagagatggcagggatgaaaattaactatcataaaagtgaggttttcatagtgggtttagagagattagaaattgaagaggttgcaaagatgctcaactatcctataggtgaattttccatgaagtatcttggtttgcccattggtcctaacaaaattttaaaccaagagtttgatttccttccccagaagatggaaaaaagaccctctctttggattgggggtaacttaacctatgcaggaagagctattcatatcaatgcatgtttatcttctatcccatcctatgctgtgggtttttaccaacttcctgaagggattcatcataagtttgattcgataagaggagaaaatatattcaagaggatggtatcttccaatacattggtgacaagggtctcaattctggaaagacctggggtttatcagctaataaactttatacaacaaaatcgctctatgaggctatggcttttagagtggaaagccctatgtcgttctgaggtgactttgctgatggagacgatggctgagaagttaaaagtgacaacaactacccttggcgctcagagaaccggcgttggatga

SEQ ID NO: 19454 - DNA, 1390 bp, Oryza sativa
  Clone ID: PAT_MRT4530_24913C.1
agtcaaacatttaccgagttattttttccttgtcaaagaacaccctataaactgtgacaaggagacagaagttaccggccgggagtagagaatgaagagtacatacgatacatgagctgatactgctagcagacaggagtacatgtttctcatactacacatcatccagatccagttattgcaggaaggcatctcaacaccacgaacacagcattccatgcgagataggactggcacgattcaggaaggtcgtatacatcaggaggattcagggaggtcgtcacatcaggaagaagggcgagccgattccgaataagggagagttgcagactccacacatgttgaagcctcggagacgctcccggttcattacgttggagtgatccacgaacagattcacctaattcacaacgcaacacgttagatacacctggaaatgcctcatgaacgagtctaagcttcttgcttgcaaaatggtccgtggcccgtatcttctgacgaaccactcggaggtgttggggttggaagcctcgaacatggtcttctcgagcccgagccggcctacaatcttggcgacgatgtctgcccgtagagagtcagcgcgctggcaaatgtcgtcggcatcgatcatgatcatgtctgcccctgcttccaagcacctctcggccctccttatcaacaggtcaacatcctcgaattgcttagtacgcagagaagtagctgaattctgcttcactggaactatgtatgccccaaatgccctatctccagatggaggaatatcagaactgtcaaacttcactgaaaacaggggctttgcttgcaaaccactagtcttgatgaggcggactaatctcaggagagcttcttccgggagcttgagagatccagcattcagctcgatggtgtcaaatcctaatgccttgcactcctcgacatattgcttgaaaaaagaaggtccttgacgcagaagatgctctgcccaatctcctgtactcacatatatgtcatgcttgtgtgctaaatcagtaatctctctaaccagttcttttcccatcaaactatgagatccaccagtaaacttcaaaccatcaacaaaaggaccacttgatctacaaactgacactgatcgttgatcgcacagactgaagattccaatatggtggccctggagcgcgtggtgggcggggcggaaggcgtagaaggggctcctcatctccgtcaccccgtaccgccgcggcttctccggccggtcgtcgtccccgtcgccgaatccgcacccgcgcagcgacagcgccaccgcatcctctctccaccgccgcatcgccatcttctccggcgaacttagctctcgctctccctctcgttgtcgctgccacctgatcgagcg

SEQ ID NO: 19455 - DNA, 1047 bp, Oryza sativa
  Clone ID: PAT_MRT4530_24914C.1
atgtatatggatcacaaaagtttgaagtacattttcactcaacctgatctgaacatgcgtcaacgacggtggttagagttgatcaaggattatcatctaggtaaagcaaatgttgtagcagatgctctcagcaagaaaagctactgtaatatgtcagaaggtcgacacctaccttgggagttatgcgaggaatttgaaaagttgaacttgggaatagtcaacaaaggttttgttgccgctttagaagctcagcctactctttttgatcaagttagagaggctcaagtgaatgatcctgatatccaagaaatcaaaaagaacatgagaagaggtaaagccatcggttatatagaggatgagcaaggaactgtgtggctaggagaaagaatttgcgtgcccgataataaggagctaaaggatactatcatgaaagaagcccatgaaactttgtattccattcatcccgggagcactaagatgtatcaagacctgaagcaacaattctgttatcaagctagtcttcaaatggctccatacaaagcattgtatggtcgtaagtgtcgtacaccgctcctttgggatcaaattggtgagcgtcaagtttttgggatagatgtattgcgagaggcagaagaaaaagtgaagattatccaagaaaggttgcgagttgctcagtcgcgtcagaagagctatgcagacaatcgttgtagggatttgactttcgaagaaggggattatgtatacctacgggttacgccgctgcggggagttcatcgttttcagaccaaagagaaattggcaccgcgttttgtgggaccttttaagattttaaagaaatgtttgagtgtacctaccgaggaagcagatcctgagcgtttagagattcaagaagatttaacttatgttgagaagccagtcagaattttggagtttccgatgttccggaggagagcgtttacgttgaggaaggttcagaagtgtttgaagaagctcaaggcaagtcacacagatccgaaacaaccctttgagcatgttgaacccgtttaa

SEQ ID NO: 19456 - DNA, 275 bp, Oryza sativa
  Clone ID: PAT_MRT4530_24915C.1
tttgcacaaaacctaaaatcccaagaaaaagagaaatcgttcctacccttcttaaatgcaagatccatgccgttgctgtaaaggatgtgtttataggtaaaaagaaacggactaccagaattgaactgttcagccattccgttcttttggccctctttgcgtttacccttcgggttctcctcattaaacccacgataaatacacacagggatgttttgggtgagaccttcgctttcatctctgagtggtgttccttcctgagaaagactctcata

SEQ ID NO: 19457 - DNA, 1601 bp, Oryza sativa
  Clone ID: PAT_MRT4530_24916C.1
atgaaggcggcggcgatggaggagccgctcatcgccggcagcagtggcggcgcggcggagaagaacggcggcgaggaggaggggttggtggtgaccgagatcaagaagcagctgtacctcgccgggccgctcgtcgtcggcatgttgctgcagaacgtcgtccagatgatttccgtcatgttcgtcggccacctcggcgagctcgccctctccagcgcctccatggccacctccttcgccggcgtcaccggcttcagcttgctggcgttcggcgcgaagcagcaccacatgctcggcgtgtacaagcagcgggcgatgctggtgctcgcgctggtgagcgtcccgatcgcggcggtctgggccttcaccggcgagatcctcctcgtcgtcggccaggacccggagatcgcggcgggcgccgggagctacatccggtggatgatcccgacgctgttcgtctacgggccgctgcagtgccacgtccggttcctgcagacgcagagcgccgtcgtgccggtgatgctctttgccggcgcgacggcggcgaaccacgtgctcgtctgctggctgctcgtgcacaggctcgggctgggcgccaagggcgccgcgctcgccaacgccgtctccttcctcaccaacctctccgtgctggccatctacgtcaggctctcgccggcgtgccgccgcacctggaccggcttctccggcgaggcgttccgcgacgtcctcggcttcttgaggctcgccgtgccttctgcgctcatggtctgcttgaacacaaactctttcgccttcatggtgccacttggacttggtgctgccataagtacgcgcgtgtcgaatgagctcggagctgggcgaccgcaggcggcacgcttggcgacccgtgttgtgatgctcctggcgttcttggtaggaacttcagaaggcctcgtgatggttattgtgcgcaatctctggggatatgcgtacagcaatgaggaggaagtggcagattatatagctaagatgatgcctattcttgctgtgtccatcctgttcgatgcaattcagtgtgttctgtcaggtgttgttaggggctgtggacgacaacagattggtgctttcatcaacctaggggcttattacctggctggcatacctgtagcattctttttcgcctttgtctgccatctaggaggaatggggcatggtttggagacatattgtacagattagaggtgcagatgcttttgcttctcaccatccccttgtgcaccaactgggataaagaagcactgaaggcgaaggatagagtttgcagttcttcacttcctaaagacttggcaacatgaggttacatcaacagaagagcaaatgcatgcagttttattggatgcgaagtattacaaataaattgtttttggtacccttggcagaatcaatgaatgcctgagttttgatagtttgagttagctagcctaggtatgatttttgtaacgcgcaaaaacctatcagatcttgtattacacattctagatataacaaatattagtgtttcctcttgaccattaattttcagaacgaaaattaaatataacggcaacagcattgttcttgtc

SEQ ID NO: 19458 - DNA, 381 bp, Oryza sativa
  Clone ID: PAT_MRT4530_24917C.1
ctgacgcgcgggtcgcccacgcgtccgcccaggggtccggttctagacttgcatcacccgcatctgcgcgtccctctgcgggggcggcggcggcgacggccgccatggggctggagatggaggggatggcggcggcgaccggcgtgtctgtgcccgtgctccgactcctgctgtgcatcgcggccaccatgccgacgggcctcatgtggcgggcggagcccggcgccgcggggcggcacctttacgctgagctcaccggcgccgcgctttcctacctctggttcggggccacatccaacctcctattcggcgtgcccatggcgtgcgggtaccttgccatgcttctctgggcgcggattcgcggggcttgtaaccttcctc

SEQ ID NO: 19459 - DNA, 693 bp, Oryza sativa
  Clone ID: PAT_MRT4530_24918C.1
gatctccactgccaccatgaaggcggcggcgatggaggagccgctcatcgccggcagcagtggcggcgcggcggagaagaacggcggcgaggaggaggggttggtggtgaccgagatcaagaagcagctgtacctcgccgggccgctcgtcgtcggcatgttgctgcagaacgtcgtccagatgatttccgtcatgttcgtcggccacctcggcgagctcgccctctccagcgcctccatggccacctccttcgccggcgtcaccggcttcagcttgctggctggcatggcgagcagcctggacacgctgtgcggccaggcgttcggcgcgaagcagcaccacatgctcggcgtgtacaagcagcgggcgatgctggtgctcgcgctggtgagcgtcccgatcgcggcggtctgggccttcaccggcgagatcctcctcgtcgtcggccaggacccggagatcgcggcgggcgccgggagctacatccggtggatgatcccgacgctgttcgtctacgggccgctgcagtgccacgtccggttcctgcagacgcagagcgcccgtcgtgccgggtgatgctctccgccggcgcgacggcggcgaaccacgtgctcgtctgctggctgctcgtgccaggctcgggctggggcgccaagggcgccgcgctcgccaacgccgtctcctttctcacc

SEQ ID NO: 19460 - DNA, 337 bp, Oryza sativa
  unsure (1)..(337): unsure at all n locations
  Clone ID: PAT_MRT4530_24919C.1
ttttttttttttttttttttttttgagctgagaatttttttctgtgtttctgatttcattctggatgatttgaatgtattcagggtctaccacgttcttgatttttttttactgaactgcctatgatttccagtgaaattttgggaactatcatacatgaatgcattattcacaactcgcctttcatatactctctgaactatacaggtattgcctatcatttgcagatttaaatgaacagctactgtgatgtgagggccaaaaaaataaagatgaatataattagcttgtcatttgactgcacctactgaacccacgcgtnccngtccancgtccg

SEQ ID NO: 19461 - DNA, 668 bp, Oryza sativa
  Clone ID: PAT_MRT4530_2491C.1
tcactcacgtggcccgaccccctcgggggggtcgggcccgacggtgacatggccacccctccctctgtctccccgaggggtcgggccgctcccgtttcggccccgagggctgaggcgccccgaccccgcctcgccccgtcccgtcggaatgatgagagcctctaggcactcgtccctagacggagctggcgtgggaactcctggagttagcacgtcggtcccggctagattcataccaggtggtctgacgccggtcacgtcatcagcaaacaaccgtgcttccacgttgcacctgcttccggcggagtggaggttggtatgacccatcccatcggagggtcattcaaacagcagccattgcaaatctccgcccattaatgagggaggacagggctatcccggtgtcagataaaagtacgagccaaatcttgctcaaaatccgccagaacacaggagtagggtattacgcttctcagcggcccgaacctgtctacatcgcccgtgtcttgtgcgtttgctctctcgcgaaccattccacagatcaagggcttagaacctcacttagcgcccccggccgaaccggcaaaggggggcccgcgcggtctcccggtgaggagccccacgctccgtcatatttaataaaacttttaaattctattaatataatc

SEQ ID NO: 19462 - DNA, 579 bp, Oryza sativa
  Clone ID: PAT_MRT4530_24920C.1
atggccgccgccgtgcgcgcctactgccggcccatccccacgcgccgctacccgcctttgcctccgtctccgctgccggctgcacgagcgcgccaccggtgcccgagtgagccccgcctcccccgccggccgctcgcgctacctcctcctccgctccgccgacggtcgcccgagcaaccgccgcgccgccagcacctgagcgtcgtcctcatcgtcaccatccactcctccattgccattctcaatgccaccgtgctgccgtggtgcacgacaaggaggggggccggtggcaagcacgcgcggagaaggaggaaggggtggccggtgacgaacgcgcgcggagaggcattttgctcggcctcgtcgtctcccatgcgccaccgccaccgccactcacgcatgtgtgttgtgctagtgtgctgcttgctactggcgctcgtggcgccgtcggtagtggcggtggcgcggcatgactatggtgaaggatttagggatttttgttctgtccatggcgctactattgcggaggggcttgtttgcaaaattggtgcttgcgtggcgtgccacgtcggcggttag

SEQ ID NO: 19463 - DNA, 1173 bp, Oryza sativa
  Clone ID: PAT_MRT4530_24921C.1
atgggctcctacgctttgccacggcggtctctcgtcctcttcctcctctccgccgccgccgtcgcgtcgacggcagcatgggctgccgcttcgtcggcggccggcggtggtgatgatgccgctcgccgcagcctcctcgacaacgggctcgggcggacgccgcagatggggtggaacagttggaatcatttcgggtgcaacatcaacgagaacaccatccggagcaccgtcggaggttacatagctgctgatccaaagaagttcccttcggggattaaggcactcgcagattatgtgcacagcaaggggcttaaactaggcatatactcttcagccggctcaagaacttgcagcaaaacgatgcccggatctctgggctacgaggacatcgatgctaagacatttgcatcatggggtgtggattacttgaagtacgacaactgcaacagtgacggctcgagcgaaaccgtcagattccccaagatgtctttcgctctgagaaaaaccggacgtccgatcttctactcgatctgcgaatggggccagaggaatgtggcgacgtggggtggccagtacggcaacagctggaggaccaccggcgacatcaatgactcatgggccagcatgctgagcaacatcgacagcaacgacgcctccgccagctacgccaagcccggcggctggaacgatcctgacatgctggaggtcggcaatggagggatgacgaacgacgagtacgtcgtgcacatcagcctttgggcgattgccaaggctcctctgatcatcgggtgcgacgtgaggagtatctccagggagacgatggagatcctctccaaccctgaagtcatcgccattaaccaagatccattgggcgtccagggaaagaaagtcaggaagtacgacaacgaaatcgaggtatgggcagggccgctctcccagcagaggacggcggtgctgctgctgaaccgcggcgccacgggcagccggcagatcacggcggcgtggcaggacatcggcgtcggccccggcgtcgccgtcgaggcgaagaacgtctggctgcacgcgacggcgccggggaggttcaccggcagcctgacggcggaggtggcggcgcactcgtgcaagctcttcgtcctcacgcccgtcggccgggccagcgaggagcggagctag

SEQ ID NO: 19464 - DNA, 1308 bp, Oryza sativa
  Clone ID: PAT_MRT4530_24922C.1
atggcggccatccaggctcaccaacgcctcttcttggcatctacctgcgccggccagcggctgcggccgaggccgagccggatcgccgcgccctgccgcgcggcggtcagcggcggcgtgcgcacggcgcagagcccgtcttcgtcgtcggggagcgggagccccagtagcatgagtcttaaccttgactggatcgctgccgtcccggcgaaggaggatgtcagcggcgcggcggcggtggagctggagaagctcagggcgatcgcggaggctgcggcggacagggccgagatgcacgacatcatcgggaggcagcgggacaactggaaccacctgctgctccactccaacaactccctcctcctcgcggcgtccgtcatggccgcgctcgcgcccgccgcgcccaccgtcgtggcgctcaaggcatccgcgggggtcctcctggcctccgccgccgtcaccatggccgccgtcaacaagatccagccgtcgcagctcgccgaggagcagcggaacgccacaaggctgtggaggcagctggagcgcgacgtccgcgccacgctcgcgctcgccgcgccggtgaccagggccgacgtccacgacgccatggacagggtcctcgcgctcgacgccgcgtacccgctgcccctcctccccggcatgctcgagaagttccccaagaccgtcgagccgacccggtggtggccgaagaagaagcagcagcagcagcagcagcagcgcgctgcggtgaacaagtcgaacagcttcggcagcagcagccgccgccgcggcgcacgcggcaacggctggacgccggagctggaggaggagatgcgcggcatcctccgcgtcatcaaggccaaggacgagcaccagtacatcacggtcggcaagatggtcctcggcctcaacaagggcctcgccgtggcggggccagcgctcgccggcacggccgcggtggccgcggccttcatcggctccggcgaggccggcgcgtgggcgtccggcgccgccgtcctcggcggcgcgctggcggcggcggcgaacaccgtcgagcacggcgggcagctgggcatggtgttcgagctgctccgcaactgcgcggggttctaccggaagatgcaggaggagatcgaggcgaacctgggcgaggccgacgtggagcggagggaggacggcgaggtgttcgagacgaaggtggcgctgcagctcgggcggagcacgtcggagctgaagcagttcaggaggatggcctcgccggcggtcaaggacgacgacgtcaaggattttgccggaaaactcttctaa

SEQ ID NO: 19465 - DNA, 456 bp, Oryza sativa
  Clone ID: PAT_MRT4530_24923C.1
atggcgatggcgggcatcatcgagggaggcagctcagtggcggaaggggagctgaggacagtggtagcgggcagggacggggaaggcacctcgaagcagcggcaacaggcggggacgatggagccagctcggagtggcggagggggagccaagaacggcggtgggggggcacggctgctgttgtgcgtgctcgccgccaaagctcatgccggcctgctgcgtggagctccctatgaacatcaccgacctgtacatcgccgccgattccctttccggccatcgcctccagctagtgtcgctcgagctcctccacctccgccactcgagtcccaccgcccccagttgcactcctcctcgacggccgccaccgccacgcgctcctccccagtggtggtcgtcatcgccttccgcctcggtgccagggcgacgtcagcggtggcccagccacatccttga

SEQ ID NO: 19466 - DNA, 699 bp, Oryza sativa
  Clone ID: PAT_MRT4530_24924C.1
atggctaccaccgccgcgacgaccatggtggcggcggtgcaccacccccgcccctgcttccgcgtgcgcgccgcctgggacatgaacccgagcgcctcccccaagcccaaggccaagcccccgcctcccccgccgccgccgttgccgaccgcccccgcccccacccacgccgacctcttcgcccgccacagcaacagcgagggccaagtgccaaagaagaccacaagtatgggatttgaaaggtggtggttaccacctccgccagaggtgaagaagccccgttcgctctacaacgctgcatcattggcgtacttgggggactgcatatatgaactttatgctcggagacatttcttctttccaccactgagcatcaatgactacaacaagcgtgtaatggatgtcgtgaaatgtgaatcacaggaccttctgctgaacaaacttcttggagaagattttctaactcaagaagaaagggacatacttcgttggggaagaaatattgttagcagcaagacacgtaccagaaaacgtgctggaattgcagtttataatcgagcatcttcacttgagacactgattggatatctttacctcacaaatttcaagcgcttggagcaattgatgttccagttaggatttacaagtggtgcttcctcacatcatattgcagatgagctagtctcaggctttaagtaa

SEQ ID NO: 19467 - DNA, 987 bp, Oryza sativa
  Clone ID: PAT_MRT4530_24925C.1
atggacttccaccacggagacgccgacgacttcgccctcgagttcatccgcgagcaccttctcggcgtcgacggcgccaccgccacggccaccgagccggcggacctcgaggtcgtcgaaccggcggcggcgtacccgcctatgtcgtggcaagagcagcggcagcaggagcagcatggttgtcacgtagaactaacggacgagcacctggaatccgcacccgctgctgaggcagcggcggcgttccgaacggcgcccgcgcagccggcggccgaggtgatgatcaagttcggtggcgagccctccccggtgaggccgtcgtcgtcgctgaccatatccctgccaccgagctcgttcggcagctgggcgtccgcggcggcgccggccgcggccgccgtggaggacttccgcaagtaccgcggcgtgcgacagcggccgtgggggaagttcgcggcggagatccgcgacccgaagaggcgcgggtcgcgcgtgtggctgggcacgtacgacacccccgtggaggccgcgcgcgcgtacgaccgcgccgccttccgcatgcgcggtgccaaggccatcctcaacttccccaacgaggtcggcacccgcggcgccgaactgtgggctcctcccccgccgccacccgcgcactccgccgccgcctcgacgacgaacaagcggaagcggcagccgtcggaggaccccgacgacggcgtcgaggtgatcggagtggtaagcaaggccgtcaagaccgaggcgccgacgtccaactcgtcgtcactgtcgtcgtccctgacgtcgcgggacacgacgccggccacgtcgtcggcgggggcggagcacgccggcgcggccgccgagagttcgccggcgacgccgtcgagctggagctgggagcagtactgggaagcgctgctcggtggcctcccgccactgtcgcctctgtcgccgcacccggcgttggggttccctcagctcaccgttaactga

SEQ ID NO: 19468 - DNA, 504 bp, Oryza sativa
  Clone ID: PAT_MRT4530_24926C.1
gaagaaccgacggtaggagatctaccggatattacaagaagaagagagttgaccctgtttataaggaaaaccggacccaaaaaccttacaactgcacattttgctaaaggaaaattggcgaaaccttacacagaagacacaaaaagcttgagacaaaacgaccaaaccacaaaagtgaccaagggaagagcaagaccttcaaggcaaagcctaacaacgacagaagccgttgtcgacctccaaggaggggaacaacgacagaagccgttgtcgacgcccgcccataaactggactgggttttcacccaaagggggagggagcccacagagcaacacctccaaggaggatacggcactcacaagagtcgcaggaatcgatgtcaccgatcctggacgaccgggcggggctttggcccgagactccctccaaaggtggatttacaaggagcgagagcaaaagtgtttgtgttatcgttgcctagctcatcggctaagcctgatgca

SEQ ID NO: 19469 - DNA, 1745 bp, Oryza sativa
  Clone ID: PAT_MRT4530_24927C.1
gagaatatgtaattatataaccctgaaaatgaacaaaaagctacaatttgggaatcctagcattttcatattttcactagctagctacttcttaaaatctcgacctccccaaacaggggcatagtatcttcaagtagtacaagctcatgacaaagaggatgaactcgttaaggtttcatttttttttttgcggtactagaaaagttcaagaatctcaaatcaatttatgaaatcaaactacacacataatgttcttgactccccacgtacttacggaataattatattggcatacacaaaaaccggagctaatcagagtagatacacccatagacaagccatcagacccaacaatttttttgtccatgaaacagccagctaatgctaatagacaaggggttctcatgaaagatacagctaggccacatctagaagcacttcctgtggacgatagctgggccagattcttcatactcagcccttgagatccacatctgctggaaggtgctcagagatgcaaggattgatcctccaatccagacactgtacttcctctctggcggagcgacaaccttgatcttcatgctgcttggcgcgagcgcggtgatctccttgctcatgcggtccgcgatgccagggaacatggtggatccaccactgagaacaatgttaccatacaggtcctttctgatatcaacatcgcacttcatgatggagttgtatgtcgtctcgtggatgcctggagcttccatgccgatgagagaaggctggaacatgacctctgggcatctgaagcgctccgcgccaatggtgatcacctgtccatcgggcagctcatagctcttctcaactgatgagctgctctttgcagtctcaagctcctgctcgtagtcaagagcgacgtatgcaagcttttccttgatgtcacggacaatttcccgctcggcagaggtggtgaatgagtaacccctctcagtcaggatcttcatgagggaatcagtcagatccctaccagcaagatcaagacggagaatggcatgcggaagggcataaccttcgtagattgggactgtgtgactgacaccatctccagaatccaagacaataccagtagtacgtccactagcatagagggaaagcacggcttgaatagcgacatacatggctggaacgctgaatgtctcaaacataatttgtgtcatcttctccctgttggccttagggttaagtggagcctccgtaagaagaattggatgctcttctggtgctacacgaagctcattgtagaatgtgtggtgccaaattttctccatgtcatcccagttgcttacaattccatgctcaatggggtatttcaaggttaggatacccctcttggattgggcctcatcaccgacataagcatctttttgtcccatcccaaccataacgcctgtatgtcgcggacggccaacaatactcgggaaaacagcacggggagcatcatctccagcaaacccagccttgaccattccggttccattgtcacagacaaggggctgaatgtcctctgcgtcagccatttattttaactgatctaaagaagaggagagaaccgaaccggggatggcggctgcagcaagaaggaggcgaatggcgtgggagggaggagggggagggcgagatataggagaggtggtggcaatggcgatggtggtgggaaattgggggaatgagtgccgaagtcgcgcctcgtgccgaattcc

SEQ ID NO: 19470 - DNA, 963 bp, Oryza sativa
  Clone ID: PAT_MRT4530_24928C.1
atgtcgtcgtcttcctcattgtacaagcagctcggcctcggagccggctctcccgtctccgcctctcacctgcttctgctcgtcctcggcgccggcttcctcgcgctcaccgtcttcgtcgtccaccccaacgagttccgcatccagtctttcttctccggcggctgcggccgtcctggcacggacgccgccaccgccgccgttgctgcctcgccggtcaagaatgtcagcggcggcgcaagtgatgctgctgccgcgaccacggcggcgcggtcgccggacaacgacgtgagggtgctcatcggcatccagacgctgccgagcaagtacgagcggcgcaacctgctgcggaccatctactcgctccaggccagggagcagccgtccctcgccggcagcgtcgacgtccggttcgtcttctgcaacgtgacgtcccccgtcgacgcggtgctggtgtcgctggaggccatccgccacggcgacatcatcgtcctcgactgcgccgagaacatggacaacggcaagacgtacaccttcttctccaccgtggcgcgcgccttcaactccagcgacggcgagggctcgggctcgggctcgccgccgccgccgcggtacgactacgtgatgaaggccgacgacgacacgtacctccggctggcggcgctggtggagtccctgcgcggcgcggcgcggcgcgacgcgtactacggactccagatgccgtgcgaccgcgagaacttctacccgttcccggcgttcatgtccgggatgggcaaggccaagaaccggtacgacatgtcgccgcggatgtacaactaccggggcgcctcgccgccgagctgcttccgccgagacttcgccccggacaccatcgccgtccacatgctcaaggacgccgcccgctgggccgagacgctccgctacttcaacgccaccgccgcgctccggccatcccacctctga

SEQ ID NO: 19471 - DNA, 1280 bp, Oryza sativa
  Clone ID: PAT_MRT4530_24929C.1
atgtcgtcgtcttcctcattgtacaagcagctcggcctcggagccggctctcccgtctccgcctctcacctgcttctgctcgtcctcggcgccggcttcctcgcgctcaccgtcttcgtcgtccaccccaacgagttccgcatccagtctttcttctccggcggctgcggccgtcctggcacggacgccgccaccgccgccgttgctgcctcgccggtcaagaatgtcagcggcggcgcaagtgatgctgctgccgcgaccacggcggcgcggtcgccggacaacgacgtgagggtgctcatcggcatccagacgctgccgagcaagtacgagcggcgcaacctgctgcggaccatctactcgctccaggccagggagcagccgtccctcgccggcagcgtcgacgtccggttcgtcttctgcaacgtgacgtcccccgtcgacgcggtgctggtgtcgctggaggccatccgccacggcgacatcatcgtcctcgactgcgccgagaacatggacaacggcaagacgtacaccttcttctccaccgtggcgcgcgccttcaactccagcgacggcgagggctcgggctcgggctcgccgccgccgccgcggtacgactacgtgatgaaggccgacgacgacacgtacctccggctggcggcgctggtggagtccctgcgcggcgcggcgcggcgcgacgcgtactacggactccagatgccgtgcgaccgcgagaacttctacccgttcccgccgttcatgtccgggatggggtacgcgctgtcgtgggacctcgtccagtgggtggcgacggcggaggagagccggcgcgaccacgtcgggccggaggacatgtggacggggcggtggctcaacctcgccagcaaggccaagaaccggtacgacatgtcgccgcggatgtacaactaccggggcgcctcgccgccgagctgcttccgccgcgacttcgccccggacaccatcgccgtccacatgctcaaggacgccgcccgctgggccgagacgctccgctacttcaacgccaccgccgcgctccggccatcccacctctgaaccgtgttcttcttcttcgcgccttctctctctcgatcgttttcgtgacggattcccgttgaatttggcggttgttggttggtggcgggtagttgttgcgcgaaagcacggtggattgcccctgtgttcctagctgatttgttccaaatttctcgagtttaaaatagatatgaaatggatatttgttcgttaaaaaaaaaaaaaaa

SEQ ID NO: 19472 - DNA, 1974 bp, Oryza sativa
  unsure (1)..(1974): unsure at all n locations
  Clone ID: PAT_MRT4530_2492C.1
atgcacttctggttagtattgagtggaattcagctgatggaactactaaagattccctttaagggtgtcgtcgctgatatcgaaggccgagcagcttggtacaagcatgattggcttgagggattccactctggcttcagggtctgcatctggactgcgatcatgttgtttcttctggcaatgttcaatgcttctaatgttattagcaggtttacaagggttgcaggagaacttttcgggatgttgatcactgttctgttcctgcaacaagctattaaaggaattatagaagaattcaaggtacctggaggtgtcgaccatagttcacctatatatcgattccagtggttgtatgtcaacggcctacttggtgtaatcttttcaattgggctgttatacactgcattaaggtcaagaagggcaaggtcatgggtgtatggtcaagggtggctcagaggcttcatttctgattatggtgtcccacttatggtgattgtttggacagcattatcgtacgcattaccaaaggatgttccttcaggagttcctaggaggctgttcagtccacttccctgggagtcaagttcactgcatcactggaccatagcaaaggacctgttttctgttcccccagcatacatatttgctgccattctgccagctttgatgattgcaggactttacttctttgatcatagcgtggcttcacaattggcgcaacaaaaggagtttaacttgaagaagccctctgcttaccattatgacattttggtcctcggattcatggtcctgctttgtggtttgattggcatccctccatctaatggagtacttcctcagtccccgatgcatacaagaagccttgctgtccttaaggggcagctgctacgcaaaaagatggttcaaactgccaacgaaggcctgatgaatcgtgctagcagtttggaaatctatggcaagatgcaaggggttttcattgagatggactgtgaaaaaaatatgccactgttagtcttgtatggaaaatgttcaagtaaatcaacttataggtcaaaaattgtcctgcagactgattctgttgacaaggagttaaagagcttgaaggatgctatgctgcaagaaggtgataaagaagggacattggctgaagaatttgaccctataaaacatattgaagcacatttgcctgttcgagtgaatgagcagagactaagtaagtcggtgcaatccttattagttggtgcttgtgttggagctatgccagtcatcaagatgataccgacatcggtcctctggggttactttgcttatatggccattgacagtctacctggcaaccagttttgggaaagaataagacttatattcatcccatcaagccgacgctacaaggttttggagggtccccatgcgtctttcatggagtcagtgccttcaaaaacaattactgtcttcacgatcttccagttggtttacctcttgatatgcttcggcataacatggataccaatagcagggatcctgttcccgttgccattcttccttatgattcttatcaggcagcatgtcctcccaaagttttttgagccaaatgaccttcgggaattggatgcagctgagtatgaagagcttgaaggtgtccaccacgatcacacgctggaggatggtgcatctgattcagaaagctgtggcagccgtgacgatgccgagatattagatgagctgacaactaaccgtggagagctaaagcacagaactttcaaccaccgtgaagaaaggcacccgcaggcgcatacaaaagccgttcagcccaggtgtggagatacagaaaactggtccgagtgctaaagaatttcggcttactgtcgggtgggtatacgataggcatatatagcacttnctcatacattcctactttcctatacatcgcactgtagcaggagatcggcggccggatgatatgatatgcttggc

SEQ ID NO: 19473 - DNA, 120 bp, Oryza sativa
  Clone ID: PAT_MRT4530_24930C.1
atgacctgctcgtggcctgaaagatcttcgaggcttttaaagtcgtccaagaacaagggaatctgcggtacagctaagtgtaatcagcagaggggattgaagagaattggaggggattga

SEQ ID NO: 19474 - DNA, 1254 bp, Oryza sativa
  Clone ID: PAT_MRT4530_24931C.1
ctagaaggcagctgccctgtccttgacgacgacgtcctcgacctccctcctcatgagcttctcctcctgctgcctcctgcagaagacgacccaggcgttcacctccagcgccacgcagccgccggccagcgtggccagcgccatgcagtagcccagcttccagtaggacgcgccgagccccatcacctcgaacccctggaacacgttcaccaccccgaccaccacgcacccgtacccaaccaggtggtggtacgacttccagtacttgcggtaccggttcgtcgtcttcggccggaacagcatcgccagcgtctgcaggctccccgccgtcgccgccgcgatgcccagcccgcggtgcagcttgtacgtcacccccggcgacgccgaccccatcaccagccccagcgcgaacccggccgcgcccagggcgtaccccgtcgcctgtatcgccgcgtgcgcgtagaaccacgccggcccggtcgacgcgcacggccgcaggtaccgcgccaccgccgcgccgacggggaggaggaagccccacgacagggcgttcagtgacccgtgcgtccactgcagcgtggcggacgccgtcggcgacgcctccgtggccgtcgtcaggatgtcgacggtggcgtgcgacgcgaggtcggaggcgtcggtggggtggatggtcggcgagtagccctgcacgtagagcccgcggttccacacgaagtggagcttggtgcggttcggggagaggcggatggtggcggcgatggtcaccgtcgcgccgtcgcggacggtgcgggcggggtcgacgagggaggccgaggaggcgagcagcgggatgtccagcgggcgggacacgagcggcgacgcctggagcttgacgtcgggggagaggaggaacgggagcgcgaggagcgcgcccgtggaggggtcggagaacgcggcgagcacgcgcgcgccggtcatcgccggcgcgtccttgttgacgccccaggccacccatcccgacggcgagatgaaggagcccgtgaacgccgcgtccagcgtcgcgttgcgcgcgtcgtacgtccacgccagcgtcgcgccctgcgtcggcagcgcgatgcacttggcgtacgtcttcaacggcgtcgacgtcgtgcacctccccgccgcaccacccgccgccgccgctgccgccgctgctgctgctgcaggaaggacagcgacggcaacgagctgcagcagcgaagccagaagcgtggcgcagcgttgctgccgcat

SEQ ID NO: 19475 - DNA, 656 bp, Oryza sativa
  unsure (1)..(656): unsure at all n locations
  Clone ID: PAT_MRT4530_24932C.1
ggaagatccatttgcaccagagtgggacanccaatgcagccttacagtgagggattggnctcatgttgattgttgtaacagttggccttgtagtcncattctcaaataattgagatgggaacaagttcttcccatgtagtctcacagccagttgaggacaatgggaacaacancagtgatggatgtaacaccgcctctggcaatggtggcaataacaacggcgacaacaactgcaatggcaataatactagcagtttgaatgccaatgatggaagcaacatcggtaggaacaacaactctggtggttgtaatactagcacatcttgaatgcctctccatgatgctgccactcacttcactnacagatcatgcaagatgggctaaggcttttggatatactgactatggagttgtgtcatactaatacttttggataggttgtatttatggttctagacctcgatagagtgtgggactccaaaattagtactaagtttcttacatagtctcttggccatgcaaactccacaaagtgatacttttgtgttatgttcaaatagtgaactggaactacattatactgttatgagggatctatgtgtatcacttgatccataagttaatgaaatattgaacttgaaaaaaaaaaaaaaaaa

SEQ ID NO: 19476 - DNA, 324 bp, Oryza sativa
  Clone ID: PAT_MRT4530_24933C.1
atgccgaccgtccgcaagtcgctccccatgtgtgcactgcacgcatatctggcaacccgaggggagctcaacggcgctcagctgcggggagtggtcggcggggagagggggaccacctcggcagcgtcggcgttggtgaaccgccgtccgcctcccagcgccgcctcccacttccccgcgccgccttctgccttccacctcccgcgtcgctgcaccaccatgcgccatgcgtcggccgtcgtcggcaacaatgtgatcgacgggaaggaaggaaaggggaaaagaaggaaacataaggaagaatgggagagagaggaagaagag

SEQ ID NO: 19477 - DNA, 317 bp, Oryza sativa
  Clone ID: PAT_MRT4530_24934C.1
gctggcacgcgtgcaggtgccggtccgctatacagcggacggccttatggtggtcctttacatgccccggatgtgctggaccaccgacaggatcatgaccgcccatgaccatgcctcactccagatcaacattgcgcatgtgcttgagaatggcctgttcgatggccgctccaccacttaagctctttgtgacatgatccgtgctcagggtgtcaccgacagagctctggatagcctgtactgctggaggaccgctgacgtcatgctgtgccacatgctattactagctctacctgtgagaacttgatcacatttga

SEQ ID NO: 19478 - DNA, 2447 bp, Oryza sativa
  Clone ID: PAT_MRT4530_24935C.1
atgggtttaagagatggattctccaacaacaagctactcgacgacttcggctatggggggatccaacctaaccgaaatcatccaagcctcaagatactcgacgtatcgaaagatgtcagattatatgatgtcaaacgagtatgtaacaaggagacagttcttgcaggtcacgagaacgtcgtcaatccattactctggattcccttcaagtggttgaggtatgactacgactggtcttcgaccagcaacatagcggtcctcgcaccacgacttctaatggtcaagaatggatggttctcggttgggtcaatgtatttagctttgattaataatggctgtatcgagagaaataagataatttggaagcttaagatgccgcttaagattaagatcttcatgtggtacttgcttaagggaatttcttgcctctcgctcagatccgttcctccggcgaaaagcgacggcgactttgttgacgctgcggcctcttcccgaccgcgcagcaaagatttgaggtcaccaatggatgattcaacggatgacgattcgtatcatccaagaaaacactatgcttatgatcgtcaggtttcttcaagcagatggcgtaccagccgcgagtatatcagaggtcccggccccgaaactcatactactgagagtgctcaagatggacaggatccacctgctggagtatattcctatggttatttttctggcagtggtaatgatcctcaagttcaaggacactttgttccggagattcaaaagtacaacccttacgtgattttcaaaggtgaacaactcccggttcctatatgggaactgccagaggagaaggtccaagattttcatgataggtactttattgcaaaagacaagagtcgagttgaagccaggaagactctgaataggttgttagaggggaacatcaatacaattgaaaggggacatggatataaattcaatattccaaaatatacagataacatggagtttaatgaggaagtcaaggtttctctagcaaaagcaggcaagaccataagccgttccttttgcaatgcgaatcagcgggaagttgcatctaggactggctataccattgatctaatagaacggacacttggggctggattgaacatctcgaagagaactgtcttatacacaaacaaggatctgtttggggatcaaagtaaatcagatcaagcgatcaatgacatctgcgctttgacaaatatcagaaggggctctttgggtataatagcagctgaaaaaggaattgtagttggaaacattttcctggaattgacaaatggcaaatcgattagttgttctattggagtgcagataccacacaggcttgaccagatcaaagatgtttgtgttgaaataggttcacgcaacatagagtatattcttgttgtggaaaagcatacaatgttgaattatctactagagatggactatcacaccaataacaactgtataattctgacaggatgtggcatgccaaccctccaaacaagggatttcctcagattcttgaaacaacgcactggactacctgtctttggactttgtgatccagatcctgaaggtataagtattcttgctacgtatgctagagggtcttgcaattcagcatatgacaatttcaatatttccgtgccatctatttgttgggttggattgtcatcctcagacatgataaagttgaatttgtctgagaccaactactcacgtttgtctcgcgaggacaaaactatgttgaagaacctttggcaggacgatttgtccgatgtatggaaacgcagaatcgaagaaatgataagttttgacaagaaggcctcttttgaagctattcatagtttggggtttgattattttgcaaccaatttgcttccggatatgattaacaaagtacgagaaggctatgttcaggttcaagagaaaaaagagcctcaagacactgaagccagtgaggactgatttggaggactctaatgcagctagagattcagatccataagtttctacaagtaaaagttggagcagcagattggaactgcatgttgatttttgtggatgctcaagcttcactcgtatgtttggcttctgataagtctgtaatagcttagcagcacaattattatagttgtcttctaggtgatcgatctcctaaatacttgcaccactattattgtagttgtcttttatgtgatcgatctcctaagtacctttctgtctgtaatagtttagcaacaccattattatagtactagttatcgtctaggtgatcgatctctcctaagtgcttgcactattgttactgaagttgtcttctagcactattggtactgcagttgttttttcgctgatcgaacttctaagtgcggtattattgttaagagtaaattgcaacttgtgcccaaaaaaaaaaaaaaaaaaaa

SEQ ID NO: 19479 - DNA, 337 bp, Oryza sativa
  Clone ID: PAT_MRT4530_24936C.1
atacaaatatatatatgagtcaaatggagtgttattcaaatgcatatatcaatcaaatgaatcgtttcatgctgtttgcacattcgcacacaatcaatggaagctttagctagacaaaacatatatattttcaagttggccggtttcatggctaggctgccgggaaggtggcgtaagggttgtcggcaaagggcagcagcttgtcgttgccaggccgagacaacacaatctggtagtttccaagtgtacgtgacttgaacccagctgcgcagtatatgaaatagtactcccatatgcggatgaacttgtcatcgaatcccagggactttatctcttc

SEQ ID NO: 19480 - DNA, 396 bp, Oryza sativa
  unsure (1)..(396): unsure at all n locations
  Clone ID: PAT_MRT4530_24937C.1
ttgttttttttttttttttttttttttttttttttttttttttttgagccaaaatgccaaacgggaattaccaaccatatcgataccacgggaataaaaccaatctttttttgattaacggacaaaaagaaagaaaaatttaaacttaaaaaaaaacctttacaaaatagctagactatcaccactggggccactagatgaactttataaaaaaaaggaggcagagcttttgcctttgtttcaacaaaggggggtgcaaatatgagcaaattgcatgtccaacattttaagccctatacctgggagtggggcccatctggacacaaaggggggcttgaggncaattaaataaaaaaagggaaatgttcctagaaaggacagatttacttccattag

SEQ ID NO: 19481 - DNA, 1859 bp, Oryza sativa
  Clone ID: PAT_MRT4530_24938C.1
gccactcgagagctttctctttctgtgtgtagtgtgtgcaactaggaggcttgttccatactagtttgctaggtcatggaaaagagcgagattttcgtaggagcacactcatatgcagctatatgtgcttttacactcatcataggatggttagctcactgggtatacagatggataaatcctccatgcaatgggaggcttcctccgggctcaatgggcttccctattgttggtgagaccttccaatttttcagaacaagtccatcaatagacatgccaatttactacaagcgaagactggagaggtatggacctatattcaaaactaacataggaggccagcacgtggtcatatcccttgatcccgaggtgaaccagttcatatttcaacaagaggggaagttgttccaatcctggtttccagaaaccacactaaacatctttggaaagaagacactcaccacgtataatagaactgctcacaagttgatccggagcttcgtatgcaagctctatggccctgaaaacgtgaaaaaatcactcctgccagaactagagaactccatgagggaaagcttggcgtcatggataggaaaacctagtgtcgaggtgaatgatggcgtgtcaaatatgatcttcggcctagctgccaaacatttgattggcctcgacatcaccaattcaggagaattgaaaaagaactttcaggaaatatttcaagtgatggtttccatcccattcccaatatattttccagggacctcgttttaccgatgcatgcagggtaggagaaatgtatggaccacactaacaaatgtaatgaaaaagaggctaagtgcacctggaaacaaattcggcgaccttgtcgatctgatagttgaagagctacggagtgaaaatccaacaattgatgaaagttttgctatagacactctatctgggctcttgtttgctagctttgcaccgctatcgtgcaccttgactacaacttttaagttcctcaacgacaatcctgaagtttttgacaagctcaaggaggagcacgaaatgatactgaagaaacgagagggtgcgaattctgggttcacatgggaggaatacaagtccttgaaattcagtactcaggttgtgaatgaaattaatcgaatcactacggttatacctggtggtttcaggaaagcactaacagacgtgcaagtaaacggatatacaattccgtctgggtggctagtcatgattagccccatgggagtgcatctaaacccaaaattgttcgaggatccactcaaatttgatccatggagatggacggaggagaagagaatctcgatgcaaaggaatttcatgccatttggaggaggaatcaggatgtgtcctgcggcagagtttaacaagctttttatcacactctttctccacatcgtggtgaccgagtatagatggaaggatatcgacggagggaatgtaaagcgtatctccgaggttttggtcgctcaagagtatcatattcaactagttcctcagacgtaacatacctatgggatattcatctataaaaaaccaagtgtcaatggatcctacggagctattcgtacatgtacttcaatattttcatcatatggtcctcttatgtgtgtgtgtgtgcaagtttgaatttccatatattgttccatacttccattaaagtctcatatgattttcctcgaatttgatgaactagccgccaaaccgtgcattgtatcacttttcatatattgttataatatcattaatgtattggttatctaaaaaaaaaaaaaaaaaaaaaaaaaaaaaaaaaaaaaaaaaaaaaaaaaaaaaaaaaaaaaaaaaaaaaaaaa

SEQ ID NO: 19482 - DNA, 126 bp, Oryza sativa
  Clone ID: PAT_MRT4530_24939C.1
atgccgaattcaacgaaagaagaacagtttgtgatcgagagggcacacgagtgcgtgcgtgctggggttgaagcaaatgagggggacaagatgatggcagacgacaaccagccacagccagcctaa

SEQ ID NO: 19483 - DNA, 297 bp, Oryza sativa
  Clone ID: PAT_MRT4530_2493C.1
gaaaggaaactcacccgttttattacttgttccattaaacccataacactaaggtacggggtgaaacccggaaagttaaaaaacaaaaactgcattagaagagtgaggccctgcttgctgttccatgagaggtgcacaaaaacccagcgcacgagcagggcatccaggccacacgcaagatggaaacggatgggatgccgacgccgccgacggtcgatcctccgcccggtgatgattgcggcgaagacatcgttcagagtgcacgcagaggcggagcggcgtgcgtcgcggctcggt

SEQ ID NO: 19484 - DNA, 197 bp, Oryza sativa
  Clone ID: PAT_MRT4530_24940C.1
atatgaaatactactcatcacctgttctttattgctcatcacatgataatgacacaccgtggcaagaacaagtataggacgcgaccataatcattgtaaacgatggataaatgaataatatagaatatagcaatggggaagattatttattatttagacaatatgagatattaataaataaccaagtgggaagggaa

SEQ ID NO: 19485 - DNA, 1110 bp, Oryza sativa
  Clone ID: PAT_MRT4530_24941C.1
atgccgccaccgccgccggcgacgtcgccggcgccggcagccattcggctgggagccccgcacccgtacctgagaacccacgggaccaaggtcgcgaggctgcacctgctcgactggatcgtgctggccctcctcgtcgccatcgacgccggcctcaacctgatcgagccgttccaccggttcgtcggagaagacatgatgatcagcctccggtacccgctcaagcgcaacaccgtccccatctgggccgtccccgtacgcctccatctccctccatttcttgatttcagaaagaaaaaaactgtgccggataggcttctgttttctgtgctgatcactgccgtcctgaccgacgcgatcaaggatggcgttggccggcctcgcccgaatttcttctggcgatgctttcctgacgggatcccgaagtacaacaacatcaccagaggtgtcatctgccatggggataaaagtgtcatcaaagaagggcacaagagcttcccaagtggccatacctcatggtcttttgccggattaggcttcctgtcatggtacctggccggcaagatcaaggcgttcgacagaggagggcatgtggccaagctctgcattgtcgtcttgcctctgcttattgcagcgatggttggggtctcaagggtggatgactactggcaccattggcaggacgtgtttaccggtggaattcttggattggtggttgcttccttctgctaccttcagttcttcccaccacctgctggtgaacaaggcggcggcgagcacgatcttcatggacctcgaggctgggcgtccaccgaagccgagctcaccgatggcggtgcgctggcggcggaggaaggagttgaggtgcgagatgccattgtcgaacctgtcaatggcggttggggaggaggaagaggcaaagatgtggcggcagtggtgagggtttgcggcggaggattttggcctcatgcatactttgagcacattcttcacccagaagttgagaaccaggtgcagctaacagctacttcaaatcatcatcaaggcctggacatgagaaccaacaaccagtcattagattccatggaagaaggccgaagagctcggtga

SEQ ID NO: 19486 - DNA, 336 bp, Oryza sativa
  Clone ID: PAT_MRT4530_24942C.1
atggcggttgagatggggcagatcgtgcgcgcattaactacgctcgctaaccaccggtcagatcgcgggttaggtggcaacaggcggcctgtcacacgcctcgccccgtcccgtcggaatgatgagagcttcctggctctcgtccctagccggagccggcgtgctaactcctggagttggttgaaatgggcgtccaccgggaaagcgggcgagcggggcaggaggcgtgtgctctgcttgtcagagctagaggcccatgtggtgacccctgaccagataaaaaggaggcccaggcctaggagaaagggggttgggactctggggaaggggttctag

SEQ ID NO: 19487 - DNA, 344 bp, Oryza sativa
  Clone ID: PAT_MRT4530_24943C.1
ggggaatgcaatttcattctttttatttaattaatttaatttttttcgtacttcactaaaatgtgtgttcaatgaggtgccgggcaccagggttaaacaagaaacatgcgggggggggaaaaaacccggggccccactaagagcacaccaccagggccaaaaaaaacggggggggaaaagctaacccatcactaaaaaagggggaaacggcggctgggaaggttctcacccctttacaggccggggagagggaaaaaccaattaccacccttccttaaaaggggttggaaaggccccccacccggggggggacccggaaaagggggacccattcccgggaagcg

SEQ ID NO: 19488 - DNA, 435 bp, Oryza sativa
  Clone ID: PAT_MRT4530_24944C.1
atggccgacggcggcgaagtactgtccacggcggcgacggtgtttcggcgacgagcagcagcaacggaggggtggacgagcttctcctcgcagctgcgaatccaatggaagcgacggcgaccaaaggcgaccatagacgacaacgaacggcgcggctggagatcggaacatgacggcaacccactggttcatggtgagattgacttccggcgaggtttcggcgcaaggggaacggcggccggggtagctctcacccttgcgaagccgagggaggtgacggggctgaccggcgacggccgaggcgacggcgcacggcggctggagaggcgaccggaggtggagagagagggagctcgcggggaggcggctagggctagggaaaaactcgggaaaaagagggaacggaagaggaggtcttgggactgctatttatag

SEQ ID NO: 19489 - DNA, 441 bp, Oryza sativa
  Clone ID: PAT_MRT4530_24945C.1
atgaggacttccgggttcccgtttgcaccaggaaacgggaacccggggcgggggtacacagtcgccgtcccatcggtcattcgaccgatcacagaccagtcagatgcgcagcacgccgcattaaatgcggcatggcgcggctgcatggaccgctttaaatgcagtaagcccgaccccaagctgggagggggcggccgccgctccaccccgggctcgacccccctcggggggagccacgtgggtttggggacggcccgaccccaagctgtgagggggcagctgccgctgcggcccaggctcgacccccctcggagggagccacatggggagagatatagcgttgtctctgatctcgccggatgtggattcgaggaggaaggctaccctgttatcgactacgagttagaccttcagaccgccatgtcgacaacagttagatag

SEQ ID NO: 19490 - DNA, 550 bp, Oryza sativa
  Clone ID: PAT_MRT4530_24946C.1
ttactttaaactcagttgtcggtgatatgggcccgggggtatcacgttgagagggaggaggccgcccccaatcccacgtggcaccccccgaggggggtcgagcccggggtggagcggcagctgccccctcccagcttggggttgggccgccccgaaccccatgtggctcccctcgaggggggtcgagcctgggccgcagcggcagctgccccctcatagcttggggtcgggccgttcccgaacccacgtggctccccccgaggggggtcgagcctggggtggagcggcggctgccccctcccagcttggggtcgggctgccccgaccccctccacgtatcagcccacgtgtacagggttaggtgggcgtgcctaacgcccaccttgctacatttaaagcggtccatgcagccgcgccaagctgcatttaatgcggcgtgctgcgcatcagaccggtctgtgactggtcgaatgaccgatgggactacgactgtatacccctgccctgtcagtgtgtcaagcggcgtgcggcgtgctccgtcccatcccat

SEQ ID NO: 19491 - DNA, 408 bp, Oryza sativa
  unsure (1)..(408): unsure at all n locations
  Clone ID: PAT_MRT4530_24947C.1
ttttgttttttttttttttttttttttttttttttttttttttttttttttttttttaaaaagaaaggccccccgcaaaaaaggttgccccctttgacctgaaaatacggccccgcaatgaatcggggacccccccccgggggcagcccgctgccttagggggggaaagatttagcacttcatgacccgatagaaacggcagaggggtgggccccccttagacccgacaaaggggccaaggggacccctgcaagggacccggggggcccaaataaccancncctctaacttggcccccattgcccttttaaaattaaaggcggggcccactccatagcacaaatttcatctgggggcaggccccgaaaagaaccatgtggggtttatttttggggccccccaaggggg

SEQ ID NO: 19492 - DNA, 675 bp, Oryza sativa
  unsure (1)..(675): unsure at all n locations
  Clone ID: PAT_MRT4530_24948C.1
tttttttttttttttttaacataaggatgtagactgtagttaacatagttctctgtcaaatttgtaatcccatttatctctgtcaaaattgtaatcccatttgactgaacaccgatgtggcagccactcgtgattcagttgcccacaaataacttgcggcgcgataaaaaatatgaagaaaaactgtttggctgctactgctttcagaataatgggcgatacagctatgatcctaagctacatgcttatacattgagaataaggaaaacttgagaactcaagattcttgacgttgtctctgccggttcagtgcgatgtatacatggttccttctctgtttggtcccgatgtagttgatgctaaaagaaaccacaaaaccagtatgacttaagaagcaaatgaagcgattgcgtccatttcataacgcaggaggagcgcatcaatgaagatatccaagctctccccctccataacatcttctatggagtggtgcgtgatcccaacacgatgatcggtaacacgcccttgtggaaagttgtatgttcggatacgttcggacctgtcaccgcttncaattctgctctggatcgangctttgaccggnccatatggagtcgatgncttttcaatttcatatagtcttgctcgggagaaacttttgnagggctttgggcc

SEQ ID NO: 19493 - DNA, 375 bp, Oryza sativa
  Clone ID: PAT_MRT4530_24949C.1
ctagccgtcgccgttgcccatagcaccgccgccgcgttgaactagtcgccgccgccgccgatgccgttccagccgcgccgcgccgccgctgtagccgtcgccgccgcttcccattgccgccgtcgggtgcgtgcggaggaggagtaccccggcaaccccttcgccgccgtcgcaagccgccagagcgccgtcgccaccgtcgagccgagccgcgccgtcctcggtcctcgtcgccggccgttgttcgtcgtcgtccgtcgttgttctttgcaccggagagcgttttcgttgaggaaggttcagaagcgtttgaagaagctcaaggcaagtcacatggatcccaaacaaccttttgagcatgttgaacctgtttaa

SEQ ID NO: 19494 - DNA, 181 bp, Oryza sativa
  Clone ID: PAT_MRT4530_2494C.1
atgaggactggccgaagggaccgcctgttgacggccaaaattcacagtgagcaacagaagaggaggccacctgccgagtttgggcaggtcggcccagcccatggtgggttcggcggaacactcctcagcgccatccgatccagggcttcgcttagacgatgtggattaggccccaatgacg

SEQ ID NO: 19495 - DNA, 600 bp, Oryza sativa
  Clone ID: PAT_MRT4530_24950C.1
accttgggttttattgattttcccccccattgcgttgccaagatgcctgccaagcttgaggactgggatgatgagctcgatggtgagtgggaggccccccaaatccccaacctgagtacaagggagagtggagagctaagcaaatccccaaccctgcctacaagggcgagtgggtccacccattggtcgacaaccccgagttcttcgaggacgacaagttatacctcttcaaggacaacgcctaccttggtttcgagttatggcaagtgaaggctggtaccatcttcgataacatcctcgtcaccgactctgttcaagaggccaaggacttcgccacgagacattcgagaagaccatcaagggtgagaaggcagccaaggaggccgacgacaagaagcaagaggaagagagaaagaaggctgaggaggccgccgccgagaaggataccgaggaggatgaggaggagtctgagcccaaggacaaggacgagctctaaatcattttgttacactaatatattatacttatacaactcacacaaaacacagaaacactgcccaataaaaaatcaaaaatatataatgtaaaaaaaaaaaaaaa

SEQ ID NO: 19496 - DNA, 1078 bp, Oryza sativa
  Clone ID: PAT_MRT4530_24951C.1
ctaacaccggactagtcgccgctaagcgtgaccgaccgccgctaaaccaataaaggaatacagacgagatcgcgcttcggctaggtgatgccaaaacaacatcttcaagaagagaagcgacggaaaaccgccgccgccgtccgtcggagcttaaaggagccaagacagggctttcacccaacaaccacccttgaagaatgagacagcacccacagccaccacgccgtcggccacggtcgcccgtgtctccgccgctgacgccagcgcccgcgccttcgctgccgacgctgtgcctccacggctgccacggccgcccgctgtcgccggcaccccgcgcctttgctaccgacccgtcacctacgtctcgcctccgacgccgcgcccgtgtctccacggcccagatccggcggcggcgtcggcggatccagccgcgagggtgctagatccggcggtggcggcgctagattcgttgccacaacgcctcgccaccgcgcggccttcctggcgttccgcgccgccccttcgcgcagagacagccgcgccgccgaggagacgtcggcggcggtggcggcctcggcggttggggcctcccccgaggccggctcggcttcctcgccgccgccggattcttccggggcggcggcggcggcggcagatggctcctcggaggacgcttcggatgggccgctcgccgcctcctccgcctcggcgtcgggggcgcccgccggggcctcctcctccccctccgcctcctcgctcgcgccgggcgcagacgccggccagcagcagccgccgccgatttcgcagcagccgcctccgttgcaggcgccaccgccgccgccgcagcagcaacagcagcagcagcagctgcaggcgcccccttcgctcccgccgccgcctccgcagcggcagccggagaaggtgcacatcccgggcgtcgcggctgtcccccccgcccccgttcccgaccggcccaacccggtccacctcccttgcaactgtcaactgtttactgcttataacatcggtggattttacctgcttgtctccaaggatctgttgtagcattaattgagat

SEQ ID NO: 19497 - DNA, 2449 bp, Oryza sativa
  Clone ID: PAT_MRT4530_24952C.1
atggatcccgacggcgacggctcgttccaccgcaacgaggccatctccgccgtccaggacgtcgaccagtactatggcgacgacgacgactacgacgacctctacaacgacgtcaacgtcggggacggcttcctccagtcgtctcacccgccgccccagcccccgcccccgccgcagcagcagcagcagccgccgccgatttcgcagcagccgcctccgttgcaggcgccaccgccgccgccgcagcagcaacagcagcagcagcagctgcaggcgcccccttcgctcccgccgccgcctccgcagcggcagccggagaaggtgcacatcccgggcgtcgcggctgtcccccccgcccccgttcccgaccggcccaacccggtccacctcccgccgcagccgcagccaccggtggccgccgcgcctccgccgcctccgcataaccagatccagccgggaggaggcgacggcttccaccgccagggtgggggaaactacggtgggggcccgattgtggtcggcaacggcgggggtggtgatggccccggtggtacgaccctcttcgtaggggagctccactggtggaccacggacgccgatctagaggcagagctaagcaagtacgggcaggtcaaggaggtgagattcttcgacgagaaggcgagcggcaagtccaagggatactgccaggttgatttctatgaccctggcgctgctgcctcttgcaaagagggcatgaacggccacttgttcaatggacgcccctgtgtcgtggccttcgcctcgcctcacaccgtgcgccgcatgggtgaagctcaggtgaagaaccaacaatcgatggctcagcaaaactcgggtgtgcagaagggtggtagaggtggtggtgcagctggaggtccgggtggagctcaggtgggtgggaattatggtggtggtcgtggaggcggaggaggtggaccgggtggtggcggaggtggaggcggcggtggaaattggggaaggggtggcgggggtatggggggtagaggccaagctgggaatatgaggaatcggatgggtccggttggtggacgtggattaatggggaacggagggatggtagctccaccaccacctatgcttcatcctggaggcatgttagggcagggttttgatccaactggctatggtgcagcaatggggaggatgggtggtgggtttggtggcttccctggaggacctggggctgctccattcccaggcttaatgcagccattcccacctgttgttgcacctcatgtaaacccagcgttctttggaaaagaaggtggtatgggtgctggtggggtcgggatgtggccagacccgagcatgggtggttggggtggggaagagcaatcaagctatggcgacgatgcagcatcagatcaccaatatggtgaaggtgggagccatggtaagaagaggccaccagagagggaatggtcaggggcatctgataggaggcgggagagggagaaagatttgcctcctccaccagactggccagagaggaggcaccgtgatgaacgggacgcaggtcgggagagggagagggagagagacagggacagggaaagggaaagagaccgagacagggaacgggaaagggaaagagatcgagacagggagagggaacggtaccgggatgatagagatcgccatggcgattatcataggcacgggaagcgtgagtcggatcgtaatgaagactgggataggggaagatcatctgggaggcgtagcagatcaagggaggttgaccactcaaagcggcggcggatgtcgcctgagtaatgtatctggatgggctatgtttagtgtaggggtatcggcaattcgcggcggcatcttttttgcacatgccttttggttagcgaatcagcttgcaactgtcaactgtttactgcttataacatcggtggattttacctgcttgtctccaaggatctgttgtagcattaattgagattaataaaagcagttggaataacaagatgtagctgcggctgtgacttcaacttcctgccttcctctaattcaagatgtagctgctgcctgcccacccctaccattaaccataatatagtgctcaagtagcttactgccagaaaaactgtcaaatgtattgtgattcccctaagtagctttctgcttaatttcttttctagtggggataaaagaactctgtactattactttgtattaggacgatcctctggtctgtgttgtgagttgtaagttgtaactcgtgacttggcttttactcacttttcccttctgctgatggcggacagaggactcgacagtcaacattcctgtggctcagtccttcactgaaggtagcttgggagtgtctgattttgccttggttttatatgttttgcttgtattagctaatcatgagtgccctttctgatctgaacgaaga

SEQ ID NO: 19498 - DNA, 2116 bp, Oryza sativa
  Clone ID: PAT_MRT4530_24953C.1
gccttatcacggccgggcgacgagagcaacagccaccgatcgtcggagtccgtacatggatcgggacggttagcgcgcccggccggccacgcctcataggaagcttaatgctctctttccagttgcaggatcgaacacaccgatcaagtgcggcgagcacgtagcctctccgagtgatggcacgcgctcccgcgctcgccggcgtcgtcctcctcctcgccgtcctcctcgcgatggcgtgcgccgtgcacgcggcgtcgtcccagcccccttccccggccgcctctcccgagtcgtccgaggccgagtcaccggagtctgaagagtccgagtgggctgcggagggcccggggatgctgtctgaagcctccgaggagcttggcttgggggccgggccgctcaagacgatgggcatggacatggacatgctcgacgacgacgacgacggtgctgctccgtccaagagcccggctgccacggcacctgcaggcgcagccgccgcgccggcggaggagggagacgaagaggaagacgcgagcaccgcgtcgccggcgtctgcgcccggcgcgagcgaggaggcggagggggaggaggaggccccggcgggcgcccccgacgccgaggcggaggaggcggcgagcggcccatccgaagcgtcctccgaggagccatctgccgccgccgccgccgccccggaagaatccggcggcggcgaggaagccgagccggcctcgggggaggccccaaccgccgaggccgccaccgccgccgacgtctccccggccgcggtcaccgtctccgagggccccgcggaaggtcccggcccctcggccgccgacgaggaggaggacgagagcggcgcgagcgccacgacgcagcgtggcagcctcgccgccaccgccgtgctcctcgtcggcgccgccgtctttgccctgtaagatcgacgtggccggctggcgaatcgacggtggagcagcctccggtcgccaccactcttccctcctctcccccgcctcgccaccgccgaagcgcgtcggcggaaaccgcgcggcccgccgggatggcgtcggcgaggctcctaccctcggcggcgcggctgtctctgcgcgaaggggcggcgcggaacgccaggaaggccgcgcggtggcgaggcgttgtggcaacgaatctagcgccgccaccgccggatctagcaccctcgcggctggatccgccgacgccgccgccggatctgggccgtggagacacgggcgcggcgtcggaggcgagacgtaggtgacggcgacggcggcgaggcgcggcgtggcagccgcggaggcacgacatcggcagcgaaggcatgggcgccggcgacagcggacggccgtggaagccgtggaggcacggcgtcggtagcaaaggcgcggggtgccggcgacagcgggcggccgtggcagccgtggaggcacagcgtcggcagcgaaggcgcgggcgctggcgtcagcggcggagacacgggcgaccgtggccgacggcgtggtggctgtggctagctggcagggccagcgccggtggtaactatggccgtggcctgaggtggcagcggcggtggctggcggtgcggaggcagatgggagaaggcatggcggcctcggacgtctagccgagggcatggcagacggttgcatctggccggcgaggcagcgtttggaggaggggtcagagaccggcttggcgcagagaggcgcagccgatggagggaggccagattggcacgagaggcgcgtacagtgaaggaggccgacttggcgcgagaggcgcggccagcgatagaggaggtgaccccggtgcgaggaggagctgccgatggatgtgcgcggtcttcggcgcacgaaggctagccggcggggggcgccggtgcagtggtcccacatgtcggcaaatgttgagcggtggtggagcatcggtacgtcagtcgcggatctcattcttcaagggtggttgttgggtgaaagccctgtcttggctcctttaagctccgacggacggcggcggcggttttccgtcgcttctcttcttgaagatgttgttttggcatcttcttttgggcgatctcgtctgtattcctttattggtt

SEQ ID NO: 19499 - DNA, 322 bp, Oryza sativa
  Clone ID: PAT_MRT4530_24954C.1
cgcgcgcgcgagcgtggggactctttagcgggcgcgctctttttttttggtttttgcgaggatccggtgcatagttgacgtgattaccggaggagacctatatagtatagtacagacgtacagagagataacacctaacataacttaattgctgataataggaactatatgctgtcttgcctttgacgctgggcataagaggctaaacaccgaaagagagctgcatactattggttcaccttggattgaagtcacggtcactaaattacagattacaatcattaccgacgaagtagtaatagaaccaaagctgtagtattat

SEQ ID NO: 19500 - DNA, 400 bp, Oryza sativa
  Clone ID: PAT_MRT4530_24955C.1
ccccacctggggcgatgtcccaccagcctcctccgatcccaattcggggggcctcctggggcgatgtcccagccagcgccgcgcagttcggtgctcctggggggatacctcaagcggcgccgccgcagttatggtgcgccgtggccggcattctccgggccgactgcggcagcaggtctagcgtcgtcccaagctatggcgtcgagtttcgggtctcaacagcagcagccgttcggtggggcaccccagtttgggcttccgcggtcccggtgcgcagccaccctttcctgcacaatcggcgccactgtcgcagcaggcgccgtacatgggaccgccgaggggtagcgcccctgcgtttggagctgcgccgtggcagtctcagggatctgggtctggtgct

SEQ ID NO: 19501 - DNA, 808 bp, Oryza sativa
  Clone ID: PAT_MRT4530_24956C.1
ctgagatattatatgaaggacagtgaggtgactcttggaagagagacagaagacataaaagttgatgttgatttgggaaaagaagggagggcaaacaaaatatctcgtagacaggcggttatcaagatggatgaagctggttcttttcatatcaaaaacattgggaaatgttcaatttttgttaatagcaaggaagtaccaagctgcagacgcatcatcttaagttcagattcgttaattgagataaaggatatgaggttcattcttcatgtaaaccaggatgctgtaacgcaattcgtcacacgcaccccgaagccggagcactagatcctaactggttttgttcagcaaccccttatgagaagctcaatgccacattgtcactggtaactagtggagatcattgagtgagcagcgctcacagggtgggctcgttgtgctgctctactccttttcaagtaggatgtgataccaccatggaagctcatctcgctccgtgtgcctagattgtaaatgtgtaacatgtagtgtcaagtagtctctcttatgctcggttcatgaagcatgaatccttcatgtccagtagctaagctagcacatttggtctgcagcctcagcctgcagcaacaaaagcttctccgtagtatttattcattctttcctgtcatgtaaattgtagatggctgccgaccagtggggttggaaatgtaaaaaagtgtggtggttctatcatctatgctactacagcaagaggatgcaccttggcaagaaaccattgggttctttagccaaaaaaaaaaaaaaaaaa

SEQ ID NO: 19502 - DNA, 441 bp, Oryza sativa
  Clone ID: PAT_MRT4530_24957C.1
atggcaatatggggtcttcatggcgagtttctcccgaaagcacaacgcgatgagttctccttcaaagatatgatccgatatgagtgcccgatgatgataccagtcttgctcggggacgccaggctccactatggcgatgcagacatcctcatgacgacgaggcggacattgagggacggtaagatcaacacacagcacgcgcaagttaccaccgtgatgaaccacttgcccttgacgaagaaaatgttgcggattgatgggctgcagcgggcctgggggctgaacagtaacggtccatatgaccagactccaaacaagaaaagcaccgaagacaatggatttgaatttaaacaacgcgcagaaataggatcaccctccttgattggctccaccggcctggtcgctggagcatcatcggagctagggttctccaacccctaa

SEQ ID NO: 19503 - DNA, 1496 bp, Oryza sativa
  Clone ID: PAT_MRT4530_24958C.1
ggcccgcttttttttttttttttttatccacacatccaactcgaaagctatatctgccccaaagcagatgggaaatcgacagcgaaaagcatgagccctggagctcacccacacatatggtagtacaaaaacagatgccactgctcactcctcacttcatgaacaatgtactatcactagtatactactatatcactatgagactggggttacaggtacactgggattaatttaattagtatagaacaccatcaatccatcctaagggattattattgcaggttgtacatcttaagtacagctgagagcttggatgagatcaaaatggcgcttggccttctaggccttgttgctgctgtaagcggtcagatcggcatgcgtatccttgtaccgctgcgataggtatgccgagcaagtgatcggagggaactttggaggatttgattcagatttgcaggttggcaggcactcgactacgcaatcgtggcttggttccacaaagaacgcaatagaatgacgttctcgtccatctaagaccactcgatgtaaggttgacctgaaaatacagttactccaccgttcgagcatatcgccaagattgacaataaaacctccttttacaggagctacatattcccatacttgaggctgagcattcctgtccttgcatatttggagaccaactacatcatcggttgccagtagagtgattaggccataatcagaatgggcacctgctccaaaaactccctctgcaggatttgatactttacctgttttttgtccaccttcataatgcaggagccttaatgtggctatgggctcgccaagcatttctggtttatcaaagaagtcctcttctaggtttagagcaagggcaataatccttgcaattgattttgccaccctcagggcctcgctatgatactgttccatcaccttcctccatcttggcaatacttcatcggatggccactgatttggaccatagaatggtctgtttgcttgtggatcatcttctggtatctcaatacctatataatacccttccttgtagtcaccattcacttgattttctggatcaagaatctcatctagcatgggtgtatagcctcgattcttctcatcccggagaagctccattttctcattgatgggaaggtcaaagaatttcttgctctgggcaaaaacatcatccattaactcctggcttattccatgatccaccacatagaagaagcctgaatccagacatgcctgcttgaggagcgcgaccgatttcttggtgtccgggtcacccaggctgatgcaattcagattcgtcctcgagatggagcactccatgctctccctccctcaccttggattccctctcctctgcttccttcctgcttcgctcctgctgctcctctgggtttcttcctcctcgcacacgcagctgcgtgtcggcgtggcgtctccggatgaggagaggagaggagaggcggacgcgtggg

SEQ ID NO: 19504 - DNA, 2041 bp, Oryza sativa
  Clone ID: PAT_MRT4530_24959C.1
ttttttttctgctgcgctttcggttcttttttttttttttttttggcatccatgggtaaacatcaggttaatgtgaaatgaggtgtgatggttacagttgccagtgccaggaggtgtcttgcggcaatttccagttcatgtcacataatcaatgtatgttcctttcctatgcacggttgtctctcacacacacggcagatttcttccaccggtttacaactcgaaccaaggatcacaatattactttccaatgctaaattagcccaaaaaccgcgagcaattcggctcaaagatacttacacaggttaatggcctcttgctcctcgctcacagatagtctttttcagcagctgcacttctggttgtacaatatattgatgagtgtggtgcaccttgctaggaggctaggagtgcagcttcaaccaaacttgagagggggacatcatggatcatggatgtcttttacaatttagatttcagatttcctgacaatggacacgacgacggctatgtcatcgagtttgcccccgctgaaacccaggtaccccactgcaagagcggcatctgagaatggggtacttccggctgcagatctaccaacttcctgcgccttggcagccaggtgttcagcaatctccgttggtttgagatcggcttgtaaagatttcgagaccatggtggctacttcttgctcatacacattgtcaaaaagaccatcacttgctgttacaatgacatcaccatcctccagctcaattgtataattctgtacaagtttcaggggattatcgcccttctcaatttgcagtggaaagttgaaaccataaaccattggttttgatttttggtacacctctccatttcttatcaccagaaatccagagtctccaatattcgatgcattgaggaactggccatcaaagtgagcaaccaaaacagtggaagaaccaggagagtgcgcttcatctgcagccttggaaagaacttgttcgggtttaatatctgcagcgccttgattctccataatgaactttttacaaccatccattagctcccttgcataaagccctgcattgataccttcaaatgaccactggccaactccatcagccacaccaaaccagccatcacacgcaataaaatatgcatcttctccacctgttgctgctttaaatgaatttgcttctgtgatagggtcaagatagactaaagtccaaaggtatacagcataaaagagaacacgtagcgcaattattagtaccttagaaggatgaggcaagatcgcagcacctgatgccaacacaagcgttgatgaggctactggaaccatcctatcagtattcttcacctctgaagtgtccttttcccaatctaccttgttacaaacttcttccgccggtggcggcgggacggcgaactcggcgggctggtcgtcgtcggcggcggtggaggcgctggactcggtgtcgacgtcggtgtcggaatcccgcgcggtggagccatccgaggcctcctcccccgcatcctccaaaccggaggtcgccgtcgcctccgctcctccactcgccaccacctcctccgcgtccaaacccgtcgccgtcgccgtcacctccccttctccaccgccatcccgggcctcaggttcagcagctgcggcggcgtcaccgtcgagccctgattcgacgacggccgcggcctcgggagccacggcgtccgcccgccgctgctgctgctcctcgtcgtcgtcgtcccgggggcgcgcgaagcggaagacgatgctcccgtcggcgagctcggtggaggagtggaggtcgggggcggcgcggcaggcggtggcggtggagtgggggcggcggtggtggcgaggggagggggagacggggaggggcgggggagggggaggggcgagcttgcaggggcgcaggtcgagcagccccgccgccagcggcagctccgccatggctcacctcgagcaagcaaagagagatttgaaaatggagatgagctcgagagagaggaggaggaggagacgaggtttttt

SEQ ID NO: 19505 - DNA, 695 bp, Oryza sativa
  unsure (1)..(695): unsure at all n locations
  Clone ID: PAT_MRT4530_2495C.1
cggcgccgccgcggccggtggccggcggcgccgacgatctctccttctgcgggttcgcgcgtgctcttcctcggcgttcggagacgcattgcctcttccctcccctagtgatgatccattctcaaggaaacctatactcgtgtttacgatgatccagaggaagaagagggaacgacacttggtgggggggggaatttcaatgataacttataaaataatatcgaagagctctgcagaagattggaaggccgttatctccaagaaaaagagcaggaaaccttacttctgcaatgaacatgatatcagacatatgctcctgatgaaatgtttcaattgaaaaaccagggaaagagaaatcccttaggaagaaggaaatacttgatctgatgaactcgaatcagaacttattgctgctgcatagggagcaggtgatctgctagggaggaagactgatgctgaaaagagaaagctgtctaccatgcagcagtccttgcaaaaggaagaagaggcatacaaagcattgaaaaatacaaccgaagttgaagaaaactagttcttgggtgaagactacgaagatctgcagaaatcactggagcaagcaggaagagactgcagattctggtcctcttgctgtagcaatactagctactgccancaaagaccaanagctgcangaggtccacacataataactg

SEQ ID NO: 19506 - DNA, 956 bp, Oryza sativa
  Clone ID: PAT_MRT4530_24960C.1
tcatttagcagggcccttcgcgtgccagagaagatcagcacaggcaaaggagtgctggccaaaaaagaaggcctggtacgctgaacgcgcatagtagagctggtcgctcgtccaacgccaaacaagacggtctctgacacccggcgagagctgaattcgaagcgcagcatcccagataagaagaaactgggagatgacagggacagtgagggccccgtggatgtccgaaacccaagagttgttcgccaggccagaagcaaccgtgcgcgaacggaggcgctgtggcacagcaaagaggaggtcaggagccaaggaggccactgagcggcctccatcaatccaatggtcagtccagaagagcatagattcaccatcccccggcacgaagaaggtggacgcctcgaacatgtcagagacagactgctcgactagggcctgggcggacttgtggaagtcgcggaggcagacggcgcaggtggcgacgtggagcggcggctgcagggatgatgagagcgcgtcgaagcgcagcgccggggagtggtcgtccagctccagcagctgggacgactgggagctgtagctgtagctgccgtcatattcggcgtcgacggcggttggggagtcgtcgatgtcggcgccggcgaggcggagcaggcaggaggagaggcggcggaggtgggtgaggaggaagaggaggtggagcagcagccgtggcacgccggagtagccacccaccgggaaccccattatattctttgtagctgcttaattgtgaagagagagatcaggagagagagctaactataagtatagtcagtagctaattaagctagggaatcagcggttagctagctactccagctgagaatgaagaagaagaagaagaagaagaagaagaagaagaagaagaagaagaagaagaagaagaagaagaagttgttgagtgagtgagtgag

SEQ ID NO: 19507 - DNA, 4987 bp, Oryza sativa
  Clone ID: PAT_MRT4530_24961C.1
atgacggagctagggtttgggcgacgcccaggcgatcgcggggcggcggctatctcctgtgctgtgagatggatttggatggagtttatctccgatctgctaaggaggtctgcagggtttctgcctgcgtacggaatatgtggtgagttcttgatcaagttggatggtcagttgatttctcggttgttttgggaagtatctgcaatctttcatctttgggaatgattggaattgaggaagtgtgatccgagtcggtttcctggggtggtaatgatgcagattatggactctgttgagaatcactacatatatgaggaaataggacggccaaaggtaagattcaaagatcaaaaggtccttgccaatctaatatgcaaattagggctattcctctctccgcaactgaaaggacccatgtctattgtcgccggtgggggtgatttagggatcgttggtgaaacgattgcccacccgaagccggcagatagcaccatggctggtccgatgagtgcggcaccggattcaagggcattgtttcctgtggaggacggccatgaggagcaggtttcgtcacaggctttgaagatggacacgggctcaggagataatactttgaggccagagaagtttactgaaggagagatgaatgaggaggaggaagatgtagttgaagtgattcttgaagaaggggaagtacaggaggcaggacagtggacaatccttgctagattctactctctgcgggtgccaaatcaggcggctttgtttgatgatatgaggagagcatggagattgcgggctgacatgagttataaatccttatgggataatatgttcatcataactttcagtgctgaaggagattatgagtttgtcttgaaaggtggtccatggatacatagaggtgatgctctattggttgctaggtttgatggtctgtcgaggccatctgaagttccactggagacagtccctatttgggttagaatctatgacctacctttagtactgatgatgaaagcaagaggtgaattatacggcagcaaattgggacaagttcgggaggtggatgtgggtgacgatgggcggaacaaacatgatttctttaggattcgtgtggacttatctgtcaagcgtccgttaaagtcgaagttggctataaagatgttagcacagggcaaagaggtcacaaagcgttttgatctttggtatgaaagggtgccgcatttttgtttcatatgtggatatctgggacactctgacaaggagtgcaataggaaaggagtcaacaatgaccagcccttcaagttttcggcagagttaagatgctcccctctaaaaccctttgagaggaaggtgagtaaggtgaaagtaccatcatcttcaggggtggtgcgtaacctgttcttcaggggggcagggagtgcaagttcattgtcctcacgacagaaacaaggagatcagggggaggacttggttccaccaagagtggacgctcatgatggttttgagtctgcaaagaaggaaggggacacacagattgatgaacagttggcgggctatgcagagaaaatgaaggtgggggagacagaagtacagaaggtttctctcccaggaagagagggagcaagccataaacgtggacctgagattcggttggatggtgtggaagatacaacttcattaccttcttgtgagatgataccggctattaagactataagtcagcaagcttcctacggtgatgaattgtctgaagattgcagtggagaggacaggagggaacctcaaacacagggtgcaacaaagaagtcagggagagtcatgcaagctctgctggaatatcaacaaatggtggaagaaagcagcaaatctgtgtttgaatcgggcgtttcttcacgggcactgaagagagccaggaagactgaaggggtagtaaccgggaaggagaaggaggcaaccagccctggggccgctggagcaatgaattgcatggcttggaactgtcgcggtatcgggaacgctgcgtcagttcatgacctttgcgccttggttaaggaggcgggttcccatatcgtgtttctcagtgagacaagacaaaaggtcgatagagttaaacgtctgcgatcaagattgggcctcaagggttttgtgggggttaactatgaggggatgagcgggggtcttgctttgttttggcatgaatctatccacatggaaataatttctattaatgaaagatttattgatgcgtatgtgcgtctgtcctcggatggtcctttgtggcatgtgacttttgtgtacggtgaaccacgagtggaaaatcgatgcaggatgtaggctcatctaaatgctcttaaacagacttcctctctgccgtggcttgtcgtaggggattttaatgaagctctatggcaatttgagcatacttctgttaggaaaaggagtaatgcccaaatgcaggcgtttagagatgtgttacagacttgtcagctggtagacttgggtttttcaggggtacctcatacgtatgataataagcgacaaggttcagccaatgtaaaggttcggctggatagagctttggcagatgaaagttggagggatatttttaccaatgcacaggtggtccatctgacttcgccatgttctgatcattctcccatcctactaaatgcctgcactatgagatatgttgggaacgtgaaccagcagtccaggacatagttaaggatgcttgagtagagtcagatgagatgttgcatctgggggatattagcaaagctttgaaaagggttatgggggctcttcagtcttggatgtggagggcaaaaaagaataggatctctaggctcagggctagtgatggtactattcataatacggcaacaactatggaaaagttggctactgattacttcaaggagatttacaaagcagacccaaatctcgatcaggcaagtgtgtcccagttgtttcagaagaaggttactgcagcgatgaatgagaacttatgcaaggaatttacagatgaagagatagccgatgccctcttccagattggcccattgaaggcccctgggcctgacggattcccagtgagattctaccaaaggaactgggctactatcaagtctgatgtggtggcggcagtgaaggaattttttcattcaggaatcatgccagaaggggcaaatgaaactgctattgtgttgatcccaaaaattgatcagcctgtggagctgaaagactttcgccctatcagcttatgcaacgttctatataaaatcgtctctaaatgcttggtaaacagacttcggtcgattttggatgagttgatctcggttaatcaaagtgccttcgtgccaggaagactgataacggataacgcactccttgctttcgagtgttttcactttatccagaagaacaaacaccagaacaaggcagcttgcgcttataagcttgatctcttgaaggcttatgatagtgtggactgggtctttttggagcaagccatgtacaagttgggtttcgctcactgatgggttaagtggattatggagtgtataaccacggtgagattcgttgttaaattcaatggaaccctcctcgatacattcgctccaactcgtggcctacgtcagggagatccgttatcgccttttctgtttttgtttgttgcggatgggctcttgttattgctggatgagaaggtaaatcaggggaatttaactccggttaaagtgtgctgatctgcaccagggatatcacatctgttattcgctgatgacatgcttttattcttcaaagcagaagtcgagcaggcagagacaatcaagtcagttcttggccaatatgctgcagggactgggcagttaattaacccactgaagtgctctatactgtttggtgagtcttgcccagcagatacccaaactgcgatcaggaattgcttacagcttgggaataaaagctttgaggataaatatctgggttttccaacgccagaggaaagaatgagtaaaggtaaattccaaagtttacaagagaagatttggaaaagaatcatcatgtggggagagaatttccctatcaagtgggggaaaggaaattatgctaaaagcagtcatccaagccataccggtgtatgttatgggcttgtttaagctttctaattctgtttgtgaggatcttaataaaatttctcgtagtttctggtggggtgctgatagaggcaagaggaaaacatattggcgatcctaggaccagctggtaaaacctaagcaaaacggtggtctgggttttagagactttagattgtttaaccaagctctcttggctagacaagcatggcggctgattgacaggccggaaagtctctgtgctcgggtgttgagggctaaatactacccttctggttccttaattgacaactgcctttgggggaaatgcttcacccagatggcgagcaatagagtatggtcttgagttgctaaagaaaggcgttatatggagggtgggtaatggtcactcaatcagaatctggcgtgatccgtggctgccgaggaatcactcgcgaagacctattactgtgagaggtaattgtagaaccaaatgggttgcagatttaatgggagtggatggtacatgggatgaacaggtggttaagaggatcttctggccagtggatgctgagttgatcttgacaatccgaccctcggcaagagcagaggaagacttcttagcctggcatccggataagttgggtattttctcggtgagatcggcttacaaactcgctcttcagctagcagctattgacaatgggtcggggtcctctgaagctgaaatatccaaggcatggaatttggtttggaaatgcaatgtaccgcaaaaagtcaaggttttcacctggagagctgcaaccaatagccttgcaactatggaaaacaagaataagaggaagcttgaagcttctggcacc

SEQ ID NO: 19508 - DNA, 492 bp, Oryza sativa
  Clone ID: PAT_MRT4530_24962C.1
ctattattccttttttttttttttttttttgacattttttttatacaatgttcatcaacattttaacattgatgagctgaggagaccaaagtgtaacatatttgacttgcgacgtgataaggataacagtatgttccactaagcacgcctttcgtttatgggctaaaagcctaccaggcttgctttattcatgagcttctggaggaagggagagcctgagccgctaagaactttgggaatttgcctacacatggaacggaaatgatcatacatatacgggtaccgccaaaacggatggaaaaacgtccatcctatttgaggtaccatttgcaaaagacgttaccgttgctcattcccaccattgttgggtaccgatacgactgaaacgggtggtggaaactgaaaacggccctcggaaatctcaaacctctcggaatcggtttctccccaggcaaagcccagatgatgacatcacagggtgccaaatgagac

SEQ ID NO: 19509 - DNA, 634 bp, Oryza sativa
  unsure (1)..(634): unsure at all n locations
  Clone ID: PAT_MRT4530_24963C.1
atggaaggattaaaaatcaaaggaatggaaatcattgttgtgctagtggctctggttcatctagctccaattgactatgcagttcatgaagtgcaatttgaataccagcatataatggtagtggtacttatccccgtggaatttcttcggtgggtcatcataatccttcttggtggtgcgcttcatcttgggtcatctccttaaacttaaaggaatgtactgagggagctgatatgatggttttgattgctagtgctgcagtgctccagtttgctctggcactgttcatcaaagttttctttttcgcctgagattgtcttttggtgttgctcaggtctgcctctcttttttaccttctacgactagataccatagcatcataaccttcccaacagtacacagaccacgcctttatgaattttatttagtagtcttttattgtagcagttcattatcaaattgggttaaaatattctaatacattatattttgcttttgacaggtgagcttgatgttttgtctgctccaatcattctgttctggcgagcatccttttgaggaccaagcggagtagttttacttgacatacatattgacactagattgataagaccttgtgtttngtgttcatgag

SEQ ID NO: 19510 - DNA, 425 bp, Oryza sativa
  Clone ID: PAT_MRT4530_24964C.1
gttgtttttactgttgctgtccaccggtgaatatggggatcctcaaaatcatcgtggggccccggtgacttggctcctaacaggaccatgatcatgttgcgaaggttctgcttgagcatggagctgatcccaacagagtatcgaaccatgttctttgatcactcatgggagatcgctgcagccactccttgaaatgcatgaacttactgatcaaggctattgctgatgggaatgattgaagttgtactgtaccataaacgaccattttagtggtgagccatgatgatggatcagccgatgtcgtcacaatcttgctagaggtctgagctgaccctaacattcgtgacgaggatgggacgattactatcatgacggcagcaactagcggtcaactagtgcttgttgaaattgtgtttcctacgaca

SEQ ID NO: 19511 - DNA, 3438 bp, Oryza sativa
  Clone ID: PAT_MRT4530_24965C.1
gtacgacgacgacttccccacggccagggttcccctctttccccttcccaatcctccgatctcatcccccggctccggcgacgcggcggggcgatgcgtagctgctgagcgcgcggcgccacgaccccccccacctcgagagcgcggccatggacgagggctacgccaacctccccaccagccacctcctcggctccgtccccgccgccttgacccccgaagagaggaagccctcacccgtcgccgaagttggcacctcgcgtctgcagcagtttcctcctgctcttggtggtactggtggtgttggtggaggaggaggagggtaccagcctccagggacccctgcagatggagatgtagaaactcaaacaaattggaaaggatacttcaatgttgcatcttatgctccatatttcaatgttgatactgatgttgtagttgacaggctcatcagctcggtttatccaatggatgggtttttcaggaagattgatgctaatcctgacatcatgacaccaagaaccgcggcggcgctgtcaggtctactccgcggcaagaatgcagtgaacctcgcaccagagcaggtcccgaagctgcttgctacgcgcgcgtcacctgcccgggtggaggatggcgtctgtctccgtgaccctcccggtgcccgctacccgctcgacgaaattcctcgccgggatgccgcggtgggcgccaaccgcgtactcttcgactatgcgcggcgcgggatggtcctggaggtcctggatcagttctctgtcgcgcgccgcggcggcgtgctggttgacagcgccacgctgtcctgtgttctcaaggcttgcagatcagtgccagacagagttcttggggagcagctgcattgcctgtgcgtcaagtgtgggcatgatcgaggtgaggtcagtgccggtacgtcgcttgtcgatatgtacatgaagtgtggtagcgtctgtgaggggatagaggtgtttgaaggaatgcctaagaagaatgtcgtcacgatgcgtgctgagggtatatggcccaatccattcacattcgcgagcgttctctctgcagtagcgagccagggtgcacttgatcttgggcagcgtgtgcatgctcaatcagttaagtttggatgccgctcgtccgtgtttgtctgcaattctctgatgaacatgtatgcaaagtgtggattggttgaagatgccaagtctgtgtttaattggatggagaccagagacatggtgtcatggaacacaatgagagaagacagggtcatgccaaatgagttcacctactctgcaatgctgaaagcatcactatccatcttacctccccagatacatgcccaggtcatcaagaccaactaccagcatatcccatttgttggaactgcacttcttgcttcatactcaaaatttggcagcactgaagatgccctctctatattcaaaatgattgagcagaaggatgtcgttgcatggtccgcaatgttgtcttgccatgcccaagctggtgactgtgaaggtgccacatatttattcaacaagatggccatccaaggaatcaagccaaatgagttcacaatatcaagtgtaattgatgcctgtgcttgcccatcagctggtgttgaccagggtaggcagttccatgctatttcgatcaaatacagataccatgatgcaatttgtgtgagcagtgcacttgtgagcatgtactcaaggaaagggaacattgacagtgctcaaattgtctttgagaggcaaacagatagagatttggtttcatggaactcgatgatatcagggtatgcgcagcacggttacagcatgaaggccatcgaaacatttcgacagatggaagcttcgggtatccagatggatggcgtcacattccttgctgttatcatgggatgcactcataatggtcttgttgtagaaggccagcaatactttgactcgatggtcagggaccacaagatcaatcccaccatggagcattatgcatgtatggtggatctatatagccgtgcaggctagctgcatgagacaatgagccttataagagacatgccattccctgcaggtgcaatggtatggcgcacattgctaggtgcttgcagagttcacaaaaatgttgagcttgggaagttttccgcagataagctgctatcgcttgagccacatgattcatctacatatgtgcttctctcgaacatttacgcggctgcaggaaagtggaaagagagggatgaagtgaggaagctcatggactatagaaaggtgaagaaagaagctggatgcagctggattcagatcaagaataaagttcactcctttatagcctttgacaagtcacatcctatgtcagatcagatatataaaaagctcaaggtaatcataaccaggttgaagcaagatggttattcaccgaacacaagctttgtgcttcatgacatagcagaagaccagaaggaagccatgctggttgcacacagcgagcgactagctcttgcctttggcctgatagctacaccacctggaacaccccttcagattgtcaaaaacctaagggtgtgtggggactgccatatggttatgaagatggtttcgatgattgaggacagggagatcatcatgcgagactgcagcaggttccatcacttcaatggcggggcctgctcctgtggtgatttctgatgcaaaggaaaacagacctgaacatatggagctttgatgttggctatttcaactgggcagcatcggtcatgtatggttatgctgccgcagtgcctgctatattctttttcctgtttcagtattttggatcacgcccaagccttgttcggttttggtgcatgtggggatactctctgtttatcttcatcccagcatctgtaagtattcacagtaatccatttctttgatggttcggagatgtagtctcagaaataactgtcagtgaaaataatccatgatgtaccagcatttaggcttgcacctcctgctcctgctcaagaaggctgctatgtctaatgcaggcactaattttctttgcttcaggtactgttacttattcctgtggaaagattgctagtgctgcagtgctccagttaactctggcactgttcatcagagttctctttatcgcctgagattgtcgtttggtgttgctcaggtgagcttgatgttttgtctgctccaatcattctgttttggcgagcatccttttgaggaccaagcggagtagttttacttgacatacatattgacactagattgatagacctatttgttttgtgttcatgagattttttccgtcatttagttcacagaacttcactgtatgtttcaattcggaattgttgagtttgtcatctaaaattgcatagtgaaccttcgaccgttctgatctacaatagccatttgactatattttgac

SEQ ID NO: 19512 - DNA, 247 bp, Oryza sativa
  unsure (1)..(247): unsure at all n locations
  Clone ID: PAT_MRT4530_24966C.1
gtttccggacaccggcaaccccggctatttcctgatccgcctggccgggtgggcgctcgccctgctcgtcctcctgcaggcggtccgcgaaggcctggcccaccccgccgatcccccggagccacgcccgtgagcgcggccatcggcctgctcatgntcgccggcgtcgcggcgngcgcgctcgcgacgngcctgccggtntggggnatcctcaangnaaaataaaaaannganaanaaaaanaana

SEQ ID NO: 19513 - DNA, 614 bp, Oryza sativa
  Clone ID: PAT_MRT4530_24967C.1
gcacgaggggagattctggttccatactgtacaaagcagggcctatcattgggtctggtggtcatagcagtgggaagagtccatacagctctcgcattagagacgctgatccaacagatcagtctgcatcaaataaaaagcaacggctgccatacacatcagctgaactagctgcgatggaggtgagggcaattgagtgccttaggcggttgcttcgaagatctggtgaagcactctttctgcttcaacttatttgccagcataatgttgctcgcttggttcagacactaggtaatgatttgcgcaagaaactagttcagttaacatttcatcagttggtatgttctgaggatggtgaccagcttgccatgcgccttatttctgcactcatggagtactatatcggtccagagggcagaggaactgttgatgagatcagcactaaattgagagagggttgtcctagttacttcaatgagtcggattataaatattacttagcagtggaatgccttgagagagcatctatgacaaacaatcatgacgagaaagacatccttgctagagatgccttcaatcttttaactaaaattcctgattctgctgacttgagt

SEQ ID NO: 19514 - DNA, 312 bp, Oryza sativa
  Clone ID: PAT_MRT4530_24968C.1
atgatgagcaaaagaaaaatagcaaacaatctccatcaccagtggactccaccctatcctctgcggccagccacatggagcacgatggcttcatgtgtgaagttgaaggaaagtatgcagatgcaaatcagagtgttatttccttacttgcttgttctatcaatgtcgtcgacgtggagcagtcgttggttgttgctattagcccagcgtccggcagcgaggctcgaaatagtgccttcgcctcaaccgccgccggccaccgctcgccggccaccaccatcaaccgccacggtgtcgtcgtcctcctccatg

SEQ ID NO: 19515 - DNA, 452 bp, Oryza sativa
  unsure (1)..(452): unsure at all n locations
  Clone ID: PAT_MRT4530_24969C.1
aaccatcaggccgagcagcaagccaaagagaagcttgcattcttgtagctaattaagtattctcgtggctgcatcatactcctatatgctctcagctctgttatatcacaggacacaggtctacaaattggccatgcatggagtgtagccgtcaatttcatccagcatttcttaacctctctttttgcatttacaatcactatcaaacaaatggaatatccttacccaccacactaccaaaggtctcatcagccattgattgtagtaagcatagtcaggcatgttgcatcccttataattttctcacggtcattctgatttattgcaagcaaattaagttaacaactttgcatgttaattagggggctcaatggggatgatattggttgctcttatcaaaattgagggttacttttcaattaggcatttaggatgataaattattngnggga

SEQ ID NO: 19516 - DNA, 760 bp, Oryza sativa
  unsure (1)..(760): unsure at all n locations
  Clone ID: PAT_MRT4530_2496C.1
gggtttctntggatccccttttttttttttttttttttggaacctgaacaatataattaatcattttacttatactgtataaatctgatgtgttattctttgtatcgctgtgttccgtaacaaaaagagtatacaaaataaaagaggtaccggatatacacgaaatgccacaaagttaagctactgacagtgacacagacacacaggcaactatgatgccagaagatcccctccccttttattgctccaaggctatatctatatgaaggaatgaaggctatgatgacttcatacaatctactccatgattttggagctgaattgtgctacgtcttgaactagatactactttctgtctcgatgatgtctgttgcagcatgcctgatgctctcacggaacgatacaaaccctttaccacttgtaaaccctgtaccgtcaacatcttgctcttcaataagatacctctcaaacaatgctggatcttctcgtcctccatggataaatgtcagctttggtgttatacacctgccctgcttcaactcattaatcatggttctcaaaagacagtcatgaggtggaggaaaaggaagtgaaggatcagcagacggtgaatagtaaacaataaggttcgtaaatgcatccagaagaaatatggggctctcactcatgattagagcagcccggctcaacgtatgccgagggaatgcttgcttgtcgggtgacgagtatgaaactaaaactgggtatatagctatgagca

SEQ ID NO: 19517 - DNA, 1740 bp, Oryza sativa
  Clone ID: PAT_MRT4530_24970C.1
gcacgacggcggaggcgcacgagagcacgatgaggatttgattttctttttctttcttttggtttcaagtctcatcgccaaatttcgttttcgattttttttattttttttgctcgtctcgtctcgtgtctaccctttattcatccctcttctcgcgttggtgctcctccgcccgatctctcgtctcgaagcttctggaagcttcggggggagggatcccgggccgggctcgcccgccatggcgctgtggcggtgtagctcctcgtggctctcgtcggtgtcgcgctcgtcggggggagtcggcggcggcgaatcgaaggtgtcgccggagatcgcgccggtgagcggcggggagggggagggagaggaggaggagggggaggaggagaggtggtcgcggctgctgccggagctgctcacggagatcatgcggcgcgtggacgccggcgccgagcggtggccgccgcggcgggacgtggtggcctgcgcctgcgtctgccgccggtggagggacgccgcggtgtccgtcgtgcggccgccgctggagtgcgggcggatcacgttcccttcctcgctgaagcagcctggaccaagggatgctccgatgcactgcttcatcaggaggaacaaaaagaactcgaccttctacctttatctcagcttaacacaggccctaacggataaaggaaagtttctgctggctgctcgaaggttcagaaacggggcacatacagaatatatcatttcctatgattgtgatgatctatttccaggaagcaattcgtatgttgggaaactgagatctgacttcctgggtacaaagttcatcatctatgatagccagccaccatacgatggtgcaaagccctcacggagccaatcgagtcgtcgctttgcaagcaaacagattaacccaaatgtttcaggcggtaattatgaagttggacaagtgtcatacaagttcaacttcctcaaatcaagaggaccaagaagaatgcagtgcaatatccagtgccccgtaggccagagcaccgcatcagatccattgaagaagctgattagcacctcaagccccttggctctaagaaacaaggcaccacgatggcatgagcatctgcagtgctggtgcttgaatttccatggccgggtgaccgtcgcctcggtgaagaacttccagctcgttgctccagctggcaccagcgatccatggggcattgcagatgaggagacagtgatcctgcagttcggtaagattgaggacgacgcgttcacgatggactaccggcagccgctgtcagccttccaggcgttcgccatctgcctcacaagctttggcacgaagctggcctgtgaataagtgtaacttttgggtttgatgatgatttacaccgtgcatatggatgggatctccgttgatagcgcggatagcctgaagccctgaactatagcgcccctgttgaaccaggagagtaaggtgtaaaagggcgacaggggcacactgcactgaacacaccgtgtccctaactctcgactctctcttctctttttctctcgtctaatgatgtggatggacttggtttatgttgatcttggagagatgatggtataactctttgttgtaaatggcactccttttcacttgctgatgtaccccgtgcataatgaatgtaccattctccaaaaaaaaaaaaaaaaaaaaaaaaaaaaaaaaacaaaaaaaaaaccgcggggcggggcccg

SEQ ID NO: 19518 - DNA, 431 bp, Oryza sativa
  Clone ID: PAT_MRT4530_24971C.1
atgcgttttcttgtggccttccagggaacgaggaaccgcggtccggccgaatccttggacatgattcgtcagcataaaggaacattttgtagatgtgtctaatggagtccacaggcggcacagagaagtctagcagtcagaccttccatgtacaaagctctcctaggctacaagattgaggaccttcgaccaaccggaggaataaagaagtggaagaaagatgtgtactccagatgcgctcgcaggctatactgatattccttgacatccctggcctgcggcaggacgaacgtgctgcaatgaggacttggctatggcgcactcaacattcttaggctgggtgcattgtaaatatatctgctagacatctacgacctgaaactgcctgtgttgtgcactgctccacacaacacttgagcaaatgaccatgt

SEQ ID NO: 19519 - DNA, 210 bp, Oryza sativa
  unsure (1)..(210): unsure at all n locations
  Clone ID: PAT_MRT4530_24972C.1
cggacgcgtgggcggacgcgtgggtagttctagatcgcgagcggccgctcgcgatctggccagatctatgacgtcacgcanagcaggatgttctatggacctggtggaccttatgcgctattcgctggcaaagatgccagcagagcactcgctaagatgtcttcgagcccaggatttgaccgggacatttggctggcattgactcgccat

SEQ ID NO: 19520 - DNA, 162 bp, Oryza sativa
  Clone ID: PAT_MRT4530_24973C.1
atggagttcagtcactcaatgattgttgtacaggagaagaaggaggaggaggaggctgtaaaaagacaagttatcacttgcttcggctgtagcctgatcaacatcatcctcaatatcttcttcatccagagcatgttcaatggatggatccaaagcaggcag

SEQ ID NO: 19521 - DNA, 987 bp, Oryza sativa
  Clone ID: PAT_MRT4530_24974C.1
atgcctttccacttccaattcccatggctccccaacaaccccacctcctcctcctcctccccaacgaaaccacctagccctgcaatccccaaccccttcctccccatccaggccggcctcgcctccttcctctcctccctcccgctcccacgcgcggccttcccgccgccgccctgggctcgcatctcctccgcctcagcctccgcggcctcggcctcggctctccccgtggcggagatcgaggagcggctcgcgggggtccccgtgtacgcgctcgccaactcctcgcaggagttcgtgctcgtgtcgtccgcccccggtgggggtgggggtgggggaggtgcccgggcggcggtgccgccgccggcgctcgggctcctgtgcttccggagggaggacgccgacgccctcctggcgcagatggacggggacatggcggctggctccaccgtcgtgcccgtcgcgctaaacaaggttatccaacttaagtccgatggtgtggcatttagatttgttcctgattcttctcaggtggcaaacgcaatgaagttaatggaaaatgaaggccagtatgtgaatgatggatttccaggggttccagtttttcagtcaaggagtctagtcctgatgagtgataacaagagatatcgtccagttttcttcagaaaggaggacttggataactcactacatcgagcctctcgtgaccagcaaaagcctaaccctgctgtaaaaatgggtgacattcaggtttcttctttggagaatatcatcaaatctatgaaggatagctcctcttccaaatgggatgatgctgtttttattcctccaggatttgatcttgctactagttcaaagcaatcgaatcatgacaactagatctttatttatgttgaagctgcttaactgctcttgtcatggaaatgcttacatgaacatattgaagaaatagaatacatgttcataccaaaaaaaaaaaaaaaaaaa

SEQ ID NO: 19522 - DNA, 167 bp, Oryza sativa
  Clone ID: PAT_MRT4530_24975C.1
ggcatcgcggccggccgcccaagtccggccgcggccaagttcacctgggaggggcccgacgcgctcgacgcccagctccagcccgccccgcccgccgtcgatcccaacgaccccaactacgactgaggggcgacggtggagtgacgaggaggttgaaggagccgctc

SEQ ID NO: 19523 - DNA, 290 bp, Oryza sativa
  unsure (1)..(290): unsure at all n locations
  Clone ID: PAT_MRT4530_24976C.1
gtgtgatttgagtgagtgagtgagattctttggaggagggattttggtttggtttggtttggtggtttgtgcgggattttgtggggaggagagtaatggcgaccgcagggaaggtgatcaagtgcacagcggcggtggcatgggaggccgcgaagccgctggtgatcgaggaggtggaggtggcgccgccgcaggccatggttgtgcgcgtcaagatcctcttgccctcgctctgccccnccgncgtctgcttctgggcggccgcccgccccactgcccccttccctccg

SEQ ID NO: 19524 - DNA, 723 bp, Oryza sativa
  Clone ID: PAT_MRT4530_24977C.1
atggccgccgcccccgacgccgctgtggtggtgcccgtcctgctgccaccgccggtgccccaggtgcagccgacgctgaaagacatcgtcgtggagttcccggtggacggcggccgcggccgcctcgtcgcggttctcccgctgccgccggaccacgagctgaggaggtcgctggattccgtcgcggaggccctggcgagcggccgcctcgccgcggtgctcccgccggcgcggaggaacaccgtcgcggcggcgggcatggccgcgcaggacgtcgcggcccgcgccctcggcgagggctcccgcgcgtacgccttggcgttcgaggtctcccgcgtcgccgtcctcctcgtcttcctgccggtcttccccttcgccacgttgctgcacgccgtccgcctcgccgtctccgacaccgatgagccagacgagaagcctgctccgaagagctttgcagcagcagcacgggaagtgctcagcgacaccatctgcgttgggtcaatcgctttaatggctttcgtgttgctggtgtctcttggtgctctggttaagggggattcagctgccaagggatcgtgcagggagatgattggctctgtaattggtgatgtggggctcgtgggctttcacgtgatcaatctcttcgtccttactcccaatcttgcgctgagggtgtggagggtgaagctacctggccatggccaccgtgttgttccggtgtag

SEQ ID NO: 19525 - DNA, 265 bp, Oryza sativa
  Clone ID: PAT_MRT4530_24978C.1
acgcttgagcttactcttcaaatataatcaggggcacactctgcacttgtgtgacggcccctgcaacattactaactatccctatcagaacacacaaaggctcttccttattaacatcaacaacatgattatcgtcctaagaatcattacgataacatttgcacattacaaactaacctataatattattcctaatatatccaattttattatttcatgtcctcaactataaatacacatataccatttgttttctttttaaaaa

SEQ ID NO: 19526 - DNA, 504 bp, Oryza sativa
  Clone ID: PAT_MRT4530_24979C.1
atggcttgcactcaggaggttgctttcggcgtgaatctgatcggcaacggcgccggcgccggcgccgtcgacaagctcctcctcatcctccgccgccgctgcctcacgctactgggaggaggagcagctcgaagcggagctcaccaagtcggggagcgttcatggcaaaacccaaagaccactccatggatggatttggccagaatccatggaaaagaactgggacaagagaaacacgatgctgatgaactacacaaaagcaccaaagaagaagagaaaacaattagggtacgggaagaactatacccccttccccattgccggcaaccggaaccaccggaattgataaaggaaaggggccggacggagagggacctcctttatcgcctggagagaggacaccgacagggacagaaagtcccctcaggccgtactgtaaaatggatcgcaattttcaaccttgaaggacaatggcaacttggcaagtactatctgcgagtttaa

SEQ ID NO: 19527 - DNA, 330 bp, Oryza sativa
  Clone ID: PAT_MRT4530_2497C.1
atgtcggtcacgctgggtggaatcatacaacttgataaactattagttagaactatagattcaactcaagctatatttgaactgaagctgcgattgggattgggatcatgggatggggatggggatggggatgagaaagtgagtggagggtgcgtggaggcgaggaagtggcggcaatgggtgaggggaggagccggtggactgtgcgaggaagaaatgccggttgcagagagggggaggggaaacgacgccgggggcggaaaggagaaggcgacatcatgggagtcggggtggatggaaaggcagatgaggaacttcgccggatggtag

SEQ ID NO: 19528 - DNA, 445 bp, Oryza sativa
  Clone ID: PAT_MRT4530_24980C.1
gaaccccaccgtttccccttcccgagaagaagagagcagcatccatggcgcccaaggcggagaagaagccggccgcgaagaagcccgcggaggaggagcccgcggcggagaaggccgagaaggccccggccgggaagaagcccaaggcggagaagcggctccccgccggcaagggcgagaagggctccggcgaggggaagaaggaccgcgctgggaggaagaaggcgaagaagagcgtcgagacctaccagatcttcctttttaaggggcttaagccggttcaccccgacattggcattttcttcaagggcctgttcattatggacttctttattaaccacctttttgagaaggttggccgccaaggccgccaggttggccggttccaccagaaggccacccttaccttccgggagattcaaaacttcggtcggcttgttcttcc

SEQ ID NO: 19529 - DNA, 204 bp, Oryza sativa
  Clone ID: PAT_MRT4530_24981C.1
tccccgggctgcaggaattcggcacaggcatcatgtcccatgtttgtaatctcttgcaaggttttcctgttatagaacattggtgcttccaatgtaccttgtgtacttttatccacctccatgagttttggcaaattttgttcatccgagtgcctataaattagcatcagccaatcaatcatcagccaggccattttcaatgtt

SEQ ID NO: 19530 - DNA, 579 bp, Oryza sativa
  Clone ID: PAT_MRT4530_24982C.1
gccagccattctgtacaccatccactactctacctaatgactaacttcttgacaggttcattgatattgctatgacattgtgctcgacagtgaccacgactgacatgcaggctaagctggacctcaggatgcgcttctccaggcacgggaaccttgaggggaacattgcgggtgctgacgcgaccgttgtctctaccgttgcatccgtggcgagagccatgatgatggcgtggacgatggcctgcatgaacgccaccgtgcacgcgctgatcatcgggccggtgatcggcacggcgtacttcatggcctactacaagaacatcctctagatgatcctgaggctctccttgaagaactcacctgagaacgtaacgaacaccttcttgaacagctccgtccagggtacacggtggctttttcagtgcatgattaagaagctgatgctgatggtagtgcggtgcgcaaagtgcctaaggaagtagactgggatgtgatctactgtgtgctacaccgtgtgctacaactcagtcttattttgatgctctctttgatgaactcaaaaaaaaaaagggcggccgc

SEQ ID NO: 19531 - DNA, 1899 bp, Oryza sativa
  Clone ID: PAT_MRT4530_24983C.1
atgtcggcaaactatcgcacacacatctccaaccgggttcatgcccccacgtcagaacagctgcctgatgcatctcaacctgtaacaatcataaaaccatttaacaggaaaggatatttcacatgtttgttattcttcttttatttgtcattttgtgtaaaattttatatcaaattttcgtcagtagagttcgatgagattaagatggaacacgtcttccgaacatgctggaaggtgagtgcgaaggtggtgttcaaatctcccgtgcagcaaaacaaatttggtgctcaatatattcggtttatcctaaaggatgcaacgatgttgttggtgtgcttatatacgtgggagaaatacatcatcactaactttacggacaaagtatacctactagggatattgccttggttaatcgtcgtgtggtggcaagcacttgtatcacagtattgctgcatgtctgctacatggctcaagaaattagatattctaaccgtgtcccgaagattgaaggacaaaataatcgaagtgtcccgaagattgaaggacaaaataatcgaaggaaggaagaagcatgaaaccgcctcgactcctgcgtacccaggacacgtcaatcaagacgccattcatgctgatatcattacaaccccaccctcaaagaaagcaacaaattcggaatccgaggagcatggagtatgcaaagtcagcatgccaaatattaatgtaccatcaaatttgatacgatctatgtttggccagacctacgagtatctccctcaagattatgaattaacagacgaggatgtaatggccatatttttaattgaagatttgactgaaaattgtacactggtcatcagtgcgtacatacactgtatgagggagcaagcaaataacgataagaaagtcaaatatgaaaacccgtttctttctgacatgctgaaagcggctggggtcaatggagtaaatgaagataaagataactttattacaaagatagtgaagaattacctagaccatgaactgatttttattccaataaatatgaaagataaacatcggtatttaccggttgtcaacacagaaaaacaacagatacaagtacttgattccatgtgtatgacattcaatcgtgttgacctcgcaaatacgctacaaggactacaatatcatcttaatattattggacggcaacaggacttgcctagccacaaatggggtgacctcaatgttatcaagtggccaataatagaacaactaaaagaaagaattcaggaagacagttcttcatgtggactattcatgctcaaacttatggagaattggacaggtgaatcactttctcgttctattacacagatgagtaaacaagagttgataagcggccttctgcactacatccaacagattaattgtgctgaagccatggagaaaatatgggtacaaagttcaatgccgcactttattagcttgagtcttaaacagcttcaaacaatactaaagaaggacgagccattggaaagtgaatgcttcaacatggctattcataagttcatgtatgaaaaaatcgagatgattcataaaactaaagaagcaatatcgaatcattgcctggacttgcaattttggattcttatactagtacgccatgctcgaagttttatcgtgctcgtagtggaccaagaaagtcaaacgctctatgtattagacccaaatccacttatgccagaatataaaaataacccaaacatgagatacaccagaaaactgataactatttgtgatcacttcaacaaagctatgagaaaggcatgccctggctctaggtggaatgaagacatcaacttgtggaggcaagtaattgtcaataatccggtttacaacaggatggtgacgagctaa

SEQ ID NO: 19532 - DNA, 2955 bp, Oryza sativa
  Clone ID: PAT_MRT4530_24984C.1
atggagaatgccgtagtcgtgcaaccatggagaattgttcggttccacgatatacaaatggatcacatacactggaaatggtggattgtccgtgcgagggtcatcaagaaaggacatctgcaagagaattattacggcgatctacaaattcgactaatactaattgatgaattgggcactaagatggaggcaattgtttaccgtcgtcaagctgagcatttcaaccagcttttaagatgtggatctgtttatgatttctataacgtcgggtttgatccgacagaaatgatcgtgcatctaagatttaagataagatctcagttctgcatgattctcaataatgtaacaactacccgcacgcctcatgatgtcattggattagttgtgcatgtcggggacattgagttcaggagtttgtatttgcgtcagacgccgacaaggataatcgcgctggttaatcctaggttgcagataattttcgttcgtgtatgggaccaacaacttacccgcaacttgactaggtggcgctcagcacggacacatttcgattgttttgtggctacgctgacgagggtggacagaagagcagatgaactatcaactacttatgagtctgacataatttttaatcctgattcagcatcagcaaatgaattcaatgttttgcgccaggcattagcagtatcaccttctaatgttcaagagcaggaaaggatatttcacatgtttgttattcttcttttatttgtcattttgtgcaaaaatttttatatcaaattttcgtcagtagagttcgatgagattaagatggaacacgtcttccgaacatgctggaagcaaaacaaatttggtgctcaatatattcggtttatcctaaaggacacaacggatacaaggatggaagcactagcgtatgaccagcaagcagatcgttttaatggaaccatacagagtggcttagtctataattttactaatgtggggttccaaccgaccgatgtgcctacctatgccaacctaaccatgcaagctaagttttgtatgattctgacaccaaagacagccctacgcaagcctcgttttgtagacttcagtgctatttttaccgacgcgataagtgatgatatgttcatagatgttgttggtgtgcttatatacgtgggagaaatacatcatcaccaactttatggacaaagcttacctactagggatattgccttggttaatcgtcgtgtggtggcaagcacttgcatcatagtattactgcatgtctgctacatgtctcaagaaattagatattctaaccgatatccttgcttaatctcatgtggtactcaggtcaatcaagacgccattcatgctgatatgattacaaccccaccctcgaagaaagcaaaaaattcggaatccgaggagcatggagtatccaaagtcagcatgccaaatattgatgtaccatcaaatttgatacgatctatgtttggccagacctacaagtatctccctcaagattatgaattaacaaatgaggatgtaatggccatatttttaattgaagattcggctgaaaattgtacactggtggacatgggtcatttttataacaagaaacgtcacttaacgtgccttctctctggagataaatttttgaacgatgatgtcatcagtgcgtacatacactgtttgagtgagcaagcaaataacgataagaaagtgaaatatgaaaacccgtttctttctgacatgctgaaagcggctggggtcaatggagtaaatgaagatgaagataactttattacaaagatagtgaagaattacctacaccatgaactgatttttattccaataaatatgaaagataatcattggtatttagcggttgtcaacatagaaaaaaaacagatacaagtacttgattccatgtgtatgacattcaatcgtgctgacctcgcaaatacgctacaaagactacaatatcatcttaatattattggacggcaacaggacttgcctagccacaaatggggtgacctcaatgttatcaagtggccaataatagaacaactaaaagaaagaattcaggaagacagttcttcatgtggactattcatgctcaaacttatggagaattggacaggagaatcactttctcgttctattacacaggaggatattacactttttaggtccaaactagccagtgtattattacgttggaaaacaaataaggcggtcatgacgaccggggaacaaatcgaagataccaaagatagtgatgacgatgttgttatattagtatctaagatgagtaaacaagagttgataagcggccttctgcactacatccaacagattaattgtgctgaagccatggagaaaatatgggtacaaagttcaaggccgcactatattagcttgagtctcaaacagcttcaaacaatactaaagaaggatgagccattggaaagtgattgcttcaacatggctattcgtaagttcatgtatgaaaaaatcgagatgattcataaaactaaacaagcaatatcgaatcattgcttggacttgcaattttggagtgctactggctttggtaaagtcccggtccaccatgacaacataaatcttgcagagaccgtcggtagttggtcggaaattcattacaaactttcacagtgcaaagcgattcttataccagtacgccatgctcgaagttttatcgtgcttgtagtggaccaagaaagtcaaacgctctatgtgttagacccaaatccacttatgccagaatataaaaataacccaaatatgagatacaccagaaaactgataactatttgtgatcacttcaacaaagctatgagaaaggcatgccctggctctaggtggaatgaagacatcaacttgtggaggcaagtaattgtcaataatccggtttacagcaggatggtgacgagctaa

SEQ ID NO: 19533 - DNA, 584 bp, Oryza sativa
  Clone ID: PAT_MRT4530_24985C.1
tgtttttttttttttttttagcgcttgaacacacagctactcgtacttagttctagacagaagtagtagtacatcgtacagtgagacaaaagctacacgtactaattcaaagaaaccagacaggccacgaccaagcaggcatggtcgagaagccgaaacgggtaaccgtccacggaacccctcaccgttgctgctgcccccgtaactcctccgggcgccaacgagccatcaccgccgccgccggcgtggcaggcgccgacgccgacgccgacgccccgcacgaccatccggtcatccaggcacagccccgcgttgccgctcaggtcgaggttctggccgagccgccgcaagaacgcgccgtcgaaaggcacggcgccgcccagcccattgttgctcaggttcaggtgatacatccttgtcagcctggtcagcaccggagggatttctccggtgaggttgttgtcttcgagtgacagcgtcgtcaagctcgccagctgaccaaacgccgcgggtatctgtcccgagtagccggagccggccagccggagttcttgaagacgagggagaccaccgagctcggaagg

SEQ ID NO: 19534 - DNA, 402 bp, Oryza sativa
  Clone ID: PAT_MRT4530_24986C.1
aaatagagaaggaagcttttgagtatacttattagatccaacagaacactcagacaaaacacaggatccatgttattacagcacaccaagcgcatagtgaatatgcgcggaacgagccgcacacaagacggacttgggcttagcacctcgcagagtctgacgttcggcggtattcggacgttttggactatactagagccagagtcttagagacggctaaaggaagaaggccgggagcgggaatacagctagagaaaactaggcaggactaactagccaactgctttggagaaggagacaagcagcaggatcttggtcccgtgctgcctggtggacagatacgagctttccagaccatgagtgccttgtgaccacatgcctgttgagctcttcaggaccgta

SEQ ID NO: 19535 - DNA, 1956 bp, Oryza sativa
  Clone ID: PAT_MRT4530_24987C.1
atgggcgccgcgcgcggcgtgctccaggcggcgcttcttctcgccggcggcgacgctgacttcttgctggtgagccccgcggcggcggcggcggtgaactcgacgtctgcgacgctggacaacatccagccgctcttgacgctcaacatggccgccgcgcgcgtcgccatggacgccggctccgccatccgcgcctcgccggagctcctcggcaccaacggcgaggattcggtctgggacaccgtcaacttcacgacgccggcgcccaccgacgggcactggatcgcgctcttctcccctgccgatttcgatttgatcatgggagggaagcagagcagtagcagaatcaatgcagcaggtgaagatgaagcacctgctggattacccatcgctcccatcaagtacaagtttgctaacatctcgccgagtttcatgagctccggcagcggcgacaccagctttcttctgatcaaccagcgctacgattatgctttcgggctgttctccggtggcaaggacaatcctaaactcgttgcagtttcaaacaagatctctttcgccaacccgaaagctccagtcttccctcgtctctcacaaggaaaaggatggaatgagatggctgtgacatggacaagtggttacaacgttgatgaagcttacccctttgtggagtggacaatgaacgagaaggagaatgctagagctagacggtcgccggccgacaccctcaccttcacaagaaaccatttgtgtggtaaaccagctaatgcagaaggttacagagacccaggcttcatccacacagctttcctgaagaacttgtggccaaacagggagtattcttatcagattgggcacgagctactagacggaactatagtatggggcaagtcgtccaccttccgtgcatcaccttcccctggacaagcttcactccagcgaattgtcattttcggagacatgggactcgggcaaagtgatgggagcaatgagctcgccggatttcagccgggggcgcaggtgacgacggagcggctgatcaaggacctgcccaactacgacgccgtcttccacatcggcgacctctcctacgccaatggcttcctggcgcagtgggaccagttcacggcgcagatctcgccggtcgcctcccgggtgccctacatggtggcgagcggcaaccacgagcgcacgtcccgggacaccggcggcttctacggcggcgacgactcgcacggcgagtgcggcgtccccgcggagacctacttccgcgcgccggcggcggcgaaccgcggcaagccctggtacgccgccgaccacggcatgttccgcttctgcgtcggcgacacggagcacgactggcgccccggcacggcgcagcacgcgttcctggacggttgcttcgcggcggcggaccgtaagcaccagccgtggctggtgttcgccgcgcaccgcccgctcggctactcgtcgaacgagtactacgccagggagggctccttctcggagcccatggggcggacgctgcagccgctgtggcagaagcaccgcgtcgacctcgccgtctacggccacgtccacaactacgagcggacgtgcccggtctacgagaacacctgcacggcggcgccggcggcggcggggggcggcgggaacgggagctcgccggcggcggcgtacaccggcgcgctgggcggcacgatccacgtcgtggccggcacgggcggcgccaggctgagggggtacgccggcggcgagtggccgcagtggagcgcggcgaggagcgagagctacgggtacgtgaagctcacggcgcgcgaccactcgcggctggagctcgagttcatccgcagcgacgacggcgaggtgctcgacgcgttctccatcaccaggggctacaaggacgtgctcgcctgcgccgtcgacgcctgcgacccccacaccttggccaactaa

SEQ ID NO: 19536 - DNA, 414 bp, Oryza sativa
  Clone ID: PAT_MRT4530_24988C.1
atgaaggggcttattcggtctggtgggggtgacgcgacccctgcggagggagatcaggttatagttcattgcacgactcggacaatagatggcatcattgtcaattctacaagaagggagcatggaggtaaaggggtcccgctcaggtttgtcttggggaagagcaaaatgatccttggctttgctgaaggctttccaacaatgctgatgggtgaaattgcgatggtcgtactacgcaaatatttatcattctctcatagtatcttttcgcagttcaaaatgaagcctcagatacactatgcagaggaggattgtccagttacagctcctgacggctttccaaaagatgatgaacttcaatttgagattgagatgttggatttcttcaaagccaaagttagtcttgttgaataa

SEQ ID NO: 19537 - DNA, 2926 bp, Oryza sativa
  Clone ID: PAT_MRT4530_24989C.1
tttttttttttttttttttttgagatgaatagtgcacttaaactatatatgttctcaaatgaatctgtaccaatcaaattgaaaatttctgctccttttacagcaacattatcaaggcatattatacatcaataacaataaatacaataactagaatatgaatgacgatcaaacatgcacaaggaataaacaaacggttgtaaatacaatcgaccatttgtattctcttaaaacacccaacatttttttttaccatgatgaggcaatacccagaagctagatgaccagtcaaagaaagagatgccatatagcacaaaacaaagaaatgtcatcagaatttatgctaaggttgggttttcttcttcagcagaccaccaaatttcttcagcaagggcttcttcttttgcggctgctgcttgggcggtgatgcgttgccattgctcgccgtcgtggagtgcaaaccattgccatcaacaatggaatctcccgtgttggactctaaatcaacttctgattcaccatcgtttcccttctccttagatgaggcatcatcagtaaccttgctgttctcccacatctttgcaactaccattaccggttcatcatcctcgctgtcccccttgacattactttcttccttgtgactaccatttgtagctccatcttttgcatttgcaagcacggagagctcctttatcttctcagaagcaacaagttcctttgcttgcaaatcatcgttctcttgttttatgttctgcaactcattttctttgtctagtagcttttccttccactggaaggtctcggccttggcttcctcgcatgttttgttagcttccattagctgagcttcaagatgcttcaacttctcctgtaactcagcattttcactttctttgccttttacagcctccaaggtcttgtccatctgagctctggcgttgatgatttcttcttctgattttttaattgagttaacaaaacttagctctttggactgccattcctcagacgcactcttggtttctgcttccattctctcaactgacttcttgagacaaactttttcatagtttgcttcgtcaagcattacctcatagctctcctttgtattctgcagacttacattgagctcctctacctgtgcacgagcacgatcaatctcctcttgtttatctaggtacttctcctgcgccactctcagttgagctgacatttcgtgcaaagcagaggcttgaccctccatggccttcttaatcttctcaacttcagctttgctagcttcaagttccttggctagcatgttcttctgttcaatcagggtttccatttctgaactggcaatcttgtcattgttaaggtcttcttccgccgcttcgagcttcaacctaaggtcttctatctccaaccttaattcatcagcttccttatcagcagtatgaaaatcttctttctgcttggctacttcatcctccaaagacctgaccttatcctgaagtgcttcgatttcagattctttttcttggagcagagtcatttttgcatccaattctttcattgctgattctaaggactcgcccttgagaatgttagactgatcagcttcctccaacctgacctccaattccagtgcttttgtcttccatttgccaagtaactcctctgacctcgcgcgcgccttcttaacatcagcgatttcaacttcaagctgttcaaccacaccttccaattcaactgccctctgctcagcgacatttgctttctcaagctcaagcttcaatccagagttctcttcttcaagcttcctaatgtgctccacagcaccttttgacgagctccctacctcggaatcaagcagccctttgagatgcgccacctccgcatcgaggagcttgatcttctcggcattctcatctgaagccctcatggcatcatctgcctgggtaagcgccgcgttcttggcatcgattgcatccgctagctcatacctggcctgctcaagctgctccaccgtcgaacgcagtgcggccatgtcagcctcctgctggctctgcatgctcgccagcttcgtccgcagctcatcctccatgctcgcgctcgcctgctccgcttcggcatcgccggactgctccgccgccgactcctccgccgccttgctctgcgcagcgagcgcctcctggagcttcgcattggcctcatcagccgccctcttggcacgctccagttcatccaggactttccccctctccttctccttctccaccaactcctccttggccttcacgagctcctgctgaactgcagccagcagcgcctgctgctcctgctcctgggacgacggcttcacggccaccggctcttgaggcgacggcttcgcggccaccgactcctgagcgggcttcgtcgccttcccttgcttctctggaggggtggtgatccgggaggcgctcttcttgcggtcggccgagccgggggactgggacttgtcggcggaggggcgcggcggcgccttgggcacggccggcttcctcgcaatcttggcgctcttgggcgtcggcggcgtgcccttcgcctccgccttgccgttgctcttcgcctcggcatggccagatttggtcttggagccctgcattgctgcctctgcttccgcttctgcttctggttcttggttcgtgcacctctactactctaaccaaaggagtcgccttgaatgcgaaattggaggaaggagtggtgaggagagcggctggccgctctgttgtgccactagtagaagaacatggaggagtggagggtggaattaacttgctgccaaaaaaagaagggaaaaaaacgcaacttttgatcaatatctctgcggtttctgctcacgttttcctctgctgtttttattcggagcgagagagagaagtgaagcgaagggaca

SEQ ID NO: 19538 - DNA, 388 bp, Oryza sativa
  unsure (1)..(388): unsure at all n locations
  Clone ID: PAT_MRT4530_2498C.1
cagattcatgatgttgccatcagnnngggtttttttttttttttttttttttaagaagcaaaacattttaacttggagatatattttagggcaatccagtaacatatagagctatattacagcatggggcagttcattcagtataaagctccgaattattcatggggatatcatggacatgttcctaacaacatgcagttctgcgtctccatgtttgctagcccacgcccaatgcacgactgttacagcaagcaaatcatgctccgcaattacatatcgctgtgactgagcttgtaacttctaggccatttgccatcggggtcgaacgaaagaagacttggcgcgtgcgcccgttgggctgcgttttntcgaacacgtccgtgccccg

SEQ ID NO: 19539 - DNA, 419 bp, Oryza sativa
  Clone ID: PAT_MRT4530_24990C.1
ctagagaaagggcacactctcgcggagagcaggccagcacaaggaggccatgccatggaacacatcgaacgtgatgcggacagagttgaggtggagcaccgcgaggtgggcgaagggcggggagacccaccagaaaaatcgggcagagaagttgatcccgtgaagcatgaggctcgaaggagcagtggtcaactactggagggagaaggtgcctcaccagccgctccactgggtactcgagcttctccagctgggtgtcgggggtgaactcgactagctcagagtgccccactagctgcgaccgcatggcgtcatgccatcacaggaagagcaccgacatgaggatggcattatcgagcgggaggatatctcgtgcattttccccaggatcctctcgaagtgtcgcacgtcgccgatga

SEQ ID NO: 19540 - DNA, 759 bp, Oryza sativa
  Clone ID: PAT_MRT4530_24991C.1
atggcttctgaaacaaccagccaaaaggcaagtagcgatctgatgagcatgacactcctgatcgacaccaaggcgcagcgcgtgctgtacgccgaggcacgcaaggacgtcgtcgacttcctcctctccctcctcgcgctgccgatcgcctcgggcatcaagctgctcgggaagggctccatggtcggctgcgtcggcaacctctacgccagtttcgagaagctcgacgacgccttcgtccaggccgacaccgccaaggactcgctgctcagccccgtcgtgctctcgccggcggccagctccaacacctccgtcctccgcttgccggcgccgtcttctgcgcagtcaagcaagagcttcttcagatgcagctacagcagcaacgcctgcagaagcttcgtgacgaacgcgagcggcacgaagtgtcctaactgcggcaaccagatggcaacggcatgcacctatgttgccggcggccaagatcagaacacgcagaacgccgccgccgaaggggcgaaaggaggagggttcgtgcagggcatcgtgacgtacacggtgatggacgatctcaccgtggcgcccatgtcgtccatctccagcatcacgctgctcaacaggttcgcggtcaaggacttgggcgcgctcaaggagaagaccgtgcagctcggctacactgagggtctggcgattcttaaggcttccctgcaatccaagactgtcctgactgacgttttcattggcctgaagcctgcttcctag

SEQ ID NO: 19541 - DNA, 1062 bp, Oryza sativa
  unsure (1)..(1062): unsure at all n locations
  Clone ID: PAT_MRT4530_24992C.1
ttccccaaaaaaggtttttttggnaaaagncccccctttgggaaatttttncccaaaaattttttgggggggggggaaaacctttgggggtttttttttttnggggggttaaaaatttaattttttttaaccaantttttttggnaaacttaaatttaaggtttcccccccttccccggttgggcccccgaaaaatttttcccgggggccaanccggaaaagnccccgggggccggaaacttcccccttccccgggccccgggccaatttcccccccggaaaggccaaaaagcccaaaaggcccccggccccggccccggccccggaaancgnaaaccccttaaancccttcccccccccggaatttccggccgggggcccaatttgtttccnaaaagggccgnccggggcggaaacttggggggtttctttacccaaaaaaaaaaccaaaaccggggccgggggggaaccnttttcccgtttnnggccccattcccgccccggggggggccggggaaacttaactttggccgnttggggttggggncccgccccnaaataacccccgcccttttttccccggttccngggaataacaaaacaattcccttcccacggccggccggaaaccaacttccccaaaagaaattntttgccngaanaccttaagccggggaaacaaaaatttgccgcccacttananccattcttttccccgggcntttcccaaaagggttggaatanttccaaaaaanccttcttggccccccaaaaaaaaacttttngggcttggcccaaaaaaaaaaatttggcttggtttncccaagccccccccnggcccccnantttaaaaaaggggattgaaaccttggcccccttgnccccnttggggggnaaaaaaanttgggttctttcccaaannannttctttnttttttttanaaaanccgaaattncccttccccccntntttttnttngccctttttcccantnnttttcntttngggggggggggggtttgnaaanannnttnnaaaaggggggnaaaaggggntttttt

SEQ ID NO: 19542 - DNA, 875 bp, Oryza sativa
  Clone ID: PAT_MRT4530_24993C.1
gaacagaatggctataactgtacgaactcacaggacaaccaagctcttcggcagggaaaggccactgcatgacgccctaggtggacacaaagctgcagacatcatcctgtggagggagaggagggtgtcggcgtccatcgtcgccggagcgacggtggcatggtatctgttcgaggtggcggagtaccatttcctgtcgctggcatgctacctcgccatgctcggcatgctcgtcgtcttcatatgggccaatgcttctgctttcttcaacctgccggctccaagaatccctgaaatttttgtgtcggagagaaccaccaggcaagtgatcctggccttgcacagcaggctaacttggttcgtgcacaggctctacgacattgcttgtggaaaggacatcaaaatgttcatcttgacggtgttctccctgttcatagcgtcagtgatcgcaagctgcttcagctccctgactctcctgtacctagttgtgctaggcaccatgacgctgcctgtgatgtacgagaattacgagagcgaggtcgaccacctggtgtcgacggcggtgcacgatctccggagccacgtcggcgacatcgattctggtgttttcaagaagatcccaagagggagaggagccactgcaaattgaatcaattgatcagcaactaatcaaccaaggagatcgatcgatcgagaccaattaagattgcagcatcgatcgaccgtgcatgacctaacatcacatgcatgtgatgtgtacatataacgctctttaaaccggattaagaatatgatccgtgcctgtacatccgaaaggaaagaaaaggctgttacaagccccttcttccattactattgttcatagtaacatacac

SEQ ID NO: 19543 - DNA, 402 bp, Oryza sativa
  Clone ID: PAT_MRT4530_24994C.1
gaaaatagaaacaaaatattgtcacttaaaaggaaggtcataatgttgccgagctagaattataggggagcaagggttgctcattgaacaagtgctaacaccgatgacagataaaacaaattgtcaaattaaacatggcattccttggaatctaatagactgcaacatccaaaagatgctcatgcgccaagatgtctttgaactcatctgaatttcatctttcaaatgtaggtacaccctgagagaattcaaggcttgagggccaccgcactgccgacctttgagctcttgtcaatggacatggtgtcaacttttgctgagatggtccacacagactttgggcttcactcgtgctggaacatcgcgctggccttgccagaattggggaagcgttcctttacg

SEQ ID NO: 19544 - DNA, 304 bp, Oryza sativa
  Clone ID: PAT_MRT4530_24995C.1
aagaccttatctaaattctccaaacaatactccagtactcaccgatactccagtactccttcagaattcctcctaggaagctacactcgtcgaggcagaagtcggatgagcgccaaacttccgggcactccttcagagcttcccctcgctttctacctatttctaatgtacaaaagatacaatagagcctcttgtaattcagctcaaagttgtgtgtgcttgaagtgagatgaagacctccttatataggctccaaatgacagttaggggtatgggaaatgaccaaaacaccctgcaactgcct

SEQ ID NO: 19545 - DNA, 430 bp, Oryza sativa
  Clone ID: PAT_MRT4530_24996C.1
gggggcaaagattggcccattaaatccctttggctcaaccaccctggcagctcgcaatcagataatggaacccattgctaaataacaaattccaaaaaaagaatgtgaatggcccaccctcccctgggggaataaaccaacgtggccttaacaacattaaataaaaaccatccgaatttcccaaacaaaaattggtccatcatgggaagggggccagggtggacggctggagccccgcggggaccttgaaggacctgaacccccccccccacccgcgggtgtccttgagcatgtgcaccaggacggtgtcccgcccgaagttgtccatgtcccaagtgggggcgtacatccccggcctgggggtggaccggttcttgccccggggggcgatgttgagccatttcccgacaggagggcctcgggcccgcgt

SEQ ID NO: 19546 - DNA, 562 bp, Oryza sativa
  Clone ID: PAT_MRT4530_24997C.1
gcgatggtacctcgagccggccgggaccacaccggccacgcgcggcacgagctctccggcggcggaggagatccacgcgtcgcgcgccctaatggcggaagaatccgcaaccctagacgcgccgccgccgcttgaacggtccccgcaacgggagtctgcggtcgacgaggagacccgggccctcgtcgtccccgatgccggcgaccttccgccgttcccgccctccgccgtggaggccaacttcgcccgctacttcgtcgctgcttcagcccatattgcattgaaagaggaaggggggataactgccgttgatttcaatgttgggaagtcagaccgcagtgagatgaaagtcacaggaaaacgcaaaaggaatgcacaacatttgcaagaaaattcagcgctgtgtaaagtctgcacaagtagtaattcttttgtagtgaggtgttgtgtgaaaggatcacttttggagatcaatgatagattgatcaaacaaccagacctgcttaacacctcttggtcagacatgtatggacatattgtctatagttttctgtatcagtaa

SEQ ID NO: 19547 - DNA, 162 bp, Oryza sativa
  Clone ID: PAT_MRT4530_24998C.1
tttttgtgagacgagtccattgagtccgcacgaaggatagcaggcagacgattggtgtggccactaacaaggcacggcctgcgctggcggacccaggcaatcatccggcggaggatcagcgtgaccagggccatatagtagacgagcaaggtacgtagctga

SEQ ID NO: 19548 - DNA, 251 bp, Oryza sativa
  Clone ID: PAT_MRT4530_24999C.1
cggacgcgtgggctgatctaccgttctcactctgatgcaatatacagttccacgcatcattggacatggacgtcttcaccttcggcttctccatactaggcctactatcatcctgctctactgcctactattgcttgcgcacgacctggcaaaaatgaacaaacacacacacgtactacttatataaaaacgaccgatagcttttatgtacggcctgacacacgcacgggcacatggcaaactcaatggta

SEQ ID NO: 19549 - DNA, 104 bp, Oryza sativa
  Clone ID: PAT_MRT4530_2499C.1
cttgtaatctgggctgaattatcaatcaagaaattatcaaaccatccaaatgaggaacatagataatttcttgattgataattcgtaccttggaatctgggctg

SEQ ID NO: 19550 - DNA, 738 bp, Oryza sativa
  Clone ID: PAT_MRT4530_249C.1
atggcgacatcattttcaccaccggccgcctacgtcgccgtcgacgggtgtcctcgcctatacggttggttggtcacaccaccgttcataggcgtccatgtcttcaccgaccggcttgccttcgccgccgctgaccggtgtctctgcctacacgactggcctattatgctgccgttgttgggcatctatcgttttcaccgaccggccgcctcgtccaccgccaactggatccagatccagatatgcacaatagggattcatggctttaagcttatctcctacgctttaggaatggatcagtcagaacatcaccgccggcttgccttcgccgtcgccgactggtgtctccgccaacatggctggcctattatgccgctgttgttaggtgtccacgccttcactgaccggttgcctcgtccgtcgccggctggtgttttcgcctatacggttggttggtcacaccaccgttgttgggcgtctacgtcttcaccgactggcttgcctttgccaccatcgactggtgtctccgcctgcatggctggcctatcatgccgctgttgttgggcgtctacaccttcaccgaccggccgcctcgtccgccgccgactggtgttttcgatatacggttggttggtcacaccaccgttgttaggcgtctatgtcttcaccgccggtttgccttcgccgccgccgactggtgtctccgcctacacagttggcctattatgccgccgttga

SEQ ID NO: 19551 - DNA, 2523 bp, Oryza sativa
  Clone ID: PAT_MRT4530_24C.1
gtaatgtgaacctgctgctctgcgagttatcggtgttcatccagcagcgagagcggtggcagtggtactaggagtctaggacgagtggtgggtactggttgtactggtggtacggcggtttcagcggcggagttctcgcgggattgtctcgttcgtctgatccggcgctgggggacggcggttggtttctttttcttctgctgcttcgcgagcgggtgtgagagatcggttccatgcgggggtcgctgctgctggcctcgggccgtcagggtttgcaagcggaatctactcaactatgacagattagcctcaaaataaatgatggcagctgaggttaatcaaacttttttcgcgtggtcacaaggagaaccaactgaacgggacggttctcaaggtgtatctgtgtcccagaaaattgatcatggttccatctcctttggaagattcgaattggagtctctatcatgggaaaagtggtcagtattttctgatgacaagcgtcatgaagaatttggcaaattcaatggtttagttgcacagaagaaggcatattttgaagagtattacaggaaaattagagaactgaaggcacagcagcaaaaccagcaaactgaacttattttggaatacagtggtgatggcagtgattcgagtcagacaggagaatatacacaaggtgcagagcttgaaactcctactggatctggaactatcgttgatgattatgtggagcaaggtgcacatgaaactacctctgagcaaggattgacatgttatgatgaccatgaaaacgagaacttcaatgcagaattctcctcatccaatatttcttcttcagctgtaggtttacagcaaactggccgggatgctagagaaaatgtacacggtgatgattcggctggtaaaatggatttagagcagcagaatgccatttctggtcatagtcttggaacagcatatgaagttgtaagggctcctaaaagaattatcgagaaagactccaggcttagatatgctccaaagatagtaccaaagtctgtcaaaacctcctccgatagtcctctggatcgcacatctgttagtaagaggcctgattctctgaagcttggcatgagtattaaccagaaggctaagactgacaatgatcgtttattgagaggaccaaatgtagcgcctcataagatgtctggatcaaccgaaaggaacaagcttacaacaaaacaaacaggtgtcagaagaccttcctctgcatcctcacaacggccctctgtgggagagcggcaccggatagccagggagagcataaaaaagcctgctgatgtttccaccccacggcgtccttccactgcagaaaggcaccctgtcaccacagagcgtgcaaggaagcaagccgatgtagatacaccacgccgaccatctacttctgaaagacgtgctgtcaacaaagggagtgctgacatgaccactacacatcgcccctctactggagaaagacgatctgttaccagggagagtgttctgaagatggacgtaagaacacctagcaagacaaggcctactatgacgcaactgaagggtgcaacaaccacagtgttaaatctgaaaaacatgatggcatcagatttcttagagttttcatcttcatgcaggcaatatcagagaactggaaggaccttcgaaagtgggcagacactctgttgggtcaaaaattacggacctgcaaattgctggcaaacagaaatcaagctctgtccaccttcctccacggaaactattgagttccagtattggagaaccagcactgcaaacctttacaaggccaaaaaagaaagatgttgcagcgcaatctcgagcatctacatcgaagagagcaatgactttgcacactggaaacgtaaaggggaggagttcaaatccacccccaccaccacctccaccgcgtcggccttcacggacgacgaacagaccaaatggcagtttttccctagagggctgctatataacggaatcccatttttgaacgggatgataccggttaggtgtcaagtccggtatcagatgatacatatcaggtatcagacgattctaccacgtttttatgatacttgcgaggtatcagatgatacctatcaggtatcatgtgattctaccacgtatcaggtgatacttgtaaggtatcaggtcctaatacctaaccggtatcagatgatacttatcagccgcaggcggcacccgagggtcgtctcctcctccggccgtggccagagcatcagcgtgctcaccaccggcgacgagacagagaccgccgcgtggttctcgaacacccttgacgatgcgctagagaaggacctctacacgcagctttggcacagcgtcaccagcgatgcgttcccggcggcggcggggccaagctctcaccaccctccgacgccggacttgccaccctctgacgaggccaccgatgaggagcggcatcgggtcgagctagaccggcaacatctattcgaccttctgcggcagtaa

SEQ ID NO: 19552 - DNA, 984 bp, Oryza sativa
  Clone ID: PAT_MRT4530_25000C.1
atgtgtcgaggcacatcagaactattggagaaagagcatggaatatcgcctgaaaagttcattgtccgttcattcaaggaacgatcaattgctgacgacgagcgtctaatactcttctgcacggagaaaacatcaggccgtggcggtggcgctgctgcccgtggagatgggatattgggatcccgcggcgtctttggcttgcttgccgctaccagcggcgaggcggatgggactgtgagatcggaggacagaggcggcggaacagcggcggtcgagagggcactgtggcgcgaggggaagaaggggagcaagttgctagacaagagctgggcggcggcggcgatgaaccttgagggcagtgttgtagatgaaggcggtgggacaactgtcgaactcatccattcgggagaacgcttggatggcctcggcgtgacggtcgacagaggattgcgtggcaacgagtgccgcgaaagagtgagcggaggtgacggggatggcgttgcagaggagggcatccgagacggcgtgcaggggcatagcgagaggaggaaaagaaatgggagcagtgcacgaagcaacgacgggagtgtggagaggagcacgtggatggtgtcgacgatgtcgagcttgatggctagagagtggggatcaacgcacctatgcaacgcaaccctctttctcgcctcctcccccgtcgcgacgtgcaccgacgccgccacgcgcctcatcgagctccataaccaaatctacttcgatcgtgtcatctccgccaccaccgatgccgccgtacaccttgtccttcccatggagagcccaccttacctcagctgcctacaacatcgcgctcggcggttgcgtctcctccggaggtttctggtgtcatcgcctgccaaggtcgagaatagggaagaaagaaagaagaggtggcagctgaggcctgccggctgcctcaccgccgtcaatgccacaattagggacatttaa

SEQ ID NO: 19553 - DNA, 1749 bp, Oryza sativa
  Clone ID: PAT_MRT4530_25001C.1
gatctcccactccattattcgcctcgcccattgccccgtggccacgggcgaagccggagggaggggagagacgcggttcctcggtcgccatggacgggctcatcaaggggctgatcaacgtggcgatcgacgccgtcgaaggcgccggacgaggtgagcggggcggcgaggacgacgcgccgaggaggcaccgccccgcgcgggaggaggaggagggccgcggcgacgagcggtcgcggtcgacgtgggccgaggtggtctccgatcacaagggcggcgaggcggaggagcgcccggaccatcggaattcgaggcgggatgggaggcaagagaggagggaggatggggattgggagagggtggatggccggaagcagcatcagcacaaccagtatgaggaagagtacaggagggacagtagtagccgacgcccacagcagcatcagcaagcgccagcttacaggaggcagcaacaggatggagatgagagaaatgatggagggtggcagactgttggtgagaaaaagcatcatggaaggccacagcagtctgaagcatggaatgcatacagaaggccaccatctgaacaacagtactgtgaggatgctggtcagatccaccatggcctaaatgtagaaccaaccagggaggagctcaacagcttatcaagagcttgtagccggctgtgggaactcgatatgaaccgcctaacacctggtaaggactacagaatcgaatgtggcgaagggaagaaggtatatcagaagggtgatatggcatctgaaactttgttcagctggctaggcgatgatgtgcttagaaagcccacctactctcgtttctgcgcgcttcttgacaattacaatccacatcaagggtacaaagaagttgttactcagcaggacaagcacgaggaagtagcatttattgaagagattgccaggacagcgccaatcaagtacttacaccggtatttagtgctcaagggagtcgcgtctcaagactatgaggacttcaagagaatgctgacatcgctatggttcgatttgtatggaagaggtggcagttctagcagctcttctgcatttgagcatgtgttcgttggtgagatcaagggacgacgaggacagggagagaatgagttttacctggaagaagccaatgggaatgtggattaccaaggttacatattcccaaggaggcgtggggaatcgcctgattcagagacacagctattgactattcagtttgagtggcacggtgttctgaaatcggtatccagcactctgattggtgtcagccctgagtttgaggttgcactctacacgctctgcttctttatgggaggggaagataaccgcgttgagattggcccgtacggagtaaacatcaagtgctaccgaatgggaaacagcaaaattgggtcagcatttccaattgcagataactgaattcgttccatgcctgctcctgcgtgtatgtgattccttcagctttcagtttcacgaagttattagtgtgctgttcgatttggtcgtttacacaaaagaaccacattgttcaatttgttgtcacaatgtctctactgaaaattgtattatttggattaaccatgctgtacaagttgtagtcacaaagtcctgtaatttgtttttctcaaaacccgtaacaaaaaaatatcatctcagcacaaaaaaaaaaaaaaaaaaaaaaggggagggcctcgtgccgaattcctgcagcccgggg

SEQ ID NO: 19554 - DNA, 572 bp, Oryza sativa
  Clone ID: PAT_MRT4530_25002C.1
tcgggtcaagcacgaggaagtagcatttattgaagagattgccaggacagcgccaatcaagtacttacaccggtatttagtgctcaagggagtcgcgtctcaagactatgaggacttcaagagaatgctgacatcgctatggttcgatttgtatggaagaggtggcagttctagcagctcttctgcatttgagcatgtgttcgttggtgagatcaagggacgacgaggacagggagagaatgaggtctcaggattccataattggattcagttttacctggaagaagccaatgggaatgtggattaccaaggttacatattcccaaggaggcgtggggaatcgcctgattcagagacacagctattgactattcagtttgagtggcacggtgttctgaaatcggtatccagcactctgattggtgtcagccctgagtttgaggttgcactctacacgctctgctttttatgggagggaaagataccgcgttgagattggcccgtacggagtaaacatcaagtgctaccgaatgggaaacagcaaaattgggtcagcatttccaattgcagat

SEQ ID NO: 19555 - DNA, 277 bp, Oryza sativa
  Clone ID: PAT_MRT4530_25003C.1
ccggccgggaacactatcgctcaaggcatggcttttggtactggtagcgtcatggcacctacgaatgtatgatgattggaatgcggtccccgccacccttcaccatgaaaatgctgcctccgaggctgctgcctctgccaccccactgaccaacgccactccatctgattcatggagcatccattacaagggcttccaagaccgcattcaccactatggaagtgacatcagcaagtgtcaaatctaagtggatatgctgaacgatagccgccgaggc

SEQ ID NO: 19556 - DNA, 5166 bp, Oryza sativa
  Clone ID: PAT_MRT4530_25004C.1
atgacgacgccgcgggcctcccagcgccgcggcggcgcggccgcgggcggcgcctcaccggcggcggagccgtacaacatcatccccatccacgacctcctcgcggagcacccgtcgctgcggttcccggaggtgagggcggcggcggcagcgctccgggcggtgggggggctccgcccgccgccctactcggcgtggcgcgagggccaggacctcatggactggctcggcgccttcttcgggttccagcgggacaacgtgcggaaccagcgggagcatctggtgctcctcctcgccaacgcgcagatgcggctctcctccgccgacttctccgacacgctcgagccccgcatcgcgcgcaccctccgcaggaagctcctccgcaactacaccacctggtgcggcttcctcggccgccgccccaacgtgtatgtccccgacggcgacccgcgcgccgatctgctcttcgcggggctccacctgctcgtgtggggggaggccgccaatctccgcttcgtcccggagtgcctctgctacatctaccaccacatggcgctcgagcttcaccgcatcctcgagggctacatcgacacctccacgggccgccccgccaaccccgccgtgcacggcgagaacgccttccttacccgcgtcgtcacgcccatctacggcgtcatccgcgccgaggtcgagtccagccggaacggcaccgcgccccacagcgcctggcgaaactatgacgacatcaacgagtacttctggcgccgcgacgtgttcgaccgcctcggctggcccatggagcagtcgcggcagttcttccgcacgcctcctgaccgcagccgcgtgcggaaaacgggcttcgtcgaggtccgctcgttctggaacatttaccggagcttcgacaggctgtgggtgatgctggtgctctacatgcaggccgcagccatcgtggcgtgggagagtgaggggctgccgtggaggagtctgggtaatcggaacacgcaggtgcgggttctcaccatttttatcacctgggccgctctccgcttccttcaggcgctactggatattggtacacagctccggcgtgctttcagggatggccgcatgcttgctgtgcgcatggtgctcaaggccattgtggcagctggctgggttgtggcgtttgcgatcttgtacaaggaagcctggaacaacaggaacagcaattcacagattatgagattcctgtatgcagcagcagtgtttatgatcccagaggtccttgccattgtgctatttattgtgccgtgggtgcggaatgcattggagaagacaaactggaagatatgttatgctcttacatggtggtttcagagccgaagttttgttggccgcggtttgcgtgagggcacctttgataatgtcaagtattctgtcttctgggtgcttctgcttgctgtaaagtttgcgttcagctattttctccagatcaggcctctcgtgaaacctacacaggaaatatataagttgaaaaagattgattacgcttggcatgagttctttggcaagagcaaccgatttgctgtgtttgtattgtggcttcctgtggtgttgatctatctcatggatatccaaatttggtatgctatcttctcttcactgacgggtgcatttgtggggctatttgcacatctgggggagatcagggacatgaaacagctgcgtcttcggttccagttctttgcaagtgcaatgtcattcaacattatgccagaggaacagcaggtgaatgaacgcagtttcttgcccaaccggcttcgaaatttctggcagaggctacagctacgttatggcttcagtcgatcattccggaaaatcgagtcaaatcaggtggaggcacggagattcgctcttgtttggaatgagataattactaagttccgggaggaggacattgttggtgatcgcgaagttgagcttcttgagctcccacctgagctgtggaatgtgcgtgtaatccgctggccatgtttcttgctctgtaatgagctatcacttgcacttggtcaggcaaaggaggtaaaaggacctgatcgcaagctttggaggaagatctgcaagaacgattatcgtagatgtgcagtgattgaggtatatgatagtgcaaagtacttactgcttaagataatcaaggatgatactgaggatcatgggattgtgacacaattgttccatgagtttgatgaatccatgagcatggagaagttcactgtggagtacaagatgtctgtactgccaaatgtgcatgcaaagcttgttgctatattgagcttacttctgaagcctgagaaggacattaccaagattgtcaatgctctgcagactctctatgatgttctgattcgtgacttccaggctgagaaaaggagcatggaacaactgaggaatgaaggtttagcacagtcaaggcctacgaggcttctcttcgtggacactattgttctgcctgatgaagagaagaaccccaccttctataaacaagtaaggcgcatgcacacaatcctgacctcaagggattctatgatcaatgtcccaaagaaccttgaagctcgtcgaaggattgctttcttcagtaattcgttgttcatgaacataccacgggccacccaggtggagaagatgatggccttcagcgtcttgacgccatactacaatgaagaggtgttgtacagcaaggaccagctctataaggagaatgaagatggcatctcaatcctgtactatctgcaacaaatctatcctgatgaatgggagttctttgtagaacgtatgaagcgtgaggggatgtctaatatcaaggagctgtacagtgagaagcagaggctgagagatctccggcactgggtttcatacagggggcagacactatcacgtactgtgaggggaatgatgtactactatgaagctctcaagatgctgacatttcttgattctgcatctgaacatgacttacggactggatcccgggagcttgctactatgggctcatcaaggataggatcttcgagacgggaagtgggttctgatgggtcaggatattacagcaggacatcttcgtcacgtgcattgagcagggcaagcagtagtgtaagcaccttatttaaaggcagcgagtatgggactgtccttatgaaatacacttatgtggttgcatgccagatttacggtcagcagaaagctaagaatgaccctcatgcttttgagattttagagctaatgaagaattatgaagcactacgtgttgcctatgttgatgaaaagaactccaatggtggtgaaacagaatatttctctgtccttgtgaaatatgatcagcaactgcagcgggaggttgagatttatcgtgttaagttgcctggaccactgaagcttggtgaaggcaaaccagagaaccaaaatcatgcactcatcttcacaaggggtgatgctgtccaaactattgatatgaaccaagacaactattttgaagaagctctcaagatgagaaatctgctagaggagttcaatcgccattatggaattcgcaagccaaaaatccttggggttcgggaacatgttttcactggttctgtgtcttctctagcttggttcatgtctgcccaggaaacaagttttgttactctggggcagcgtgttctggcagatccactgaaggtccgaatgcattatggccatccagatgtctttgatcgtctttggttcttgggacgaggtggtatcagtaaagcatcaagagttataaacatcagtgaggatatatttgctgggttcaattgtaccctccgtgggggtaatgttacacaccatgaatacatccaggttggtaaaggaagggatgtggggctcaatcaggtttccatgtttgaagccaaggttgctagtggcaacggtgagcaaactttgagcagagacgtttatagactggggcacagattggatttctttcggatgctctctttcttttatacaaccatcgggttttatttcaacacaatgatggtggtgctaacagtctatgcatttgtatgggggcgcttttatctcgcactgagtggtcttgaggctttcatcagcagcaatactaactccacaaataatgcagcgctaggagctgtccttaatcagcagtttgtcatacaactaggcattttcactgcactgcccatgataattgaaaactcacttgaacatgggttcctcactgcagtttgggatttcataaaaatgcaattgcagtttgcatctgttttctacaccttctcgatgggaacgaagacacattattatgggcggacaattcttcatggaggtgcaaaatatcgagccactggccgtggttttgttgtggagcacaaaaaatttgcagaaaattataggctgtatgctcgtagccacttcatcaaagcaatagagcttggtgtgatattgactctttatgcttcttatggtagcagctctgggaacacattagtgtacatcctgctgacaatttccagttggtttctagttctttcgtggattcttgctccattcatttttaatccttcaggattggattggctgaagaattttaatgattttgaggatttcctaaactggatttggttccggggtggaatctcagtgaagtcagatcaaagctgggagaagtggtgggaagaagaaactgatcatcttcggacaactggtctgtttgggagcatattggaaatcatattggaccttcggtttttcttctttcaatatgcaattgtttatcggctacacattgccggtacaagcaaaagcatccttgtctaccttctttcctgggcatgtgtcctgctggcttttgtggctcttgtgacagttgcttactttcgcgacaaatattcagcaaagaagcacatacgttaccggcttgtccaggctattattgttggtgcaacggtggctgctattgttctgttgttagaattcacaaagttccaattcattgatacctttaccagccttttggcttttcttccgactggctggggaatcatatctattgctctggtattcaagccttatctgaggagtagctgtgttgtcatggctgcctggactccaggagatgcagacgaggatcctgttcaatga

SEQ ID NO: 19557 - DNA, 451 bp, Oryza sativa
  Clone ID: PAT_MRT4530_25005C.1
cgcagtaggtttgattgatcaacctttacggttactcaattcagaattggccattattattggtttggtttatattctattgccctttatgattttaccgctgtattcttcaattgagaaaattgataatcgtttattagaagcggcaaaagatttaggtgcaaatgcattgcaacgctttattcgtatcactattccattaacgatgccgggtattgtggccggttgcttattagtattattgcctgcgatgggaatgttctatgttgcagatctattaggcggtggtaaaacgccattaattggtaatattatcaagagtctattcttgaatactaaccagttaccattaggatcggcagtcagtattgcattaaccttgctcatggcattgatgttgtatgtatattatcgtgctaacaaatttttaaataaaaaggtggagcttgaa

SEQ ID NO: 19558 - DNA, 432 bp, Oryza sativa
  Clone ID: PAT_MRT4530_25006C.1
atgacgaaggaagggccgacgacgaggttcggccgtggacgacgaccggccgaagacgtcgttcggccgaggacgtcttcgctcgtggacgacgatcggccgatgaagccgttcggccgcgagcgagatagagagagaggtggtggccggcggcggtggaggggcggccgacggcgcggtggaggggccggcggtggtggaggggccagcggctgccgcgcggtggagtggccggcgcggtggagggcccggtggcgagttgtggagctcacgcgcggtggagcggcagcaaggggcggcggtctcggtgacagcgcgcggacgacgacggtcagcggcggcggaggacgatggtcggagagtgaaggtcgcaggcgggcgacggcgacggacggcggaggcgtgcggcagcgaaaaaattcggcagcctaa

SEQ ID NO: 19559 - DNA, 177 bp, Oryza sativa
  Clone ID: PAT_MRT4530_25007C.1
atgtcgtttaaatatgtaaacatagtatgtgatacaatcatctctatgattgtgttaacgaccaaatttggtaacttcgatatcggaggtgaaggtcagaccgaagcgggatccaagacgaagatcattgtggaaacggagcaagaatcgactgcattcaaatcagctacgggatag

SEQ ID NO: 19560 - DNA, 108 bp, Oryza sativa
  Clone ID: PAT_MRT4530_25008C.1
atggcgtggagtggagtggagacgtcgggcttcgagaaagaaggctctggccctcatcggaagccgggccacgcggacgctgacatgtgggctcgagcgcatgcttag

SEQ ID NO: 19561 - DNA, 456 bp, Oryza sativa
  Clone ID: PAT_MRT4530_25009C.1
atggacgatgaacggccgacgacgaggttcggccgtggacgacgaccggccgaagacgtcgttcggccgaggacgtcttcgctcgtggacgacgatcggccgatgaagccgttcggccgcgagcgagatagagagaaaggtggcggccggcggcgtagaggggccagtggcggtggaggggccggcggcggtggagcgggcggctatagctcgagcgcggtggaggggtcggcggcggcggcggcagagttgtggagctcgcgcgcggtggagtggcggcaaggggcggcggtctcggtgacagcgcgcggacgacgacggtcggcggcggtggaggacgacggttggagagtgaaggtcgcaggcgggcggtggcggaggacggcggaggcgtgcggcggcgggccgttcgcctgcgaagatcgtttttactatcttcgcaagcgggccttctga

SEQ ID NO: 19562 - DNA, 321 bp, Oryza sativa
  Clone ID: PAT_MRT4530_2500C.1
atgatcaaggcaccgatagccgtgacagtgctaggccggagccggtgcctcgaggggctggctgctggcggcaaggatctagccttttcggcgcgggcgaccgactcatcccctgcgcgcacccgagctgacagcgacaatgaggcagcggggtgcagctatgtgaagacggcgtggcttcgattgtgggcacgaccatgcagagaggtgattgcgaagccaaccgggaagctggcggtgtcggctgggagcagaaggcgtcctctcatgctcctggcggaaggctggcttagcgtggaggcctgcggctggcggcggtag

SEQ ID NO: 19563 - DNA, 243 bp, Oryza sativa
  Clone ID: PAT_MRT4530_25010C.1
ggcacgagagagaaccctaattcgaacgaccgcaccgcaaaccctaatcctccaatagcgaatagcttctggtgacaatgcctttcaagcgcaggaatggaggccgcaacaagcaaggccgtggccacgtcaaattcattcgttgctctaactgcggtaaatcctgccctaaggataaggcgttaagcgtttctggtgaggaacattgttgaacaggctgcagtcagagatgttcaggaagct

SEQ ID NO: 19564 - DNA, 394 bp, Oryza sativa
  Clone ID: PAT_MRT4530_25011C.1
ccgttgacaagtttttttttttaggtttttttttcacctttacacgtattctaaccaggtgaataaaagtgtatttgtgtttggccatgcacagtgccaaagaggaattgccgttcgacttggccgcaatcaaattagacttacaaaataagaggtaccaaacacactgacaatatgctgggtatttttgcccgatccaccaataagacgaattcggctccattgtgagaaacattttgttccacaaaattcaccctacttaggttgtgtttatttcctattgatttaatcccttttctaactctgcttcttcctgttttatttattttaggttttctttatggttttttttttttatttctcacttgttttttttttgttatttgtttttttt

SEQ ID NO: 19565 - DNA, 372 bp, Oryza sativa
  Clone ID: PAT_MRT4530_25012C.1
gcatgctcgcctccgtcagctgggagcctcctgtgtttgccgccctcacctttgcggcggagggcttgtccaaactggacgactggaccgacttggcacattcctggcacactgccttcttcagagatcactgcagaagactgaagaaaaccggcaacagaaagccatctatggcgccttcgaggagcacattagacatggaccgacgattgacggaccagattctttttttgggaacaagaaagatccatgcttggattgaggtcgaacaccccttctgtgactgctggtgcttgctcattcattcggaggggttcctgacgctcttgaggagatcggggatgtcgtaagcgagcatgttgtcgacgccct

SEQ ID NO: 19566 - DNA, 459 bp, Oryza sativa
  Clone ID: PAT_MRT4530_25013C.1
atggcaaaggagtgcggcagcagcagtgtgatcgtcggggtggtgaaggtgaaggtggtgcgagggaccaatcttgccgtccgtgatgtcttcagcagcgatccctacgtcgtcctcaagctcggcaaccaggaggtctacgaccgtgacccgttcgtcgacgaccccatgggcgcggcgttcttcgagctccggccgctggtggaggcggccgcggcgagcagccgccgccgtaccccctccggcgttgacagtaaagaggacggcaccgccgtggtcccaaggagcgggagctccgttgtgtggtcggcgtcggaggggaaggcggcgcagggcctggtgctgaggctcgccggcgtcgagtccggcgaggtggagctgcagctggaactggaatggcacggcggcgcggctggcgacacctcaatgatcgatcgattgattgatcgtaactcgtaa

SEQ ID NO: 19567 - DNA, 273 bp, Oryza sativa
  unsure (1)..(273): unsure at all n locations
  Clone ID: PAT_MRT4530_25014C.1
ttgctttccctttccggggnaggccttttccggncccacgttgcccggatccaccccggtccaaatgtcctggatatgttgaccgatagatcccgagagcacagacaaacccagantttaggacgacataggtcaattctttggatgcgtgcattgtgtcttttgcctagttcagagttggtgcttgtagatatgcaagccaattttgcgctgtaaattacctgtacatagtctcccatatagcatgaacatgacggaaccaaaaaaaaaaaa

SEQ ID NO: 19568 - DNA, 327 bp, Oryza sativa
  Clone ID: PAT_MRT4530_25015C.1
atgacctcgggggtcgggaggcgcggaggcggtggccctggtgacgacgaccggctgcagactgcggcgacgatgatgatgagctgctgggctttggcgacggtgatgaagagcagcggcgatgccggaggcgttggcggcgcgtggtgcccagcgcggccgtcgtggagggcggcggcgtggcctcatgggggccctgccattcgtggttgtgccctccgggtagttggcaagcacggagggcgggcggccaatggcgtggccacgcggagggcggcgcccagagcggcggtcgccggtgtgaccgtcgtggagcagaaaaggtag

SEQ ID NO: 19569 - DNA, 213 bp, Oryza sativa
  Clone ID: PAT_MRT4530_25016C.1
atggctttgctggatcttgctatgaggatgaagagcacggacctgtgcagcccatcaattgagatcagggtggttggagcaagggtgagtgaaggcaacaacgatgctaccgagttccatatgctccatgggccaaatcccaagaacttcaccccattcctatgggatgctgccaaagcagatgagcaaaggacatcctcctacggtcactag

SEQ ID NO: 19570 - DNA, 123 bp, Oryza sativa
  Clone ID: PAT_MRT4530_25017C.1
atggggattcgacgcatgacaattcagaacagacagcaaccggccacgtacgggactatcccagaaaaaagtcgtaacactaagaagccatcggccacaacccgaagcgacaatgtgccatga

SEQ ID NO: 19571 - DNA, 743 bp, Oryza sativa
  Clone ID: PAT_MRT4530_25018C.1
ggatctgcacgttgtattactaccgagttcttggaaatagcgttgtaaaacactacagtcaagagaacttacaaaacgacaacatgccattaacgaattatttagtgattcattaactgactatagaggtaagtagatcattcgatgatatcacataaagcaagccatcataaaagtttgcatctttctggccaaccaacacttctacatagtaactatttctcgcagcactattagcctattactaacctaaaggatacatcaaaatctcaactatcacaatgacccaaatacgaccacatttcccaaaagggagacatatcattagcgaactgcgaatccacgcctaaaaatttactacagcttctagcttgtacagctgctaagaacgaattaccaaatcgatgcttcgaactcatatgtatgtaataacaactaaacaatagtagaatggccacagtataaaatatagttccaaacaaaaaagactagccttccccacaaacaatcaagcaaggcgcgccacctttacaccacggaccaccacaaatccctaaacagcgaggaaaacctagagattatcaaaacaccgcaaaacacacgcgcgacacgggggggatcacagatccgagcggcaaacctggcgatcgaggtcgaacgggaggcgatcggagtagcgggcgagggcgtccactaggcgccgcaccagatcagccagctcgtcgtccttcccgccccccgcc

SEQ ID NO: 19572 - DNA, 170 bp, Oryza sativa
  Clone ID: PAT_MRT4530_25019C.1
gtcttttctacttgcaccaccagaaccagtaggggagcatgaaaggccacagggagtcgatggccccaattcggcttagaaggacaccatgtacgtgaaggactgtaagaacaatcatcaggaatgggggaccaagcaaggaagatgatgaaaaggagcaccaacctcag

SEQ ID NO: 19573 - DNA, 1305 bp, Oryza sativa
  Clone ID: PAT_MRT4530_2501C.1
atggcggtgaacgaacttcccgacgaactcctcgagagcgtcttcctacgcctcgcatcgcccatctgcctcgtgcgtgccgcgtcgacgtgcaggcggtggtgccgcgtcgtcgccgacgccggcttcctccgcctctaccgctcccggaacgcgctcaccatcggcaactacatcgccactgacacgggcatcttcgccaactggtcccgtccttctccttcctgcagggtgagtagccttgctttcgtgccggcggccgctgccgtgacgagcagcaaacgcttctctctcgacttcgtgcccgagcccggcaacacttcttgggtgctcgccgacagccatggcggcctcgtcctcctggtgcctgagagatactattggggcaacgcatcttcggtttccatagtcgtttgcgagccatggacgcggcgctaccggacagtgattcctccattggagaacaaacacgtcgcctgcctcgacgcctccctcctcggcgccggcaccggcagcgagaagaagaacaacaacaacaaccatgtcgccggcgtgtccaactttaccgtgctactgattctctataccttcgggagtggagcaaagacggcctgcatcttctccaccttcaccggcgccgacgaggagctgcggctgcgcctcacaagaagcatggacctcggtgaccttatccggcccaagggcgtcccaaggagacagagacatttcgatgccgacgccatgcacttcgccggacgcgccggcggctccctctactgggggacaatatacggcgttgtgttcgctctcgacgagagcaccggcgagctctcgccgctgacattgcccaagtgctgcgccagcgaacaaccccggttctactaccgccagtggaacctgcgtgccgtcggcgatgatgccggaggagggcgcctcgtccgagtggtgcagcacagcgacctagaggtgctgacgccgctccacgctggcggcggcagggagtggacggtggagaagacgctccggctgccggagttgatcacgcgtggcttgcccgagctggaagactacagccgcctcgtcgagaggttaactggcgtcaagatcctggaggtgatgggacgatccgtcgtgctgactccgccggaggggtcggggatgtggcccttctccgtcgacctcgagaccatggagctcgagcacgtgtatgactggggcgacgaactggtccagaagtgggtgttccccgtcaagcctccatggccgccggccttgcccttgcatgccaccacggacgtccactga

SEQ ID NO: 19574 - DNA, 2742 bp, Oryza sativa
  Clone ID: PAT_MRT4530_25020C.1
atggccggcggcgacggcgatcgcgcccgcgcgccgaagcggcacaagtcctcggcgccgtcgaggtcgattgacgagaccgccgaactggactacaccgatgacgtcgatgacgacgtccgcgatgccgatagggaggtgaagaagagggacttcaccaagctagagctgaagccggatcacgcgaacaggccgctctgggcctgcgccgatggccgcatcttcctggagacgttttcgcccctatacaaacaagcctacgatttcttgatcgctattgcggagcctgtttgcaggccagaatccatgcacgagtacaatctaacaccccactcactatatgctgcggtctcagttgggcttgagactagcactataatcagtgtcatgagcaagctctccaagactaaactgcctcgtgaaataattgattttatccatgcatcaactgccaattatggtaaagtgaagcttgttctgaagaagaatcgatattttgtggagtctccattccctgaggttttgaagacgcttctgaaagatgatatcatttgcagagcacggatatctcctgaggattccgttggggcaccttcatttactattagcaaaacagctggtgaaatggctagtggccatgaggacttattagatggaatggaactggctgctgcaactgaagacaaggaaacacattcttttgaaattgatccttctcaggttgagaatgtgaagcagcgttgcttgccaaatgcactgaacttccccatgctggaggagtacgattttagaaacgacacagtgaatccagatttggagatggaattaaagccccaggcacgcccaaggccatatcaagaaaagagcctcagcaagatgtttgggaatggcagagcaaggtcaggcattattgtgttaccttgtggtgctggcaagtccttggttggtgtatctgctgcatgtcgtatcaagaagagttgtctatgtttggccacaaatgctgtatcagttgatcaatgggcatttcagttcaagctttggtcaactataaaagatgaacatatcagccgttttacatcagataacaaggagaaattccgtggaatggccggtgtagttgtgactacatataacatggttgcatttggaggtaaacggtctgaagactctgagaagataattgaagaaattcgaaatagggagtggggcttgctcctaatggatgaggtgggatatccattagtgatatttgaggtccatgttgttcctgcacatatgttcagaaaggtcatcagcattacaaaatctcactgcaagcttggtcttactgctacacttgtgagagaggatgaacgcatcactgatttaaattttcttattggaccaaagctgtatgaagcaaactggttggatttagtgaaaggtggatttattgcaaatgtgcagtgtgccgaagtttggtgtcccatgaccaaagagttctttgctgagtatttgaaaaaagaaaattcaaagaagaagcaggtcctctatgcgatgaacccaaacaaattcagagcttgcgagtttctaattcgattccatgagcaacaacgtggggacaagataattgtgtttgccgataatctatttgcactaactagctacgcaatgaagctccgtaaaccaatgatttatggttccacaagccatgttgagaggacgagaattctgcatcaattcaagaacagctcagatgtgaatacaattttcctttcaaaggtgggtgataactcgattgatattccagaagcaaatgtgatcatacaaatttcatctcatgctggttcacggcgtcaagaagctcaacggttgggacgtattctcagggcaaagggtaagcatcaagacaggatggctggtggaaaagaagaatacaatgcgttcttctactctcttgtatcgactgacactcaggagatgtactactcaactaaaaggcaacaatttcttattgaccagggatatagcttcaaggtgatcaccagcttgccgccacctgaagaattacctaacctgaaatattacacacttaatgatcagcttgaacttttggcacaagtaggtgttttctgtacctgttgtttcttgcttgtaaactcacttcgccacttaaaccagttgctgagtgcaagggatgacatgattggcattgagcacttggaagaggattctgatggcaaggctcttatgaaagcacggcgatctgctggatcaatgagtgccttttctggatcggggggaatggtctacatggagtacagcactggtaaggggaaggctggagcttccaagaaaccgaaggacccttcaaagaggcattacctgtttaagaagcgttatcaatgatcttgataaccggcgttgtttccttcctttgcctatctcatctgcaaaaatactgaatacgagttatggttaaggaattccaatgattaacgtggagtgggggaggttcccattagcgcatcgaccagcatttttgttaacttgccgagatatttgcatcaacatccaacggcaataagcacttatttggtcgcacgcccttgtgtttgctaatgagaaaaaacttggcatttgccttggtcctgaagatgtaaatactgttgatgcaaatacttctgtaaggcttatatgacatctagttattttccggacgtgaacgcatcatatccttttttttttacagaacatcaattt

SEQ ID NO: 19575 - DNA, 488 bp, Oryza sativa
  Clone ID: PAT_MRT4530_25021C.1
cccacgcgtccgcccacgcgtccgcccacgcgtccgatcagggtaagcatcaagacaggatggctggtggaaaagaaaatacaatgcgttcttctactctcttgtatcgactgacactcaggtgagtctcaccactgtgtctcttttggcatatcaattttcttgtttgtgaaatccaccaacaatggcgatttgtcaaaagtcaaaactgtatatgaccatgactttttttttattcatgcaggagatgtactactcaactaaaaggcaacaatttcttattgaccagggatatagcttcaaggtgatcaccagcttgccgccacctgaagaattacctaacctgaaatattacacacttaatgatcagcttgaacttttggcacaattgctgagtgcaagggatgacatgattggcattgagcacttggaagaggattctgatggcaaggctcttatgaaagcacggcgatctgctggatcaatga

SEQ ID NO: 19576 - DNA, 905 bp, Oryza sativa
  Clone ID: PAT_MRT4530_25022C.1
cccacgcgtccgcttttttcaagattatcagctgtcagacagcgtccttttacagccagccacatgaagaaacgtattcttgccggtgccttcgcttgccaaattaattcgctgattgggcagagttcttttgccaagaagaatacactgtaggctgaggagcagctgaaaggccatcgaatctgtcctacgactacggcccaaatgcctcttttgggttcggagattttttttccccgaacccctccaccaacaataacatcaccgataagtcagtactttttttcatcagttcatcaagcatgaaaccatgatccataggcttcatgctgaaatgaattctctcagtaaaaaaacatcatttgggtaagtaataaattcaatgtggaaacggaatgattttggatgagagttggagcaggataattaactgacggacaacgaattttacagttcgactgtaaaacacgaagagtagtatctcgttaccaattgcgaaccatttcttaacaatgatttgatttccatctcctttctacaagtaaaaacatattgctacaaagcaagtagatgtcatcaacaagtctgtgagcagctaaaaattttgattctggatttccttcttattcctaccaaaggagttctgatgaatgggtagtcaattaactacttactggacaattagcatgtaatatgttgctctcttgtttccattttgattaatcaatcagttcatcccttcctgacattgacctgtgctctcgtcatgctccatgccttgagctgcgacaccttcaccgtgctactgccaaacctttctttaatactactcttgccaaacctttgcgcccggcggcgacctctcccagcgcggagagggaggaggaagcggaggcggtggcggt

SEQ ID NO: 19577 - DNA, 1008 bp, Oryza sativa
  Clone ID: PAT_MRT4530_25023C.1
cttctggttctccatctgcatcatgttcatatgatgtctattgctttggaaaagttttgttggagctggtgactggaaggctaggtatcagtgcatcaaatgatgctgcaacgaatgagtggcttgatcacactctgcgctacattaatatttatgagaaagagctcatgagcaagatcattgatccatcacttataattgatgaggaccatctggaggaagtctgggcaatggcaattgttgcaaagtcctgcttgaatcctaggtcttctaaacggccgccgatgaaatatattctaaaagcactagagaatccgttgaaggtggtgagggaagataacggcggctctagctcagcccgtttgagagccacgtcatcacggggatcatggaatgctgcattcttcgggagttggcggcatagctcgtctgatataggtccttcaagggatgacaacttgttgaaacgctcagagacgatcaaatcatccggagggagcaatggtgaccattcttcctcccgcaggaggcaatcgaaggagatcttccctgagccatctggttcacgtgacaccgaggattaaggagctttcttttgtcttgtgacccttttagtgcaaagagaagtccatgaagggtggcagctgtcgaagcgctgctgctaccttgtgattgaattctttcagctgacagatcgaagcgtgaatttcctgcatgtcattgacttcacaggcagcatactggcatcaggggtaccatttttcggggtggactgggaagcgatcgtatagtggattagtggttggtgcccaatgcatgatctggacaaatggcttggcaatgttgttatttttctttcccctcttgattaaaaagaaagaatggcgagctgattctttttcttcttccctactgtaattgattgtttcattgttgatcatagcagaaatgttcgttccattcaaaaaaagaaagaacaaatttttgacctgctttttctctctctcc

SEQ ID NO: 19578 - DNA, 357 bp, Oryza sativa
  Clone ID: PAT_MRT4530_25024C.1
atggtgcccaaccacaaatcgaaaagtcacccccttactggctgcaagatcttcttggagattgccggatctaagatccgcgccccctgctgtctgatgcaccaccaccgagatcaacctcgagacatatgtgtggatgatagcaagatgggaactccagatcgcctggtcggattcatcgacatcgatcctcgtgaaccctctgtccttcacagcttggatgatcaggaatcttcaggatccaattccccgcacgaagtgaatgtgatcgaaggcatcgtcgaggaagtacacgaagagggcgagattcgtccacgagaagaaccccgagctcctattccaccacatccacgctaa

SEQ ID NO: 19579 - DNA, 204 bp, Oryza sativa
  Clone ID: PAT_MRT4530_25025C.1
atggggcagataaaggaaaatgcagtggaagatacgggagggcacggcatgggcatcgcgccggccggcagcggcaaacgacggagaaaggcaggaggaaacagtacatacaagcacatcgtacgccagttatgttctgctcgctcggccccggcaaaggcgaatatatcaacgttatcggatctagcagcacacaatcactaa

SEQ ID NO: 19580 - DNA, 1465 bp, Oryza sativa
  Clone ID: PAT_MRT4530_25026C.1
atgtcacatcctcaccgcacgaggagctaatcatacaacgaacacacacacaatcggaatcgattaagagagcaaattgtgtagtagtgttgcatatggagacaccaaagatatcgggagtagcacttgcggcagccattgccgtcgttctggccatggcgaccacgccggcggtggcgcagaactcgccgcaggacttcgtggacctccacaacgcggcgcgacgcgtggagggcgtcggcgaggtggtctgggacgacgccgtggcggcgtcagcggggggagaactacgcggcggaccagggccgggggacttaagccgggcaaccactccctggcggcttggggaaccaagggccggctgacgctcgaggaacgtcttactggtggctggcggagacgtgtagcggccagggggctatcgcgtgtcatccaggtgggcatttcgtggcgcgagcttatcctagttggtgctgttgaaggctgcggagaggacttgttgcacctgcctcccctgcacgtgaggtagagtaggtcaccaaacttatccatgactgcaaaagggacagtgaggctctgtatctaccagtttggcataaaattgcataaatgtgatggatacacaaatcgcttattctctgttcgaggagcaggaagggaaaaagagaggatacgatgagtacatatcttttgtcagcctccttgctgatccccgatattgtggaatggcatatcctgaaaaggaagaagtccgtacccttctaaggcaggaccctaacttttggacgcataggcctttatctgaaatgatgattcgagcagccacagatgatgtccgcttccttctcagtatacatgagaaaatgatggagaagttaagcaaagtatctttatggcgtctgtcagttcgcagtgagctatactgcaggtgcttttgcataaatgacaacaagtatgcggattggccacctcttccaactgtccctgatgaaattgaacctgatgtttatgttcctgaggtggatatcctgtcagtcttggatgtgcctcctggcaaaatggggcgtgttattggcagaaaaggatcatcaataatggaagtgaaagcatcttgcaatgttgaaatccatattggtggtgcaaagggacctccagacagggtattcatcattggaccagtgcaggaagtcagaaaagctgaggctatcctccgaggccgcatgctggagttctagagcaacaaccttttgtgataccccggcttcaaactgctctcctcaatatgtcagtcttgtgtgcacaaaagggatatacagaaatgcatgtggtactgggtgcctccaggatctctgatcctagacatgataaaacagaataaaaagaattgaaaggttacctccaaaaaaaaaaaaaaaaaaaaaacaaccaaaaaaaaaaaaaaaaaaaaaaaaaaaaaaaaaaaaaa

SEQ ID NO: 19581 - DNA, 441 bp, Oryza sativa
  Clone ID: PAT_MRT4530_25027C.1
gaaatttcggaaattttgccccccaccgaaatactcacatctcgtccgaaattttcggttttttataactttttatgaattttggtcaaaatttattctaatttatttaaaatcagtcaaaatttcaaaaaaaaatcgtatgaaaaaaatccgaaattttggaaatttcagttctttcgcccacctgcggcagaaatcttacttccgaaatttcaaaccctggctcgatctcatctcgcacccttgatcatgtcgagcaaccttgtgttgatgatcgacatggtcactctagctagctagttattcgtatcaatgttgaataacatgcatatgcaaacatgaccgtctccaattactggtacagacgactacttacagagtgagctgtatgttacgagaatgtactttacgaaatactactatgaacatagtactaaaaaa

SEQ ID NO: 19582 - DNA, 502 bp, Oryza sativa
  Clone ID: PAT_MRT4530_25028C.1
tttgttttttttttttttttggtgaactccgtgcattcaccatgataaacgacttaaatttcgcgtgcttttctgatgtctactggcctgagcctaaactttagcacagccaactcgcttttatatgcgctcatctttatcaagagcaagagtttctttccgccaaaatccaaagtaattgttctcacttaacacctatttggccaaacaaggacaattgctataagcctaaataacccacaaagagagtcgctgacaacataatgaaatgttcaaaattataagcaccatttcaccaccattttatccatgtagcgagaacccttctaagatccatagcacgctgatttataagccgccgttgcctcggttttccctttgaataatccttgatggtctgggctctggcttggaattagctctggagcctttgttggcccctcagcttcgaaaaaaaacctgttcacatttcggttgcttttcttcccattaaaaaacttga

SEQ ID NO: 19583 - DNA, 2193 bp, Oryza sativa
  Clone ID: PAT_MRT4530_25029C.1
tcattgatctttcgatttcttcttttgacagtctctttcaatgtcctgcaggagggaggccctcatctgtgtaatgttgccttcactgattcttttgtccaatttcctgatccaatcagctgggccactcttgttggcattggctctccaccatctgcatatgacctgtacagcagccagaacatgtatggcgcaatcatttccattagtctgctggggcgtttcagcgttaataacatctccagcagtgggcagcactccccgcagaacatttgcaagcttttgagcagcatgcagattgtatgagttatcccctgaacgcacactgtcatggtggatgaactggataacaccatcgttactggtcttgtggatgactaagaggctccagtgtttcccatcaccagcttggttgaaatccagattatcatttactggtatgaggaccaggcgacgactagcaagtagcaagtggtcggcctcggcagcaacatagtgtttattgttcagcaatgctgcgttcgttggttgcaccaggagtaggccatcatctgagtaagctcttgaaaatttggccaaggcatagcccaggattgcatctgtcacccaatgtgggccgcgtagactgtccaaatcagattcatacaggttaatcccgtcacagctgatcaatgaacgattctgatggttttcacctccagatggagcgccaatagtggcatctgtgtttggattctcttggtttttcttttcatcaacctcctcagcctgagttttcttgtggttcttctgctgtgttaccaccattggagtaactggtggcggcaatcttttgtcgtagaggagaatcaggagctcctgtcctgctcttgtttggcattgccatgggtattcatcctcatcatcatcatcatcctcttcctcttcttctgcttctgctgctgctgcttgcgatggtcgtgctgctgcttctgctgctcttgctgctgcttctgctgctgctgcagctgctcgagatagcaattttcttctgccaactattttgtaattctcatacttgttttgatcggggttgaacagaacgatcaatgtgcttaaatgatgcaggacgtcttctttgcattcgtgggatatgcagtagcgtgctatggaaccccaactgtgtattttcttgttctgtttggcagtaatctttttactcatcattttgtggatctgtctctttaccagtagctggacgtggccaaacctttgtgactcactcaacatgagagctgcacactgaagtatccgttgcctctcattggtcttctcttgtgccgactcaggggtgtatcttgagattacattgaagatatcataaagacagtgatatccaacccgaacttgcgcaatgttcatgtagcccgaggtgtaagctataggtacagtgggcgtgaggaatgttggtatgtgttcatcgttgaatctgaaccagcaagaaccagttttgaaagcaacaaagtataggtcgctgtccctgaagagcagacgaacacgagcaccatctgtgtcgacgacgcccacaatgtggaacgtggtaacatcttgaggtctggcgatcgccgccgggtggtcggaggtgtcaccggcgccccggccagcgtcatgcaacagatacgtttcatgcgcctgtatctcttcatcattagtctcgtctggttgctgcttacgaatccgtgctcgaacccgggacaccatctccccgcgcaaacgttcgtcatcctcctcttccttggtgatctctcgcgctttccttcgcagcgccgccgcgccgtcatccatggccttgctctccttccagcttcttccctttttctttcttggtgtttcttgatccccgcgagttcttgtgatccccatcgccgccgtttcctcctcccccatctcgccagccgccgccgcgttcttgatggccgtccccgtttctccccgggctgatcggagtcggaggagaggagacgccgcgccggccaacttctcctcctccgccatctcgccagccgccgcgttcttgatcgcgttcttgatcggagacgccgcgccggtctcctccttgctctcggccgtccccgtctcgcctgccgatcgtcggagaagagggagagcacgggtggaagcggtggtcttctttttgcttccgcgcttcgccat

SEQ ID NO: 19584 - DNA, 1356 bp, Oryza sativa
  Clone ID: PAT_MRT4530_2502C.1
atggccatggcggcgtgctcttgctgctgccacgcgatggtggggatgccgtgctacctctggcgcacgttgcggagcaccagacgcgtgcgccgtgtacactgccatgacgacgacaacgtggaggaaggaggaggaggatgggacagctcattgtcagacttcgcctggagctccagcaaggatgaggaggaggagggctccacctccactgaaggtggggagtacggtggccacggcggcggtagaagggaaaggaggaatcaagaccagatgcggcggtctctgcggctgagactgatgagctttaggtcaaactaccacagcactcggcgtggagggatggcagcggcagctcgcttgctgccggtggcggcgaagcgactaacgacgacggcgagggcgaggcgcctctccacctctacctcgacgtccccacccgccactgccgtactctacgaccagcacggtccgcctgacaaagtccttagggtggctgagctgccggcggcgaagatcggcgagcgcgatgtgtgcgtgcggatgctggccgcccccatcaacccctccgacctcaaccgcgtggagggcgtctaccctgttcgccctcccctccctgccgctgtcgcaggctacgagggggtcggccagacctacatcgtcaacccagccaccgcctggcacagggttcgctccgatgtgcctccccaatacgtcgccaccgtcaccgtcaacccactcaccgcgctcaggatgctctgcgacttcgttaacctcgcccctggtgacactcttgtccagaatggcgctaccagcattgtcggccagtgcgtcattcagctcgccaaactgcatggtcttcacaccatcaacatcataagggacaggcctggttcacaagaggccaaggacaaacttaaacagcttggagcagatcatgtgtttacggaaagccagctagacatcaagaatatcaaaagcttattgggtgctttgccagaacctgcattagggttgaattgtgttggaggaaatgctgcttctgtcatactgaaatttttaaggcaaggtggcacaatggtgacatatggtggaatgtccaagaaacctgttactgtttctacttcatctttcatttttaaggatctttccctaagaggattctggctacagaagtggatgagttcagataaggcagaggaatctagaacaatgatagactacctgttggacctggtgcacgaaggcaaacttaaatacgagatggagttgacgcccttcagtgacttccatttggctcttgataaggcactcggcaaacatggaagccaaccaaagcaggttctcaagttctaa

SEQ ID NO: 19585 - DNA, 666 bp, Oryza sativa
  Clone ID: PAT_MRT4530_25030C.1
gacatgtgcaggtgcagcgtactcagtgcttcagtattgtagcgagtcggagtcagtagagcaggcagccaagaaatggccgatgcgcacggtcaccgccggcgggtggccctgccgtgcgcggtgcgcctccggctctgcctcctcgaggccgccatcgacgcgacgcagcgccgggacggcgccatcaaccgtcctctcttctccctgtacgaccggcgggcgcccgccgacccgcggccggacgccgccggcgtgagctccacggacgtcaccgtcgacgcgtcccgcggcctctgggcgcgcgtcttcacccctaccgcgccggagcacgagcactcctcgtcgtcgtcgacgacgacgccgcgccccgtcatcgtctacttccacggcggcggcttcgcgatgttctcggcggcctcccgcccgttcgacacccactgccgcacgctctgcgccggggtcggcgccgtcgtcgtctccgtcgactaccgcctcgcccccgagcaccggttccccgccgcgtacgacgacggggaggccgtcctccgctacctcgccaccaccggcctccgcgacgagcacggcgtccccgtggacctctccgcctgcttcctcgcgggagacagcgccggcgggcacatcgcgcaccacgtggcccagcgc

SEQ ID NO: 19586 - DNA, 263 bp, Oryza sativa
  Clone ID: PAT_MRT4530_25031C.1
ctggcaaaatgtcatgattggggaggttggcaatggccaacactccagaaggatttgagttggatgggtgccaagaaaaatgcaaggccaaacactggccatgggctccaggttggctgcagacattcaaggatgggtgctaatcagggcacgtggaaagcacaaagaagccgaggagacaaacgggcacaggaggaggaggggcatccagacagcgtcaggcgaatacagctggaggagcacagagttcgaaaaaaaaaaaa

SEQ ID NO: 19587 - DNA, 156 bp, Oryza sativa
  Clone ID: PAT_MRT4530_25032C.1
aaaggggaactggtgatcttacgtaggacttaagaacactgtgaatctatggatggcccatagagatacgaggaggaagctgtcttggctgaggatgtgttcattagtggatcgtcgttgctctccctgtgacatataactactaatcgcccatgc

SEQ ID NO: 19588 - DNA, 369 bp, Oryza sativa
  unsure (1)..(369): unsure at all n locations
  Clone ID: PAT_MRT4530_25033C.1
ctaccgttcgcaatgtcatggatatgaatgctggttttggaggatttgcggcgtcactcatccacaaacctttgtgggttatgaacgttgtaccttgtgatcatccagaagccttgcctatcantttcaacagaggtttgattggggtatatcatgactggtgtgaatcttttaatacatatccncggacctatgatcttgttcacatgagttatctccttcagggcctcacanataggtgtgatatcattgaagtagcagcagaaattgataggatacttagacctggaaaattggtcgtgttgcaagatactgagcaagtgattagaaaaatggatccagttcttcgctctttgcactacaggactg

SEQ ID NO: 19589 - DNA, 784 bp, Oryza sativa
  unsure (1)..(784): unsure at all n locations
  Clone ID: PAT_MRT4530_25034C.1
aaccttcttaagatagtggccggattgggaaatcggatagtaactatgttaaaggagctaaagctgctcgtgttcaacgtggtaagatgcttagagagcagaagagagcagcagttttgaaggagaagagagcatcaggaggaattaacagtgctcctcgtgttatcgttttgtttcctctctctgcttctgtggaattgaattcacttggtgaagatgttttgaagttgttatcttctgatggttctggaattgcttcttcgacagttgcatcttctgagtataagctacgagcaactgtgttaaaggcgcctcatggggatcttctgacatgtatggaaatggccaaggttgctgatttgatggcttttgttgcatctgcaagtgctccgtgggaagagaatagctctaacttcatagattctttcggaagtcagtgtctttctgtgtttagatcaattggtctaccaagcactactgtgttgatccgtgatttgcccagtgatgtgaaaaagaaaaatgagatgaaaaagatgtgtgcctctcaacttgcttctgaatttcctgaggattgtaagttttatccagcagataccagagatgagttgcataagtttatgtggttattcaaggcgcaaaggcttactgtgcctcactggcgaagtcaacgatcatacattgtggctcgcaaggctgggatgctggtggatgatgaaagctcangaaagtgcactctacttctctctggntacttgcgtgctcgcaaactgtctgtaaatcaact

SEQ ID NO: 19590 - DNA, 525 bp, Oryza sativa
  Clone ID: PAT_MRT4530_25035C.1
cctctctcaatggccggctacccgccaaatcccggctccggctacccctacggcggcgccggcggctacggcgcaccgccaccgacgcacggttaactacaccggcagcttcgtcccgtcgaacggagcgaagcactccaaggaaggtaagacctctgtatcttccgtgcttactacggtggaggaggcgggtacggtgtaacgcaattcacccagccatacggcagcggaggcggatacggcgtcatcgacctccagccagccgtacggagcgccgtacggggccccgccgccctcatcagagcactacggggcgcccggcgggtactgcagaccgatcagatcgttggtgccgacgcggtcgcatcccggtaaggactgcaacgcagtgcggtgcttacaagactacgaccgtgacagcaaagggatagatcgacgaccaggagctgcagtccgcgctgtccgggtaacaccagagctgcaaacaccgcaacatgcacataatcatgtacctcctcaccaaca

SEQ ID NO: 19591 - DNA, 192 bp, Oryza sativa
  Clone ID: PAT_MRT4530_25036C.1
atggccaggaagcaaacgacgacgcaaatcatgcagcgcgtcaatggtgcccacgggtggctggtagcgatgggtcgcagcccggccggccttaccgaaaaggagaaaagaccgtacgacaatgggctttgtggtccagctcgttgggctcggcacggatggcccatcgttgcttggagcaagtgccagtaa

SEQ ID NO: 19592 - DNA, 889 bp, Oryza sativa
  unsure (1)..(889): unsure at all n locations
  Clone ID: PAT_MRT4530_25037C.1
ctttgcagcagcagcaaatggaccgaggggtggagctgatggggtgcgtctgccggatcaagaactgcgccgtcgagctcctggagattggaggaggaatcttggttgattggccatggacgacgacgacagggacctgttctggagtgagctccagctgaagaccaccttcctgttacattgatctgagccgggtgatctcctccagcgagagcgatgagcccagggaggcgctcacccctgctcaccaacaagctcttctacttcttggaggagctgaccgacgcggtgacgagcggaagcgtctccttcacgaagctgtgctacggcgaccccgcccaggctctccgtgaggtggtcgccttcctcgcgccgccgcagtagctataccctggtgggctcatgatcccagcacttcactgcactgcactgcaaatctgatatgctctgaattctgaagccagtagggagagtcagaggcactagcaaggcaaggaacttctagaagtgtctctagaaactcttggagaaggatgagtctatggctcctgtgtaagaagcatgtgagaagaactgaagctagatccacccgtgtacatgcatgatgagatcatgagagcactgccatctcgagtttgaagcaaaccaagaaagatataatatcttagggcgtccctctttccaccaaaaaaattcgactagatcatgttttcccntttgctcttgaatttatctgcctttgcttgatgagttataaaaaccagcgccgaaatcgatattgatgttcgaacgtggaaaaacnccncaagtgatccaatnttgatgatgacaacaaggcattttgtttgttaaaaatattttattgaaaaaaaaaaaaaaaaaaaaaaaa

SEQ ID NO: 19593 - DNA, 1397 bp, Oryza sativa
  Clone ID: PAT_MRT4530_25038C.1
ctataacttgaagccgtcatcctcagtcttgaatctcatagcagtaatcgtacgatactcctcttcctcctcaagggtcctgaaattgtcagccatatcttcactcataaagagtttgcctgagatggatagcgcacgcgatacagcctcatgcccatcgtacccctttagcaatggacggccggataaaaactggaaaacgtcgtcgaatgcgggtagtagagtttgccaccgccggttcggtggcgttcttgctctgcctcgctctctctgtttggtgcctcttacgccgccgacaatggcggcggaataatgccaagctcacggtgaagatggcgcggaaacatctaccgaaggatgcaagattcttccgcgggaaacccattgaggatgagctggagctagaggccgccgggccccggcgattccactacggcgagctcgccgcggccacggcgaacttctccgacgacaggaggctggggagtggcggcttcgggtcggtgtaccgcgggttcttgaacggcggcgacgtggccgtgaagagggtggccgagacatctcgtcagggatggaaggagttcgtcgccgaggtgaggatcatcagccggctccgccaccgcaacctcgtgccgctcgtcggctggtgccacgacggcggcgacgagctgctcctcgtctacgagctcatgcccaatggcagcctcgacgcccacatccacagttcggggaacgtgctgccatggccggccaggtacgaggtcgtgctcggcgtcggcgccgcgctgatgtacctgcaccacgaggcggagcagcgcgtcgtgcaccgcgacatcaagccgagcaacgtcatgctggacgcgtcgttcagcgccaggctcggcgacttcggcctcgcgaggctcatagacgacggccggcgctcgcgcacgacgggcatcgccggcacgatggggtacatcgacgcggagtgcttcctcctcgccgggagggcgagcgtcgagtccgacgtgtacagcttcggcgtcgtccttctcgaggtggcctgcggccggcggcccgcggtggtcatcaacggcggcgaggacgcgatccacctgacgcagtgggtctgggacacgcacggcggcgccgccgggggcggcatcctcgacgccgccgacacgcggctgaacggcgagttcgacgtcgcggagatggagcgcgtgctggccgtcgggctctggtgcgcgcaccccgaccgcggcctgcggccgtccatcaggcaggccgtcagcgtgctgcggttcgaggcgccgctgccgagcctcccggtgaggatgccggtggcgacgtacggcccgccggtgtccacagcgtcggcgcccaccagcaacgacacctccgcaggacggtag

SEQ ID NO: 19594 - DNA, 314 bp, Oryza sativa
  Clone ID: PAT_MRT4530_25039C.1
ggccatcaaaaataaaagcattacatttatttttatgatcataatgggagggattacaggtgttctaacactgccattagataacagggttttggttttgcgcttaaagcatggctgccagcatatttttatatatgatggctgccatccttctattatgaaaaaagaagtgctcaattcatcgttttggcaattttagaccattgttttttaatttaacaaaaactctttttttctaatatattccccaaagatcatcttcccttatcttaaaatggtggaagctctttttacattttactataagttctttc

SEQ ID NO: 19595 - DNA, 462 bp, Oryza sativa
  Clone ID: PAT_MRT4530_2503C.1
agggcgtctaccctgttcgccctcccctccctgccgctgtcgcaggctacgagggggtcggccaggtccacgccctcggggcgccgtgcgattcccggctcctctcccccggcgactgggtcatcccttctccgccctccttgggcacctggcagacctacatcgtcaacccagccaccgcctggcacagggttcgctccgatgtgcctccccaatacgtcgccaccgtcaccgtcaacccactcaccgcgctcaggatgctctgcgacttcgttaacctcgcccctggtgacactcttgtccagaatggcgctaccagcattgtcggccagtgcgtcattcagctcgccaaactgcatggtcttcacaccatcaacatcataagggacaggcctggttcacaagaggccaaggacaaacttaaacaggtttgggcagatcatgtgtttacgggaagccagt

SEQ ID NO: 19596 - DNA, 2147 bp, Oryza sativa
  Clone ID: PAT_MRT4530_25040C.1
gggcggccgccgcgacgcgtcaggcgggggccgccccccgcgccctggtgccagcccgtcgccgccgtacatccccgaggtcaccagtggtcgctccccttcgccgcgcgcgccgtggccgtcgcggccaccggccggcatgggactccacggcaatcagcggaggcacgacttcctctcgccgtacgacgccgccgccaccgccacggactactcgccgctcccgcgccacccggactccaagccctcggcgccggcgccgccgcccgctcaagatttcttcctcaagacacacgacttcctgccgcaggtagagaagagagccgaccagacaccaccgccgccgccgccgccgccgccccacgccgcggtcaccgccgagaagcagctgctccaccagcacgcgttggccgccgccggcgcgttcaccatcaaccacgccgtggccgcggccgccaccgccgtcaagcaggagccgcccttcgcgccgtggtgccagcccgtcgccgccgtagatccccgaggtcaccagtggtcgctccccttcgccgcgcgcgccgtcgccgtcgcctcctccaggccgcagcagcagcagcagcagccaccgccgccggagaggaagggtggcggtggattcatggacgccggctccagatccagtggcggcgcgggcttcgacgacgacgacggccatgccgcgcgccgcgaggtctcctcctcgctgaaagagctcacggtcagggtggaagggaaaggtgggagctgcagcggcagcgctggcacggatcagatgccgaacacgccgcgctcgaagcactccgccaccgagcagcgcaggcgcagcaaaatcaacgacagatttcaacttcttagagacttattgcctcataatgatcaaaagagagacaaagcatcatttctcttagaggttattgaatacatacggtttttacaagagaaagtacaaaagtatgaggtttcatacccggagtggaaccaagaaaatgcaaaggttgtgccatggacaaacatctatttccgttcttcctggaaaaatgcgcagaacaaaggccaagttcctgcagatcattcacctgaccctccatccccttttaaagagctctctgatccggcatctaatagtcaagcaatgggccgtcagcttagggttgggtgatggcgctgaagaacatcggcaagcctcaaagcgacacaaatcagataacagctgatggtttgctcctgaaaagcccagatattcaaccattttgtggtcctaactgtgtacggggagccccaaggttttatgtatattatgtttacctgtgacgtatcgagtaaactgcgacaagttaaataattctgaccttgccatcgatgagggaacaatcagtctatcaagccaatattcccaagagttgcttaacaagttgaatcatgccctggaaaactcgggtatagatttgtcccaagccagcatctccgtgcaaataaatcttggcaagagggctatgaagagatctactcctgctgcaacctccacttctaaggtaggatttatgtctcgtattgacactaagagccactacattatgtttgtggtaattgaaattggagctggcaatggatgttatacatggagctcactgatccggcatctaatagtcaagcaatgggccgtcagcttaggttgggtgatggcgctgaagaacatcgacaagcctcaaagcgacacaaatcagataacagctgatggtttgctcctgaaaaccccagatattcaaccattttttgctcctaactgtgtacggggagccccaaggttttatgtatattaagtttacctgtggcgtctcggcaaaacaaggccttgatgtattctttcatttaatcacttcgccgttctagcccctagggaaaaaaggaagcttccattgcagattgtgaagctgcttttgtccatatgcttccattcatatgagaagtttctccccccctctgacagaatgtcttttgtaacataattcagaaatgagctatccaaagttccatcagttccccttgtgatgtgtaatgtgttatttgtccctgaagattgaagttacccaagaccaacctgtaatctgatgatggggtatttgcagtcc

SEQ ID NO: 19597 - DNA, 342 bp, Oryza sativa
  Clone ID: PAT_MRT4530_25041C.1
atgccatctccagagacggcggcagcggcagcggcagcggctctggctccaggcgcgccatctctagagacggcgctagcggctccaggtgcagacatggtgaacgacgagacgacgacgaacagagcaaaagtcgagagcagtcgtgcggaagcactccccaaaaacctgatcacccgcctacccggtgcagatctcaggcgaaggtgtggttccgaaggccctgctccttccgatctctcgtgcgcgctagcgatcagaatcaaggaagcagaaaagaggcagcacaggcgcgcggaggaggaagaacaccagcgagagaaagcaagcgagaggttctga

SEQ ID NO: 19598 - DNA, 1252 bp, Oryza sativa
  unsure (1)..(1252): unsure at all n locations
  Clone ID: PAT_MRT4530_25042C.1
ccggngtcgnacccacgccgtccgggnnaagcgaagcgaacgagnaaagaggagaaagcccggagagcttgccctcgccgcgccgcggagatccgcttccccatccccccacacgtcgccgccgccgccgccttccttgctgcgcggggtaatgcgcggccatgggactgcaaggtacgcgcgctctctctctcctcttccctgttcgttcgttcgttcgctcgccggagtgggggttttcgccgaggttttctcctcctgagatcgatttggttgatgtatacgcagggaataaggcgacgcacgacttcctctcgctgtacgccgccgccgccaccgccacggactactcgccgctcccgcgccacccggactccaagccctcggcgccggcgccgccgcccgctcaaggtgagctagctcacgcaattttttttttctcccggatggtgaggtggatctcccgtctcgaaatactttgccaaattcggcatagttttttttttcttttcttgttctcgtgtgaaaccacacagaattaaccagaacggatcaaggaattgctaccgtcataatcctactatttgcagtggtttaaaaactaaatactaggagtatatcattatggtttatgtcttgtggaaaaagataaacttttttgcgatgtttggtcaaggaaaacgacgagttaacgaagggaaatgatcacgtgtagctaggctgtgtgtgtgagagagagagagggggcacgatgcaaagagacgtccacgacttcctttctgttgcagtctacgattttctttttcaaaaattccgaatgttagtgtgcaaaagtggtcggcatatcattattcttgcaggttgtcatgccagatcattatcggtcgatcagatctccgcaagttggttttcgaattcgtattcttattattactacaagtttaaactgttttcatccaaaccactcgatccactccatattatgcatgctaaattgcacaaaaaaaaagtaattgagagatggatttttgatggattttttttcgatgatgctgaacttgtgatcatttccgttgcagatttcttcctcaagacacacgacttcctgccgcaggtagagaagagagccgaccagacaccaccgccgccgccgccgccgccgccccacgccgcggtcaccgccgagaagcagctgctccaccagcacgcgttggccgccgccggcgcgttcaccatcaaccacgccgtggcc

SEQ ID NO: 19599 - DNA, 475 bp, Oryza sativa
  Clone ID: PAT_MRT4530_25043C.1
caaaagtatgaggtttcatacccggagtggaaccaagaaaatgcaaaggttgtgccatggacaaacatctatttccgttcttcctggaaaaatgcgcagaacaaaggccaagttcctgcagatcattcacctgaccctccagaacttctgaaaaatggttccccctatatgttcccttttacagggaactctgataataacaatgcagttgaaactgcagctgcttcaggtgcacaggatcaggcagaaactgatccaatgagtcgtgtgtcttacagatcagtggacactcccagtcccaataatgttgcagacaaagttacatctcagccacacgctcaactggtgagaccatcacctgcagagaatcacacagtaaactgcgacaagttaaataattctgaccttgccatcgatgagggaacaatcagtctatcaagccaatattcccaagagttgcttaacaagttgaatc

SEQ ID NO: 19600 - DNA, 277 bp, Oryza sativa
  Clone ID: PAT_MRT4530_25044C.1
gggaaacgaatttttattgtcttcaaccctgttttgctttaccgcaaaatccaaagaacggcgataacctttggttttgggttttttacccacccctgttttttcccttatttacccgcccacccctttttcaaagctgtttatgaaaaccagatcttaaacgcgggagcgggggggggatcaacaagtttgcccccttacgttgtggttgttgatccccccaaatcgttttggggcttcccaacccaaccccgtttaaggggggggttttcccccc

SEQ ID NO: 19601 - DNA, 212 bp, Oryza sativa
  Clone ID: PAT_MRT4530_25045C.1
accaaatatgaagggccgacccatttggaatattattttggattccaaggtacacagctttcacagttggcggcactttcagtgtggagtatatacattcggatcaagtgggtaaacaaaaccagaaagactttgagcaagcttccgcttttaacaacacaaaagatctattggatgttctgtatcatattttgaaagcgaaagaaaacgtg

SEQ ID NO: 19602 - DNA, 717 bp, Oryza sativa
  Clone ID: PAT_MRT4530_25046C.1
atgaagttcatcgcctctccgacggccaagagaaccgaggtgactccagcgagcaccttcgtctcggcgagggaggccaccatggtggccgccctgggccgggacacggctatatatggaagtggacaccgtggtgtctatggcttccataggcattatcgtgacggttggagaggtgatcaccatggtgggcatggacaggaacacatcatctctcacattggtttcctcccgccgctgccgccaccacattatcctttgtcggagtttctgccgccgccgtacttcggcgcataccatgaaccaactatcggatacgcaccccacagcgaatactatggatcaatggtcagccatgcacacccagccctcctcgtggtcgccatcgtcgccgtcgtcgtcaccgccttccaccgtgaattatcactggatcaaaattccggtgattggcaaatctactatggctttaatggggatgccaagcttgcagggtcatcgaggccaatgtcatgggctcacggcgacattaggatggagtgccgccgcaaccttcttccggccctacgcaaggaggcaggtgccactgtcgccgtcgtccgccttaacctcgagaagcaatttcctccttctgcctctaccccgggaggctgccgtcatcatcgacttggatgccgggaggccaccatcaccatccacctcaacttcgtgaggccgtag

SEQ ID NO: 19603 - DNA, 600 bp, Oryza sativa
  Clone ID: PAT_MRT4530_25047C.1
cgggctgcaggtgattttttgttcattacaggctgataaatattagtcgacaacttgacattggatattttccaatctactcagttctaactggatatatttgaaaatcgcactaaagtttccacctctgaaagtgtgattgcaggttggttccgtacagattgttcttcctttattgatcagttgtcatttatttgcagtgcactcagtttttaagtcgctaatttcagcctcgtgatcatgaagatccctgaaaatatcttgtttaattcattatctgtgaattagttcccagtagtttggaaatttgaaaattttaagcttctctcagatacttcagatcgtggcccagctcaaaacatgaatggttaatcatactacctccttcctatattatattcctatattatataggacggaggtagtatctgcttgctgaaaaccaggtaagtggaagcttttgaagttattatacagagattgcattgcattagatgtttctgcttgtatttcactcacgaaatggaaggaaaaaaaaactattatcatatcaacaatttaacatcaagtgaccaccataacttcatgtttgattgtaag

SEQ ID NO: 19604 - DNA, 186 bp, Oryza sativa
  Clone ID: PAT_MRT4530_25048C.1
atgtggggcgagccgctacaggtgtggatccaccggcggccggcggggagcccgggtcttcttgtcagcgactcttcagctagcgttaggcccatcaaagccagtgcgctaggcacagttggtgggtggcgggggacgagcgacggcatcaccgagcttgactggcgtcgcaaagagatgggttaa

SEQ ID NO: 19605 - DNA, 370 bp, Oryza sativa
  Clone ID: PAT_MRT4530_25049C.1
ctgtacgcctggggtgccggtccgcgattttcgggtcgagtcccacgtgcgcggattcgtggggccaccccctaactcttctctgggggggatctttacttcttctggggcgccatcacacctctgctcacaggggctgggtactagtcccgtttttaatgaaccactttttccgacgtcactgaaattttcaatgcaaaccgcgatctcatagttgactatgtctggatgactggatctgggaacatctcatactataattgtaagtacgactttactcttgctagatttgcttataatatgtgcaatacttatttttattgtggctctctcgtgtatttgctcatgacattgattacatgcctctatt

SEQ ID NO: 19606 - DNA, 1695 bp, Oryza sativa
  Clone ID: PAT_MRT4530_2504C.1
accatttgtacaagaaagctgggtacgcgtagcttgggcccctcgagggatactctagagcggcgctgcacgcctcgcgcctcgcgctccgtcctcgagactcgacagcagtctgaacgagcactcgggtggagggatggcagcggcagctcgcttgctgccggtggcggcgaagcgactaacgacgacggcgagggcgaggcgcctctccacctctacctcgacgtccccacccgccactgccgtactctacgaccagcacggtccgcctgacaaagtccttagggtggctgagctgccggcggcggagatcggcgagcgcgatgtgtgcgtgcggatgctggccgcccccatcaacccctccgacctcaaccgcgtggagggcgtctaccctgttcgccctcccctccctgccgctgtcgcaggctacgagggggtcggccaggtccacgccctcggcggcgccgtcgattcccggctcctctcccccggcgactgggtcatcccttctccgccctccttgggcacctggcagacctacatcgtcaacccagccaccgcctggcacagggttcgctccgatgtgcctccccaatacgtcgccaccgtcaccgtcaacccactcaccgcgctcaggatgctctgcgacttcgttaacctcgcccctggtctcctgtcactgctttcttctcttttctttccctgtaatcaagtctcacccctagccctggatacgtttgtttcaggtgacactcttgtccagaatggcgctaccagcattgtcggccagtgcgtcattcagctcgccaaactgcatggtcttcacaccatcaacatcataagggacaggcctggttcacaagaggccaaggacaaacttaaacagcttggagcagatcatgtgtttacggaaagccagctagacatcaagaatatcaaaagcttattgggtgctttgccagaacctgcattagggttgaattgtgttggaggaaatgctgcttctgtcatactgaaatttttaaggcaaggtggcacaatggtgacatatggtggaatgtccaagaaacctgttactgtttctacttcatctttcatttttaaggatctttccctaagaggattctggctacagaagtggatgagttcagataaggcagaggaatctagaacaatgatagactacctgttggacctggtgcacgaaggcaaacttaaatacgagatggagttgacgcccttcagtgacttccatttggctcttgataaggcactcggcaaacatggaagccaaccaaagcaggttctcaagttctaagataatgcaaggacaacggatgagagagagcttgtattacaaaaacaggagtagaaaaaaggatgtaaacagtgcatgtgtgcgtggctaggggatcggtggcctctttcagtagtagttaccaggctgacttgggaagcggcaatatgttttgcggtgattgcagcggatctctgtccaataatggcggatcacttcacttgagagtagaaagacgtagtatatcacttcacttcaatccccccgcgcaatatgaccttgtgtggttgtaagttctgaagtggtattgattaccgtccgatctggagaaagaaagttttcactagattaaaaaaaaaaaaaaaaaaaaaaaacctgcagcccgggggatccactag

SEQ ID NO: 19607 - DNA, 461 bp, Oryza sativa
  Clone ID: PAT_MRT4530_25050C.1
ccagtcggacgctaactgataggtgataaaacagctggaaccaatgacatattgttgtatctaattctaatttgacatggagccagcatacgagatcatcgtgaaacaaaggcctgatcggagcgcggacggttagatccaatgatgatgaagatacttggaacacacaagacaaggtgggagagcatttgggatcaaggctgaacgatttaacaaggctgtatatgacgctgtcgggttagttggcatctgactcctaacagtccgggggcttgtaggctatgaagctgattagctgcacctgcctgacggagttgtagccggtgatacggacgaatgcatgagggtacgcgttattggtctactagagcttcttgggctcctgggtggtttcagtgttcccggacatgggcagtttccacatggtttaatacctgccattcaagaattctggggatttg

SEQ ID NO: 19608 - DNA, 441 bp, Oryza sativa
  unsure (1)..(441): unsure at all n locations
  Clone ID: PAT_MRT4530_25051C.1
cctggcgatgctagcatttgctgaccagaaagaaaaggtgtgccaatgcggtgctatgaaacctggcaaaagggcaagcatttggaggaaaatgtgtgcgtgtggctgacctggatggtgatgccctgtgcggttgcgccgtgtggatgccaaaggattgccaacagtgtgcgactgtgccactgtgttgggcacccagccctggtgcatggtgtgtgctgttggctggattggcaaatggtggcctggtgtggctgcatgcaagctaatggtgaccatgaactggaccccgatggtgatgattaatgccatgcaccaatgttggtgttgcacaaatgttgagataaggttttgcatgctacatataaattngtaatatattcaaatgtttttctcgttatgtaatatttttacatttaatggccaaaaaaaaaaaaaaaa

SEQ ID NO: 19609 - DNA, 447 bp, Oryza sativa
  Clone ID: PAT_MRT4530_25052C.1
atggccgagtcgatcgtctctggcctcctgatcacggcttccgccgtcgcgcgtcctcacagcagccacagccttccccatggctcctgcgcgacgcgtgtcccccaactccagcgcgacaggctgtgcgtccggcccacggtggatgaggacgaggcgatgagcatcgacaacctccgcctttttcgacgtcaacgtcgacaagtggaatggagccttctacgtgcgctcgccttcctgttcctgatgccgaaggttggcatctcaatctcaatcatcactgccatctccccgcatgagggaagttgcaagctcggtctcggcttcctcgccggtggacggcggtgcaacgagctccacctcaacttcgtcagcaacgatagcagggatgatggtgtacgagatgtggatacaacttcttcatggcgtacagcgcagtgtatctag

SEQ ID NO: 19610 - DNA, 2696 bp, Oryza sativa
  Clone ID: PAT_MRT4530_25053C.1
atggtttcaaaacggtgcagtgcatcgactgggaaccgtatcggccgatacagaatcaagcgtcgatacatactggttttgagttcatgtcaagctcgggttaagaattcaaaattattgccatacaaggatggagtccaaaatacagcaattgtatctattaattgggccgatttggtcagatcgcatcagctaggtcggtacgatacgtcatcggcctatcgatcgatcggctatcgtgttctaacttcattttattatttatccttgttggttgcagaatcaaaccaactatcacatgaacacacgcgcacacacgaacgtcgcctagtgctgaaatataaaagcgctcgacgacaaggtctcacatgccgcgcacgcgtctactcaagctcaacacaccaaccacttggcgataatactagtataatagttccacgtgacgcgacttacatcagcaaaagcacacgtgacacgttacacccgtgcgcgcgtaacgaccggtcgtcgtgctgcgcggctggcgcgcttcgtgtgtgtcgtactcgatcgtactacgtagtaaagcacggtagcagcgccgtaggttgtatatatataagcgcagagacgcgtgggagctggcgccacggcatgcatgcacagccatggagaacgacgacgacgtggagcatcccttctactacttcgtccacgacgacgcggccgccggcgtcgacgaccacgaggagttgctggcaagcctcggcttcctcctccctcctcctcctccgccgccgccgccaccgcagcctgatcagggaaggagcgccttcgcggcgtaccagagtaccgcggcgatggcgtcgtcgtcgtcgtcgtcggagtctctgagccggcggtaccactcctctgcgtcgaacgtccaccggagaatgcacaggttcctcaggagcatctatgacgacgccggggacgacgcgggggcaaccgcggaaatgcagccggcggagggcgagcagcagcaggcggcgccgagcggcggcagcgcgcggttccggcacatcatgcgggagcggctgcgtcgggagcgcctcagccagggctacgccgacctccaagccatcctcccaaccggcgcatcatcatcaaaagtactcgtaaaatcactcatcaggaactacatgagcggtggcaagaacaccatcgtcgccgcggcggcaaactacatccgggagctggaggggaggaaggggtggctctgcgcgcagaacgagttgctggagcggacgacgccgaagcccggcgccggcatggtggtgaaggtgcgcgccgagagtgagctcggctcgacggtggacgtgttcgaggcggtgctccggcggctcaaggccatggacgagctgcaggtgacggcgatccagtcgtggttcggcgccggcgggatgtggatggacgtcgcggtggagtccaagagacgtgccgcgtgtacgtacgccccacctcgctggaaactgctgagagagaccagacgagtcaaacgaggtcgcagcagtagaattgtcaaattaatcttccttcagctatcggttgcgtctacatcagcaaatgattctccaatcgcgagccgtcacgcgatctgtactacggagtatagtgcctttcagctcgatcgcccccctacttccaggcctcggcacggccacgcgccgtgttcgcaccggccatcacacgcgcgcggtcacggccgcaaaattaaaggaagtcagcgatttggggcgtttttgcggggagtacgtgcgtgctctcgattagcgggaggcgcgcggcatgtcgacgcgcacgtacgtacgtacgtatacgcacgccggtacacggtgggttcgagcaatggaccgaccgacacatgtcatgtacgtgcagacggtgcagcggttgatcgcgtaaggccgattgctgctgtgtcttcttcctgtccgatgcacacggcgcgcggggtcacacccgcaggggagagtggggaggggggaggtcagggacgagatgccgcacgtcgacgtacgcacgcacgcacgccaggagagcaatggaccgctggacgccatgtcatatcacatatgtcacctgacatacgtgcagtggttgatcgggaaacacagttgcttgtgtgttttcgtcgccgtgctgttcgctacgtgttgtacaggaatgaacacgactgctcgatagtagcagggcgccaggatgacgatgggaagcggcagcggcgggacgacaacgtttgtcgcggagtggttggtcgagcggggatgcagagcggcggtggagaatacgttcgatccagcggcggcccttcctctccccaccgtcgcggcgacgccatggacgagctcgattgcggtgagcaccaactcaacggcaccaccagtgtggagatccaccttgaggatggccctcgagtatgtgcttgtactgcgttggcatcagctctgagattgccagcgctccacccactgcccttgcaccctgcccaagtgccaatcgaggttggtggcgtggaaggtggcgatggcggtaaggttgaagctggcgccgttgaggacgtcacaaaggaagttaaaggcgaagaggagcacgaagaggtggcaaacggtgacaaagagagcgtagtggatcccttcctagatgttgaggtaggaggtgactaccgctattga

SEQ ID NO: 19611 - DNA, 345 bp, Oryza sativa
  Clone ID: PAT_MRT4530_25054C.1
ctcgcaaccaaaaagggaaaaagaaaacactgttcctgattgatcctgagctcaactatgcctacccatatattctaccgcttccatctttgctactcacacccgggctaaattacaggcagaccaaacaaaaacaaccagtcaccacttcgacgacaaaattcacaggggggacacaccgattaagactgaacttcccgcgcgttttcgactttttttttccttttctttttttttgggtggcctcaaagaagaagaaaatgcggcctaatggtgaccaccacgaccccggcgaggcgtggcgaggtccggtgaggggacgttgttgatgtcagccctgggcct

SEQ ID NO: 19612 - DNA, 2082 bp, Oryza sativa
  Clone ID: PAT_MRT4530_25055C.1
gtggtttttttttttggggggggtaaattctatatacaaacaattaaaattgatgcataagcataactaggtacagctgctggcacaaaccaaacaaagtgagcaacaccagacgcattatctacctgtactattaaaagcttactgcaaactcagcaggacatgaacatccatccagtgggtctttctcgcaaccaaaaagggaaaaagaaaacactgaacctgattgatcctgaggtcaactatgcctacccatatattctaccggttccatctctgctactcacacccgggctaaattacaggcagaccaaacaaaaacaaccagtcaccacttcgacgacaaaattcacagggaggacacaccgattaagactgaacttggcgaggtccggtgaggtgacgttgttgatgtcagccctgggcctcgatcggcgacatcatcgccgagaaccggcgcttctggatgcgcggcgggaggtgcttgttgtacctcttgggcccgaccgtccacggcaggaagacgccggtgccgctgcggctcatccgcttgttgccgccggcgggggctatcaccatcggcctcgccggcgcagccccggcgacgattattacgggccgggccgtagccgatcctggtgccgccgtgctgcggcttctgctgcatgcccggcgccgggatcgtcggctgctgctgcggcgacggcgcctgacacctcctcatggactaggtggacgaagggaacgcggtgagggccaccggcgtcgacggcttcacgcgtactttttttatttttctttttttttggttggcctcaaagaagaagaaaatgcggcctaatggtgaccacgacgacgccggcgaggcgtggcgaggtccggtgaggtgacgttgttgatgtcagccctgggcctcgatcggcgacatcatcgccgagaaccggcgcttctggatgcgcggcgggaggtgcttgttgtacctcttgggcccgaccgtccacggcaggaagacgccggtgccgctgcggctcatccgcttgttgccgccggcgggggccatcaccatcggcctcgccggcgcgggcgcggcgaccatcatgacgggcgccgcgcgcacgggcatgccccacgcaggcgccaacacggcctagtggcgccggggccgtagccgatgatggcgcctccgtgctgcggccttctgctgcatgccgggcgccgggatcgtctgctgctgctgcggcggcggcgcctgccacagcgccatccctttgtggcacgacgagggagggctgaggtccaccggcgtcgacggcctccttcacgcgctcttgagttgtgcacacagcttcatcaatcttcaggcctttcacaacgttaaccatgtgccctttccccgcatcaccagcagtgaccctttcttcagtgagaacgtaaggggtcccgacaatgcactcctcgtgatcagagcagatagggtaactctctggtaggctgtgttccccttgagatccttggtcacatcttccgtggagggtgccttgcgctccgacgaatctccggaggaatcttccccgtccgcctcgtggtccacactgttaggtttcctgctttctggtattaaacgccaaagaacaagatgatcaatgtcagcctggaggacaagggggattgcttctatgtgacaattagattcctctgtggtgggctgaaatagtgggacgccaagctgaatgatctccctcttgtcggcggcaacgtcggcgacggagtagaacttctgcatgtggaggacggggaaccagttgatgcggcggcggtggagcgcggcgaacacggcctcgtactcggcgtccccgccgatctgcgcgaggtggccgcacagcgcgtcgatcaccgcgttcgccgccgcgaactcgccgcggaaccacccgatcacggcgtccctcgccgccacctcgggcgcggccgcggccgcggcggccaccggcgacgccggtgccgcccccgcagccgcagcagcccccgccgccgcgcccgtagtcatccctccggcgatcgccagggcccctcctcactgcacac

SEQ ID NO: 19613 - DNA, 1909 bp, Oryza sativa
  Clone ID: PAT_MRT4530_25056C.1
gtggatccccgggctgaggaattcggcacgagggaccagaccgtctcccctggccctctctccgattcagcaaaattgccacctgtttccgcatccgcctctaccgaggttttagacaccgcggcgcaggcgctcttcccatttctcgcgtcccgcgaggcagccgcaactcgccatcaccacctcccgatccgcgcgctttctctcccgcgccccctgcggatctgccggctctggaagggcgagagggcgctggagtcgtctcggcggcgctagggttgaagctggtgggggaaggaggaggaggggcatgaggattagcgagctgggagagtgtgacggggtgcggtcggaaggggaggaggagcagcaggtggtggtggaggaggccagcgtccgcggcggcgtggtggtagcgcggctgagcgcgaagcgtgcgctcgtcggcgccggcgccagggtgctgttctacccgacgctgctctacaacgtgctgcgcaaccggttcgaggcggagttccggtggtgggaccgagtcgaccagtatattttgctaggtgctgttcctttcccaagtgatgttccacgtttgaagcaacttggagttcagggagttgtaacattgaatgaggcttatgagaccctggtcccaacatctttataccaggcccatgggattgaccaccttattattcccacaagagactacctgtttgcaccagccctccaggatatttgtcaagccatagattttatccaccggaatgcatcagaaggtggcattacttatgttcactgtaaagctggaagagggcgtagcacgactattgttttgtgttatctgattaaatatcggagcatgagtccagaagcagcattagatcatgtccgatccattaggcctagagtacttttggcaccatcgcagtggcaggctgtcaacgtttttagtaccctcaccaccgggcgtcttccaatacagagtaaaaacctgggccattttctagaagccggggatgactgcatcaccaactcagaaattgatgattactactccatggagcttgattacgaagatagtggtttacccctttgtcaagtaatgttacccaggccaacgagccctacagtgtgtactgacgcagtactcataacagaagcggacctcgagggatatgatacttatgccgataccaggaaggacgttgtgtcgttggaagtgatagtcagccggaagcccatcatgagaagactatcatgtctctttggatctctgaaacttaccaacaattgtgagccaaccccaagccggtttgctgaggggggcaatgttccctgctatttggcacatcacagtcttggcacttgtcaaagtcttgcgcctgtgcttccgaggacgactgctctccgtggtttgaaatatcgtcacttagtcgacaacagggtagtcttcctcctcgaatccgtgcccgacgagattaaagacagcgctagatccctacagctggcctctgtagggtttgggttagggttggggcgatgcccaggcgactgggtgacagcttccttcctccctccttggcgatggagtttgatggagactttctccgatgtgcttatggagtctgcaggttttacgcctgcttttggcaagatccttgccggatgggattatggtggatcatctagccctacaataggctttcgatgctgccgggtatctcaaatgaaatttccaagacctgaagttgttggtattcggcctagagcccatgctccctgtggcaaattccatagcgtaccagacatactttggatgggttcacatcgtctgccgttttggctgacggcaaacattgccgttgccttcatccctgccacacatccttctgtcaacagctgcatatag

SEQ ID NO: 19614 - DNA, 223 bp, Oryza sativa
  Clone ID: PAT_MRT4530_25057C.1
gggttgtctttttcatttcttaaaccctgctctacaccaaactgccgattttgatgattatatcaccagaggcttacagtgtgcatttggagaatattgcgaaaaatatgcaaagcccgaggatgctggcgtaacccccgaagataagtcgagtgatgaagaacttagtgaagatgaagatgactccggggatgatgctatactcggcaacccagatccttag

SEQ ID NO: 19615 - DNA, 996 bp, Oryza sativa
  Clone ID: PAT_MRT4530_25058C.1
atggcgctggcggcgcagctctacggatcggcggcggcggccgcgtactgccgaccgtcgctcgtcgccgcttccgcgtcagctcctccctcccgccgtcctgatgcagctcgtcaggtgcctgcatgaagctccgctacgagacggtcaccatcgagctcaagaacggcaccgtcgtccacggaaccatcaccggtgtggatataagcagtgaacacccacttgaagactgttaagctcacattgaaagggaaaaatcctgtaacccttgaccacctcagtgtgagaggaaacaacattcgctattacatcctccctgatagcttaaatctggaaactttactagtagaggataccccgagagtcaaggctaagaagccaactgcagggaaacctttggggcgtggacgcggactttgtggtgttcgagcacggggccgggcgcgctgagctttgttattcactgttatgttcagctggtgcagtgaaacagtttttaaattttttttgaaccgagatgccaatcccggtagttttggctgtaagaacatcctggccttcgacctaacgatcaccggtgtcgatttaagcatgtacacatacttgaggactgttaagctttctttgaacgggaaaattcctgtaacccttgaccacctcagtgtgagaggaaacaacattcgctattacatcctccctgatagcttaaatctggaaactttactagtagaggataccccgagagtcaaggctaagaagccaactgcagggcgtgcagcttgggctgtccggcgagagaggggtgcagcagtgcagtggagaggcatgtgcaagctcaagttcaacagggagagggtggggtgctacctgctggtgatcctggtggtggccctcctcatcggcgtcctcttcggcctcggcgtcttccgccacggctacgagcgcttcaaggacctcggccgcaaccacacctgctacgactgcaacaccggctga

SEQ ID NO: 19616 - DNA, 672 bp, Oryza sativa
  Clone ID: PAT_MRT4530_25059C.1
atgggcgcctccgcgtccagctccggcgaacgccgccgccgctgcggctcggcggccatcgtggccgacaccgtcagcgagcacttcgacctcaccatcgacggctactcccacatcaaggcgatgctgcccaccgggaaatgcgcgacgtcgccgccgttcaccgcgggggggcacgagtggtgcgtcgacttctaccccaacggcaagctcgccgcggccggcgacgccgacatgatccagttcttcctccgcctccgccgtgccgccaaggccaaggccgccgccgcggcggtggtggcgcaggtcaggttcgacctgctcggcgacggcgggagcccgcaggcgggcgtctgctccggcaccggcagggtgctgagcttcgcggtggacggcaggggccagagcatggtgatcaggagggacgcgttcgagcaggcgggctgcgccaaggacgaccgcttcaccgtccgcttcgccgtgacggtgttcagggggtgccgcacggcggaggcggcgccggagagcaggccccgccgcccggcgccgtcgccggcgtcgccccgcctcccgatgtgcagctacacgtgtacggtcgactgtcaaacaaggaacgtgcggtctgcgccgacgcgaccttcgagctcgaccgatggcggctgtcaagtgtaa

SEQ ID NO: 19617 - DNA, 1153 bp, Oryza sativa
  unsure (1)..(1153): unsure at all n locations
  Clone ID: PAT_MRT4530_2505C.1
actagtggatccccgggctgcaggctggagacccggaagactggaaggccgacctgccgctgccggaaaaccccgccccccgcgccgccgcttcgatctccggctcccctccgccacttcccttgcctcccccacctcgggtcggccagttcctcctcgcagttgacgagctacctccggatcgaggagaggtgttctcatttgtttggacttggaaactctgggaaaatgttcaagaatacatttcagtctgggtttctatcaattctttacagccttgggaccaagcctttgcagatatgggataaggaagttgtagatgggcacatcaaaaggcctcaggatgaggatatccagtctaatgtacttgaaattattggaacaaatgtgcaatcgacttacattacctgcccggctgatcctgctgctactcttggaattaaacttccatttcttgctttaatcgtgaagaatcttaagaagtacttcacatttgagatccaagttttggacgataagaatgtccgccgccgatttagagcatcaaattttcaatctgtcactagagtgaagccatatatatgcacaatgccattgaagctagaagacggctggaacaacattcagttgaatctctctgatctgacaaaaagagcctatggcacaaattatgttgagacactccgagtgcaagttcacgcgaattgcagacttcgtagaatttactttgctgaccgcctctactcagaggaggagctgccacctgagttcaagctctaccttcctattcagaaggcatagaccttggagcaatcatggagacgggttcttgatcacgaaagtagccagccccaggagataccactgcgcgccctcgtgatgactcgtttaacgcgaagctattcacgcgcaagcctgcacgaaacctcagggatcttcctggttgtttgataattgtaggagagtagttagtcgtagcctgaatgagttgccggggtacccactgaccctcatctaatgcactgttactcggtgttgcatcctccccnacaactgtaccggatggtccaactcccatgtttgcaaacccagtagcacctaccgttgtgtttggcnattcaaaaaaaaaaaaaaaaaaaaaaaaaaaaaaaaa

SEQ ID NO: 19618 - DNA, 215 bp, Oryza sativa
  Clone ID: PAT_MRT4530_25060C.1
atggcacatcggttgaggaagacggctgacgggatagcatatcggggggaggaacatgatggatggaacgcagagctcgagcttgtcacctcccttgtcaccgcccctttcccttgcctccctcctctcatcctctgccgtgaaccgccttcctcactagctgccagctcgttgaccctgcttcaactccagatgggaaggcgagaaggtgtcga

SEQ ID NO: 19619 - DNA, 1291 bp, Oryza sativa
  Clone ID: PAT_MRT4530_25061C.1
gcacgaggctctcctccccccctccgctgctgcaaagcttccagaaagaaaggggaggagggaggaggtggaaaagccaaaggcaaaggcaaaccacgcgtctctctttggtattcgtctctccatggcacgcgtcctccccctcagcatcgaggcgggggagatggccatgcccagacgtgaagaggtagttacagacatgccaagctcttccgcagtggcatcaggcaacggaatcgaacaacctgagcaaaacacaaaggatgatgaatatgaaaggctggtcagaccagctcatagtgtaatagctgatgataacacggtagtcctacctgaagaacctacctcaaggtccatttggtggatgaaagttctgcttggctgcttccttcttatattagtatcttatgtcttcgtgaaatggggagtcccctttgccttcgagaaggttctcttgccaatcatgcaatgggaagcaagtgcctttgggcgtccagttttggctgttgttctcgttgcatctttagccctcttcccagttactttagtcccttctggaccttccatgtggctagctggaatgatctttggctatggttggggtttcttgattattatggttgggactactataggcatggtggttccatattggattggctcattgttccgcgaacgtctgcatgcatggttaaaaagatggcctcagcagatagctctaataaaacttgctggggaaggaaattggttccagcagtttagagttgttgcactattcagaatctcgccatttccatatacaatttttaactacgctgtaactgtgacagaaatcaagttcaacccttatctatgtggttcaattgctgggatgatacccgaggcgttcatctatatttatagcgggcggttgatacgcacattggctgacatgaagtatggcaactacaagatgacaccggtggagataacatacaacgccatctcgttcgtcatcgctgttgtcctcacggtcgccttcacggtgtacgccaagagagctctgaatgacataaaagagtcggaaggttgggcggctcatgtaggcctcccgtttgcatctgggccgcattggctgtcgcagggcgaacagttagacagtagagtgctctctgctcgtttagtcccacctcgcctaaccaagtcggaggccttagggagctctgctatatataggggtctggtgccaacgcttgaactcacgcagctgcgcggtgagcacagagcgaactattctttcgccttttactaa

SEQ ID NO: 19620 - DNA, 2043 bp, Oryza sativa
  Clone ID: PAT_MRT4530_25062C.1
atgcacaccgtcaaggagacgaagttacttgctaccaagctgaacctcctcatgaaacgcttggacgaccacgagaaaaggccacgaggcaccgtcaaggccttggactcacacgttacgtgtgaagtctgcggtggcacgggtcattctgggaatgattgcccggaaacccgtgaggaggcgatgtacatgggcaacaacaacaacgggtaccgtccacaaggaggtcaagggtggaaccaaccatgcccatattatcaaggaggtaacattaacggtaacttctctaaccagccctccttgaaggatcttgtttttgcgcaagctaaaaccactgattcgctaagcaaaaagcttgctgccaatgataagatcctagataacataaatgtcaaattagatggctttgcttccacatttcaaaaccagctgagcttcaataaaatgatagagacccagttagctcagttggcatctttagtccctgcaaatgaatctgggaggattccggggcaacccgactcctccattgaaaatgtcaaggcgatcacaaggagaggagtaatccagaagatccacatcaacgtgccgttgttggacgccatgcaagtgccaacatacgcccgttatctcaaggacatactcaacaacaagagactgctcccaacaacggaggtggtcaagctgacagaacaatgcagcaaccagatactccacaagttcccggagaagaagaaagatccggggtgtcctacgatcacctgttcgatcggggcacaacagttcaacgggaaggaggaaaagtttgagtttcaaccgaggacggaacaatgctccatggttcgcgaggatctccagaagatgcgggagctagtggctggcaatgagcgacaacggcaagggctcgagcaccgtatgtcgaagcttgagaaccacttgtcggagatctgtggctcactgtgggtcacctacaccggtctgcaccagctcgccggggagtgcggcgtcaaggccaccatcccggcgaatcccgacgagttctcgctgacatctttgctcgcggaactggcaacagcgatggagcattatgatcttgagtactttgttgtagtttgtagagacgttgatgtcaaggatgtccagcaaagcgggcagcctgagttgccagtgatcgttccggcacttgcgtccgagccacatgtgccgaggacgaagtttgaggtcgcggaactcgagagaattatgctggaagtaaaaaaggaccaggccgtagagacactcgggggtcgtgaggtgtggttcaactcgtatctgaagagttgctgcacgtccatgtcaagagtctgtagagagctccgagtaccccgtggggatcccgaggaatcggcggccggatacatctcgtggctgaatggggcctgcgcccagctcgacagcatcggtcaacgcattgacgaggccttcaagcaggagtgtggtcgatcaagccgatatgccgaggggcatgtgttggcttgcatacgagatcatcgtccgcagctgcacctcgagttcctccgcgaagggttttctcgttctcggagaactcctacggagataaatggcctggcgaagtcgatggcgccgctggcagagaaggaatttgccaacttgcgaccatcgccgtctgcaattttgaatgcgcctggccgcagaacttgtgtgatcgtctcggtggggagcatggcctctgagccgtacacgaggaagaagggtgtctccttgttggacgttgtcggtgtgtactatgccgtttgccctctcgacttgtccattgctctgagggtgagaaaccgaggcgaagcagatcttgactcccaacctgatgcagtaatcctggaaatcggcactgatgaactgggagccgttgtccgttatgatacggtggggcaatccgaatctgcagaatatccctttgatgaatttgatggcgttgtcggccttgatttcccccgtgggtgtcgcttcaatccacttagtgaatttgtcggtcgccacgaatag

SEQ ID NO: 19621 - DNA, 1089 bp, Oryza sativa
  Clone ID: PAT_MRT4530_25063C.1
atggtggacgaggtgacggggcgcgcgctgttctactacctcgccaaggccaacggcggctccgccacgtcgtccaaggggcccctcctcctctggctcaacggtggccttggctgctcgtcactcgggtacggcaccatcgaggagctcggcctgttccgcgtcaagagcgacggcgagatgctcagcgcgaggatgagatggccaccagtgtcgtcgcaccacgtcgcgctgacctcgccccattgctcctctgagccgcacaagttagctttatctatcattgccacatttattttcctacatgcgacactgtcagcacctggatctggacttcacgacgccgacggcctcgagctcctccccaacctgtcctcacctcgtccatcacgtgcacggtgccccgttacctcaccaccacatcgtcggcttcgctgccaggaactgccggcgcacggtaccggtgaaggggtatcctcgccatcacgggcctcttccttatttgtttatagttgcgccaagccgccactgccaccggcgggggaggcggtgacctttgaacgacgccagcctctcctcgtcgcccaccagcttgctggccttctccgccaccagcacccaggcttggtggagaaggaaaaccttgagtccttcaatctaccactgtatgggccatccgtcggtgaggtagatgaaatagtgaagaacgtggatgaaatcaaggcgacggcgagcaggacgaacccgacgttcgcggcgctggcgctgcgtttcgccgttcgcgtcgagctcgccggccaccacgcagagcccgaacggcacaatgcaggtgaaccctcactcctgtccgcatctagccggctagcctccgaccgtgctgcgctctcccgctccgccgcgatggcccatcccgccaagcacgcgccaccagctcggctgctcctcgatgcgctccgcaccaccaccgccgctattcgcgtgcgtgcgccagctgcgctctcccgcgccgcctccgagaagatcgccgtgccgcggatcgcaccaagccacgccgtgccgcctccgccgccgccgcctcaagcacagtag

SEQ ID NO: 19622 - DNA, 675 bp, Oryza sativa
  Clone ID: PAT_MRT4530_25064C.1
atgaagggatctgcggatcacatgcagccggtcgcacattggtcgaaaaagctttccgacaagactatccctcttacttggccattctcgtgctgggggcttgacatgctcggaccattcccacgaggacagggcggctacaggttcctattcgtggcgatcgacaaattcactaagtggatcgaagcgacaccgacgggggaaatcaaggccgacaacgccatcaaattcatcaaagggatattttgcagatatggactgccacaccgcatcataaccgacaacggctcccagttcatcagcgccgacttccaggattactgtatcgggctgagagtcaagatctgcttcgcctcagtttctcaccctcaaagcaacggacaggtcgagagggcaaacggcatagtactacaaggaatcaagacccgcgtctacgacaggctcatgtcacatgacaagaagtgggtcgaagaactcccatcagtactatgggcagtgcgtaccacaccgacaacgtataacaaggaaacacccttcttcctcgtgtacggctcagaggccgtgctctccaccgagctaagacatcaaaggaacagagactaccaggaaggccaacgccagtccatagactggaacaccttctctgccagcggcgccattgactttgccaggtga

SEQ ID NO: 19623 - DNA, 1308 bp, Oryza sativa
  Clone ID: PAT_MRT4530_25065C.1
atgcgccaagacaagacatcggatatcgatttcagagataactttgtcgacaacagcgtcaacaccaacctcaaccaaggagtccctgcttcaacaatgctggtgtggactcaagtcggcgccgccgcgcaagcactccagactatccctcttacttggccgttctcgtgctgggggctagacatactcgggccattcccacgaggacagggcggctacaggtttctattcgtggcgatcgacaaattcactaagtggattgaagtgacacccacgggggaaatcaaggccgacaacgccatcaaattcatcaaggggatattttgcagattcggattgcctcaccgtatcataacggacaacggctcccagttcatcagtgccgatttccaggattactgcatcaggctgggagtcaagatctgcttcacctcggtttctcaccctcagagcaatggacaggtcgagagggcaaacggcatagtactacaaggaatcaagacccgcgtctatgacaggctcatgtcacatgacaagaaatgggtcgaagaactcccatcagtactatgggccgtgcgtaccacaccgacaacgtctaaaaaggagaaacccttcttcctcgtgtacggctcagaaaccatgctcccaaccgagctacgacatcaaagatacggagactaccaggaaggccaacgccagtccatggactggaagaccttcttcgccagcggcgccatcgacttcgccaaggcctcgtcgatacgcttgccgatgtcttcgagctgggcgcaggccccatttagccacgagatgtatccggccgccgattcctcgggatccccacggggtactcggagctctctacagactcttgtcatggacgtgcagcaactcttcaggcgaattttgatctacatcgccctgcggcacatgtggctcgaacgcaagtgccggaacgatcactggcaactcagactgcccgcgctgctggacatcctcgacatcaacatctctacaaacgacaataaagtactcgagatcaaaatgctaaagaaaactaaggtgatgactgcacacacaaaggcggttggaaccaatatcgccgacttcttccatcacattcttgcgcgcgtcgctagccgccccctaatccaagatcttctggagatcgagttcagggtgcgccaacctcacacacgcaaggacatggcacgcaccggtatagatcccattagacgtctcctctccgatcatggccgtgtgcttgaaggggatcgcctccatcgccatagccagttccgcaagtga

SEQ ID NO: 19624 - DNA, 170 bp, Oryza sativa
  Clone ID: PAT_MRT4530_25066C.1
ttcttccctacttgcaccacgtgaaccagtaggggattatggaccgtcgcgtggcatggatggcaacggacctcattatgtgaacgccatttacgacctgaacgttatgaccaaccacgagaacgggtgaccaagcaaggaagatcacgaaaaggagcaccatcatgagg

SEQ ID NO: 19625 - DNA, 983 bp, Oryza sativa
  Clone ID: PAT_MRT4530_25067C.1
atggcgtatgagaactatgcaaatacaactgttagtgtgaatttgaatctgcagtacagatttcacaatctggctgagtttgacgatgggaaaaaaagttgccggaaacggctggatggtcataacaggcgtcgaagaaagccacagcatgatgcattgaaccctaggagtttccttccgtatcatcaagcgaatcagttttcagtctacccgcaaacatttccgatagctgatcagaacgccgacgccttaatgcgtccgcttgatcgtcaccctcccttctccatctcattctcagggaccttccgggaaccgaagcagttcccctttatgcaagatggcgggagcggcctcggcgcagcgcgccacgatctcctgcggcccttctcttccccagaagatggagccaacattaccacaacccgcagcgcatgcaacggcgtcccccacgggctggacccggagtgtgctctctctcttctgtcatcgtcgctgcatccctcccccgctgccggcatctccagcgcaacagctccaccgcagttcgccccctcttctttcagcagaatcgccgcctcgtcgcaagccgtaaccaccgcattcgcatcagatggaggatcagttgccggtgaccatgtcttggttcctgctgtcacatatgaagatccttcccaagcaatgccattctcttggcaggtgtagagcagaggctgtgattttgctgttcggttcgtcaatgaaaggttgatgatggtgctccggccgctcatggtgttgtagaaccgcatgtggacgttgacggcgaggaggaagatggcgatgagcgcgaagtagatgatggagtggacgaggatggagaggccgctggtctggaagttgccgaactccacgatcctccccttccccgggatctggaacagcagccccggcgacagcaggatgaacagcaccagccctatgaacaccggcccccaatccgccat

SEQ ID NO: 19626 - DNA, 597 bp, Oryza sativa
  Clone ID: PAT_MRT4530_25068C.1
agaacataaaattcggttcatcaaatcagaaggaatttgtttgttgaagctgtagaattgtagtgaagagatcgatagatcgatcggcgatggatttggcggcgtggtttgggccggtgaattcggggctggtgctgctgatactgacaatgctgctgcgaaacctgcagaatttccagctgatgcagacgttcgtggcgcggcagctgaaccggcgggcgcggcggctggcggcgctcatcgacccctacctgtcgatcaccatccacgagtacgacgccggccggatgacgcgcagcgacgtgttcgccgagaccaaggcgtacctcgacggcgccgtcggcacgcgcgacgacgtgcgccacctcaacgccgaggacgcgcgcggcggcggcggcggcggcggcgcaggcgaagggggtggtggtggcgctggcagcagtagcagcaaggggctggtgctcagcatggcggacggcgaggaggtggaggaccactttcgcggcgcgacgctgtggtggtcggcgcactgcgagcaggacgactacaaggggcggcgcggcggccgcgggcgcgcgttgcagcgccgctcctacc

SEQ ID NO: 19627 - DNA, 653 bp, Oryza sativa
  unsure (1)..(653): unsure at all n locations
  Clone ID: PAT_MRT4530_25069C.1
tggaaatcttttttttgtttagactattttttgtttgcgagatgtcttgtctgcaattccttatttctatcatctcatgcaaaacgaggagaatgcaaggcaagggcgagaacaataaaaggaacaaatccttttaggagggattgctggtcttcttaatcctctattgggcacaagaaaaaggcttttttgcctttttcttgtgtcgattcttcttgtatcgaaatatgaatcttttttcttcctattcggcaaagattactatttcttctttatttgggtctgtctcttgaacctcttttgcttaggttcaggcgatgtagtggacaaaaagagggaaagaaaatatggcgtgggacaaattttttgtgaccaaatagaattgcttgacttgttcaattaagttcaatttagaacttacagaaattttgcaaaaaaaacggatactcttccattgaaggcgtgtttttatttttaggctagttgagtagtttaattaagggtttatttagttattactctaaattaaatcaatgatttacaagagacttccctccgggaataaaatattggatcctcgattgatcctttctttcttctcgcttcataaaagngaattaatttcattggcgaaggggttataaatcacctga

SEQ ID NO: 19628 - DNA, 612 bp, Oryza sativa
  unsure (1)..(612): unsure at all n locations
  Clone ID: PAT_MRT4530_2506C.1
ggtgctgacacaagggattgaagatttttttttttttttttgtcagtgtaatcacaagctaattcaaaattgtatgttttcagcagatcagagtagtttcatgaccttcccataaatacaagtacaatctccaaatctatgacgataactccatccacgagcttgcttctaataatgatgccactgcagcttcaagctgacaactccatgaggttgctaccaagaacggctctgatgctgcttcaagctcatgcaacgggagcatgtgcatctataaggctagtatgtttctctcattgtcccaataattttgtctgcgtaactattttctcactttatctgtttggtaaaattttctcatggctagtacacttgttcacatgatagtagaggaactacccccacctaatcaacccccccgggcgcctccgtcgaccccggacctccggaccgctcccggcacggcgtaccaggctttcncctatagtgagtccgtattcaggaccttgggcggtaacatccatgggctcnttagcctgcgtcncctggntgtgcaaaactnatggtctatcccgctccccaaagtttcaccaaaaacntacgcagccgcgg

SEQ ID NO: 19629 - DNA, 279 bp, Oryza sativa
  Clone ID: PAT_MRT4530_25070C.1
atggccatggcgaggcgggcggctgctctctctctctctctctctctctctctatctctcgtaaatcaccaagtcagagctccgattccgctctccggagatccaggacgagcaggtgcctccggaactgcttcctctgcatctcgatggcttccactggggatggtgcaccaggagctggagggaatggcggtgctccaggcgacaacaccaacggaggcaattctgtcacacaatctagcggagggacattcactgggtataacctttctacactaa

SEQ ID NO: 19630 - DNA, 388 bp, Oryza sativa
  Clone ID: PAT_MRT4530_25071C.1
tctacttatattatagataaataacgtcaataaaaagggccaagctaaactaattaaaagggacagaggaaaaggttgtacacttacattactttttttttcttggattactaactttaatgggttatttcggtcctgggaatacgactgaatgaaagcagtgttttcagctacatggttttcaactgagagagagagatagagagagacagaaagtttggctgaggctctcctttcacaagatgcttcttattcaacaagttttcaggatttggcagacctcctgatatagacccaagggtgatgacttgctagggaaaaaagtattttttttttgggggaacaaattgcttgcttgggtttatttgatccctgagagggttcacaa

SEQ ID NO: 19631 - DNA, 219 bp, Oryza sativa
  Clone ID: PAT_MRT4530_25072C.1
atggggagagatttgtgcagcccagcagtccccgccgtcttcagcacaaccgtcacgttcgcagcttggggaagaatggagaagtatggggagggagggattggtgcagctgccgcccaacacagtcgccgcttggtgccgggattgcacagccccgcctccgggcgtcgccgctgcggcctccacgtggagctgcagtcgttgttgctgcagctttag

SEQ ID NO: 19632 - DNA, 560 bp, Oryza sativa
  Clone ID: PAT_MRT4530_25073C.1
gctgcaggaatcggacgagggatagataattaggttaataaattcatctagcggtttactgatagactctgtaattagtttttattcgtgcccgaatatcccatgcaataccctatacaatacccgatgtgacacaccaaaactttacacctctgaaaagtccttccaccggtttgcccaaaaccaaacaaaaattggtaaaaactataacttttaagtcgacttcaaagtgggctcatttaacttgtaaaaaaaggggtcatttttgttaacctggtgtggctccttcaattcatgaattgaaggcagtatttcaaataatgggctcatttagattggagccattttttgttctaccaatttttttaacaactttaacagaaccacattaatgtttggtttaataccaatctttacacacactagacactagtaccaactctatctagcaaatttggtagcgctcaacttatcaaggttatttggtagtgtacaaactgtctctaattcgaacttgccgaatgttcttctgtaaacctgattagatggtgcaaattatt

SEQ ID NO: 19633 - DNA, 615 bp, Oryza sativa
  Clone ID: PAT_MRT4530_25074C.1
atcacgtcgccgaggtcgaggaagtaggcctggctgatcctccgctccttgtagctgaggacgaggttgacgaagagcacccggaacatggcgaagagctcgtacgccatcgtctaccaatgcggcgaagaccacgaacagcatgccggcgaggtggcgcagccagagctcgttgtcatcgagggagtaggcggtgatggtgtcggggccgccgaggtggagcagcaggaatggcgtccagaaggcgaagatggaggaggacccatgaatgtcgtctccacgacgaacatcattatgaggtatatcaccttccgaaggtgaattctccactaggagaatcagaggagtatgctcacatccgacatagccattgggagataatcaatacctccaacaatgacatatccacaaaaatagtagaatgtgtcggtgcaaccgtcgttggcataacaagctcaacgcatgcaacacgacgaacctttgcatgactcgcacatgtccacacgcgaaaaacgccagtgtgcgacaagcatggtcatcaacccatgggtgatcaaccaacacaaccagggagtagtcatcaactacgagagcgcgataaaacgcaatagtgca

SEQ ID NO: 19634 - DNA, 506 bp, Oryza sativa
  Clone ID: PAT_MRT4530_25075C.1
ttctttttttttttttcctcgaaacgtaggagaattgtgtttcatttcattaaggggaagaaaaaacaaagtagaaaatatttacaaagtaggaggacccgagccctcccaccgagacccacgcacccaagaccacaccgtgtttgcgctaactgcctaggttagccatcccactgaggagcttttgaagtgccaaagctcctgcggaacaccaaagattactcttgtttcctaccacttgcaagaccgagacaccctcgcaatttttgttgaacccatgttatagtaggggtgaactgtacttttgcggcactaaatagagaaaagaacatgtcactgacaaatgacggtataaaaggaaagaaaagccattgtctgatattatattgcgaaattcatgttcgtcgatggtattttggagaacacaacatttgttgatagcatattgtagaataagtcataatacaaagtcagctacaccaacgtgaaaggaaggacactaaaat

SEQ ID NO: 19635 - DNA, 2163 bp, Oryza sativa
  Clone ID: PAT_MRT4530_25076C.1
ttagcgttggcgtcccccacctgggtcctgtacatgtcgccgatccccatgtgcgccatgaggaaccagaccatgctgataagctcgccgccgcggctgagctgccgaacgtgcgtgctcccatggcacctgccagccgcgtggacgagcatctccctccacactccggccaccaccctccacatggtgtcgtcccccagctgcagcagcgccttggccaggatgcaggcgtcgaacagcaccgacttgctctcgtcgcccttcacaaccgccggcttcttggacgtgttcacctcgagcagcatcctctgggcgtcgtggtgggtggggtcccacgccgccgccgaccggaagaggcggcgtgcctcggcgcgcgtgtcgcggtaccggagcagcccgatgacggcggccgtcgccgtcgctgcgggcagcatctccggcccgcctggcgaggaggtacagcatgtactccgacagggtctcgctgatggacatcaagctctggatgtcgccgttccgtggcacttccatttcgcggcggcggtgggagcacaggtccgtggcgacgtgccacagcagcaggcactcgtcgaactcccttctcacgctttcgcgcacgacgtcgttcacgttgagctccatcagctggatgtcgccgacgagctcattgattatcccctcgccgccgcggtagtcgcagacctcctccatctcgttgccgccggagtaccttacttcgttggccgtcttcctgagcccatcgaacacgtagttgaggacgtcgatggacttcttccccttgttggaatccttgatcttcctgcagctcaccggctcgtgccggatgaagaagaagtcgtccaagatctccctcacgcccaccatgtcggctacccaggcgaggcagcgcacgacgcgcgggatcgtcgtccacctgcagcaccagcaccggcggccggcgtcctcctcgggcttgcttaggctgtacctgatgaggttcatcttcgtgatccgctccgaccaccgcctcgtcggcagccgcacggccctggccacccgtgcaagccaagctagcttcggcttgccgtcgaggaatgccagcgtccggtcggaggagaggagcatgaggtacccggccacgtcgatcgccaccccaccaagcagcagcacgtaggtgacgccgcggtcgacgtggcggacgccggccttgtccatgagcacgaagaggacgacggcgacgacgaggcacgccgtggcgacgaagcggaggaggcagcctctcctggtgctcgacacggccgccttggtgtacgccatgtcgtagaggaagccgagctccacctcgaccacctcgaacgccgcggcggccgtcatcacgtcgccgaggtcgaggaagtaggcctggctgatcctccgctccttgtagctgaggacgaggttgacgaagagcacccggaacatggcgaagagctcgtacgccatcgtctccacgctcttcctgccgttcttcatcacctccgcctgctccagcgcctccttgtgctcgccgtcgacgacgatgatctcgaccatcaggccggcgttcttcttggactcgaactccgtcatgagcttggcatagttggggccaggattaggctcgccgagcatcttgtcgcggaaacctctcacgcttccggagtagagcgagtagattctctcgccgtacttgatgacgccggcgacgaagacgaggacggtggccgtgaccatggggttgctcgtgacggagctgaagaagacgaccaatgcggcgaagaccacgaacagcatgccggcgaggtggcgcagccagagctcgttgtcatcgagggagtaggcggtgatggtgtcggggccgccgaggtggagcagcaggaatggcgtccagaaggcgaagatggaggaggacccattgttgctgccgctgatgctgaggctgttgaggaggaggccgaggccgacgacggcgacccagccggcgacgaggtagctggaccagacggcgaggtggggaagcgggtggcaggagcgcttgcgcgtgggcgcgacaaagacgaggatcacctgcagggtgaagctcagcagcatcgccgccctgatcaaccagtcgctgtcgttcaccggatggaaattgaaacccat

SEQ ID NO: 19636 - DNA, 1458 bp, Oryza sativa
  Clone ID: PAT_MRT4530_25077C.1
atgcaacacgacgaacctttgcatcgcttgcacatgtccacaagcgaaaaacgccagtgtgcgacaagcatggtcatcaacccgtggatgatcaaccaacacaactagggagtagtcatcgactacgagagcgcgataaaacgcaataacaataggttccaaataatattgagaagatatgtgcacaccaggggcaaccatatgaacagtgtcgttccaccacatggaaaacactttacatctttcaccggaccgaaacgcaacacgcaaacggacgatttgcacagtgaattcggcaaaagcatggatctcgtacaacaagtatacgtgactccatcttgtagacacatcgatatcaccatttatgacggcggcaacgacatcactcccgtgtggcaatttggtgcggtggcggctcggtggcacacgacggagtttcgcgtcgacccgcgcatcctcatgacggcggcgaggcgaattcaacgacggcaactgagacctcaacaacggcaaccaaattgcatccggccatatcgtctcggtggaggttaatccggtagcaggcagcggcaacggcaacatgggtttagggctttttctgagacggcggtttcccgcgacggcatcgacgcaaggccgacggcatacccaacagcgacgacgaacgatggccaacatgtctctaagtccgatagtttgctttctccagtggttgggcatcctgtttgccgcatccacgccagccatcgagctggtccggccgatgcggcgctgcgtgcatctcgtcttgcactcgcgcagccgcgcggagagcagtgtgggctgcgcaaggggcaggagcccacccgaggggtcaacctcgtggcagacggtgcgcagctccgatcccttcacatgcggtggccaagcgacatcgccgaggtcgtgcgctggcggctcggtcggtcgcatgcgcctgcatgcacgtcccagcgtatactgcttccggacgtgcggcggccggatccgttccctgtccctcccacagcagtagaggcgtgagatgatgtagaacacccgcacccatccctgaacaaactccaacgaagcacggggcacgtagcagcgcgtggctggcctgggctccgcgtaacacgggtgtattcgaacacgctgcgaagtgtaaaacacggaagcttccctgagatggcggtgcgagggcgacggtgcgctcacggcatcacgaacccactgtggtgttacttgtaatcgtcggcgatcgagcatacgtggttccagctgtgccaaattaaccagaacgcaccgccacgcctgcaccgacgcggcgtggcgtgtcagcgagcaaagctcggaaagaatcattaaaaaaacagccacttgttgctgccgatcacgcccgcagagcgccagcgtcgtgcgcgcgggattgccgtaccgtacgtcggtacgagcgctcat

SEQ ID NO: 19637 - DNA, 481 bp, Oryza sativa
  Clone ID: PAT_MRT4530_25078C.1
cccacgcgtccgcaccgcaccagccatcatcagcagatgctctaccttgatgcactataacgaggtagacatggccgctgccttcatgtccatcgttggagctgcgctgtccagtaaggccaacttgatggtgatcaagcagaggagcatcatcatacgcaagtcgaactacaatgccaagagctccaactgaacagcccatggtcatggccaacgagctgctctacctcaggcagatctacgacgagacgtcgaactacctgacctacgacatctccgatgactacgggtacaacaccagggggatctgcgtcgaccactacattttcgacaataacacggatctggaagcgatccactccatgctgagctatttcgagtgcgctaggctgcgtgttacaagatctgatttccagcacccgcattaaggcttctaatcggcgttgctcaaatcgacgtcctagatcttcacatatggcag

SEQ ID NO: 19638 - DNA, 484 bp, Oryza sativa
  Clone ID: PAT_MRT4530_25079C.1
gtcatgggccaaagcgttctcttccgtcagccttcttccgcatccgtcgtactacctaaccgtgccacatctctcaccgtccgtgccgcttcttcctacgccgatgagcttgtcaagacagcgaaaacaattgcatctccgggacgtggaatcttggcgatggacgagtcgaacgcgacttgcgggaagcgtttggactcgatagggctagagaacactgaggcaaaccgtcaagcgtacaggactttgcttgtctctgcaccaggtctcggacagtacatctccggggcaatcttgttcgagcagactctctatcagtccacgaccgaaggcaagaaaatggtcgacgtcctcgtcgagcaaaacatcgtccccggtatcaaagttgacaagggtttggtgccacttgttggctctaacaatgagtcatggtgtcaaggactcgatggtctatcctctcgcactgctgcttactaccaacagg

SEQ ID NO: 19639 - DNA, 645 bp, Oryza sativa
  Clone ID: PAT_MRT4530_2507C.1
atgtggccatgcggattcttgagtgaaatatctagcaagttccatgggtgctggaaatttgaatatagcatgacatccacaaatgggcttcaggaattaagagggagccaatcaggacaagggcctcctgagctaatgttgtgtattgcagttcatggtacttattcaactataatagccctcaagacaagcatatattctgagtggcgcaaaaaggatctggtggcaacagctctgtggctcaatagtaagaggaggggcgttgagagagcaggaagtgaattgttggctacaattgataaggcatatcgcttcatcaatggggattgggagcaacaagagcagcggcaacacaggccggagaaacattgtgaggagaggactgcacgagcaccagagcaccgcgagtgggttacgagcgcgcgcgggggagcagcacggccgacagggacgcccccctccaagagcgccgtcaggtcgtcgtcggcgttttgcccaactttagtggcaggtgaccggcagccggcccggccccctccaggaatcgcagcgtcggtcaacgtcgtgctctcccgcgccaacccccttcctcgcgcagtggatggctgtggcggctccgacaggtgcggtggcaggaggatgtga

SEQ ID NO: 19640 - DNA, 1690 bp, Oryza sativa
  Clone ID: PAT_MRT4530_25080C.1
ggaagaactagtctcgagttttttttttttttttttttaaaccaaaccatttttttcattaagagtactgatatattaaaacagagcagctagtttgctcgtcttgcgagatctgatgacaagcctagaacaagaacagcagcagcaggagcaggaggaggagaacgtgttattcctctgaactagtagtaagtttcagctgagatccgacggctgcaaatgccccatctctttgcttcagaagaaagcacggcttccgtagaatactttgggagatttctccggcccaccggccatcggcttcttcgccgccgccgcggccgccgcgcccgagtcggcgccgctggagtccgcgtcggaagcggcggcgccggcgccggagacggccgcgctcttgtcgctgccgttgtccaggtccagcgggagcttcatcttggcgagggactccgtgaactgctgcatgctcttcatgtacatgtccatgatctccttctggtcgaccttgacctcctgctcgaggttgacgcggatgaccggcggcttatccaccgcgctctcggacatggcgccgggggagttcgccgccgggctggcgctgctctgcacggtgcgggaggactccacctccgcgtcggcggcgtcggaggcggccttctccttctgctccgccgacgagacggcattgccggaggagttggactgcggggtggccgggaccgcggcggcggcgggggactccgtggtggacacgctgctgaccggggtgtcgctccggaaggtgccggccgagtcggcggtgctgttgtccgtcgagaagctctgcacgacgcgcacgccggcgacgtgggtctcggcggtggcgccgtcgccgtcctcctccgaggtcaggaggctctcggagctctgcggctccacggcggagcacggcagcccgatgtactccgacagcatgatctggttctcctccacgagattcagatcggggaactcgatcttctcgtactccttaccgttcgccgcgccgccggcgcggtgctcctccgcgtcggccagggccggcttgggcgtcggcgagatgggcacgacctcaggcacgaccccgatgtaggacagctcgagctgcaggaacccggcgtgggagtggaagatgtcgttggtggagagcgggaactcgcgggcgagcgtgccgccctcggcggcgacgacgtccgggagcggcacgagcgcgaaccccagcagctggtcctgcaggtagttcttgacccggctcagcatccacacctcgcaccggagcgcgccgtcgacgtccccggcgcgcacgcccaggcgcagcgactggtcgaacaccgggttgcgccccccgccgttgatgacctgcgtcgacgccgccggcgccccctcccccggcagcgacagccgcgcgtacacgtcctgcttgtggtagatgcagatgttctggatgtcccgcgcgctctgcacgtgcacgtcgacgtacccgatcagctcgccgccgccggcgccgccgctcccgttcgccgccggcgcagaaaccgccttctcctgctgcgactccatggcaacaaacaccaccaccactcgccttgtctgtactggagtactactcgagaactgaagcagcagcagcagcaagcacacaccactggttggaggaatgaggaatcagacgaag

SEQ ID NO: 19641 - DNA, 583 bp, Oryza sativa
  Clone ID: PAT_MRT4530_25081C.1
atacaaaagtagtgaataaatacatatacacttctagcgattgtctgatcgatcatcaatggctagcaaggtcgtgttcttcgcggaggcgctcatggtggacatggtgggcatctccggcgcgcagctgatctagttggagatgaggttcagggacaggcagtgccaatgcataggcgcatgacagcccgctgtacgcgtgcccgcaggtgctctaccggcatctcaccggccgagagaggttccagccgatgttcccgcggccgggcgcgctcggtctgcagatgcagtgctgccagcaactgcacgacagtgagccgcgagtgccgttgcgccgtcatccgtcggatggtgaggagctacaaggagagcatgccaatgcccctggagcaaggctggtcgacgtcgacgtcggagtgctactgccgcgaggggtcttgaggatgatcatggcacttcggtgaggtgtcgcaagatgaggacttctaccgcgagcagcatcaacaggcggacatgacccatgttaggcttaccagctctaggcactacgcgaatcacttgacgtcattccgccctagtgagc

SEQ ID NO: 19642 - DNA, 1290 bp, Oryza sativa
  Clone ID: PAT_MRT4530_25082C.1
atggcctattctggactaaggcatggcggcgttgggagctcctctcggccgggacatggattcaagggcccggctagttcggttgaatgtctaggaagggagatgctggaaatgcaattgagggattccaaaccagatgttggtgatgaaaagaacactgaacgagatgtagtcgacggctctagcgctgaagctggtcacataatagctactacgatccgtggccgaaatggtctacctaaacagtctgtcacttatattgctgagcatgtggtcggaactggttcttttggggttgtatatcaggccaaatgtcgagaaacaggagaaattgttgccattaaaaaggttcttcaagataaacgttacaagaacagggaattgcaaattatgcatatgctggatcatcctaatattgttggtcttaagcattacttcttctcaaccactgaaagggatgaactttacctcaatcttgtccttgagtatgttccagagacagtaaaccgaattgcgagacagtacagcagaatgaatcaacgggtgcccctcatttatgtcaaattatacacttatcagatatgccgagcacttgcttacatacataactgtgttggcatctgccaccgtgatataaaaccacagaatgttcttgttaacccacatacacaccagctcaaaatatgtgattttggcagtgcaaaagttttggtcaaaggagagccaaatatctcctacatatgctcaagatattacagggcaccagagctcatatttggtgcaactgaatatactactgccattgatttgtggtctacaggctgtgtcatggcagagcttctgcttggacagcctctgttccctggggaaagtggagttgatcagctggtcgagattatcaaggttttgggtactccaacaagggaagagatcaagtgcatgaatccgaactacacggagttcaaattccctcaaattaaggctcatccatggcacaaggttttccaaaaaaggcttccacctgaagcagtggaccttgtaagcaggtttctgcaatactcaccaaatcttcggtgcaccgctatggaagcctgcatgcaccctttctttgatgagttgagagatccaaacactcgtctacctaatgggcgtcctcttcctcctctcttcaacttcagaacacaaggatgtgatgtgagtgaggttggagaagaagaggcttgtgctttggtgtgcttgtgcagttggtttgaggttggaatctatgcttcagggttccaggctgtgtaa

SEQ ID NO: 19643 - DNA, 859 bp, Oryza sativa
  Clone ID: PAT_MRT4530_25083C.1
cccacgcgttcgcgcgctaggttttactttcaggcgtccgtaaaactcttctgaagctttcattgagctttatttatcagaacacgagagatagacctcaaccacaacgtggtatcatcagattacataagtatcagtattcagtactatgacgtagaaagatagcaatgctctgaatgtttgcacggagttcaaattccctcaaattaaggctcatccatggcacaaggttttccaaaaaaggcttccacctgaagcagtggaccttgtaagcaggtttctgcaatactcaccaaatcttcggtgcaccgctatggaagcctgcatgcaccctttctttgatgagttgagagatccaaacactcgtctacctaatgggcgtcctcttcctcctctcttcaacttcagaacacaagagctaaatggcatccctccagaagccatcgaacgtctggttcccgagcatgcgagaaggcagagtttgttcatggcgctgcgcacctagttctctagctcttcttttttcgcagtttttcttcctgagggaagctctgtaaaggtgtagtggcttctatgtgcccatctcagtgtggataaggtctttggctagagttgttgttgttgttgttcatggcaggatgtgatgtgagtgaggttggagaagaagaggcttgtgctttggtgtgcttgtgcagttggtttgaggttggaatctatgcttcagggttccaggctgtgtaactcctccagttctctttggactttggtttgaagattgtgtgcagtaacagtgcttggttcaacttcagttcagagtggtctggtgatgataaagaaaatcattcagaaagttttgttt

SEQ ID NO: 19644 - DNA, 912 bp, Oryza sativa
  Clone ID: PAT_MRT4530_25084C.1
atgctcgtggtcttcctgggcggcggcgccggcggcgtggcggtggcgggcgcgggcgcgggcgcgctgcggcagcgtggggcgccggcgccggccgggtcggtgtaccgcagccacctcgtgttggaccgcctcctgccggagctgcgcgcctcctccgcctcccgcccgcacccgctaatgacaccacaaaacaaaaaatctggaaaacgatgggctccttgtatcaccaagaagttgagacgatcagagttaccaccttcaaatggttttctcataatcgaagcaaatggtggtctgaatcaacaacgcatttctatctgcgatgctgttgctgtggcaagcttactcaatgcaactcttgtcaccccagcttttcatttgaacagcgtgtggcgtgattctagcaaatttggtgatatctttgatgaagatcactttattgggtcgctcagaaaatacataagggttgtcaaaaaacttcctgaagatgcatttgtgaattttgatcacaatatcagcatgataccaaatatgaggaccaaagccttctcatctgaaagctactacctacaaaagggctgtgcgtattgctcctttctcaaacagattggcccattcggttccaccgaatatccaggcgttgaggttggaatgatgctgcagggcatgggatttggcaatactacctccctctatgttgcctctggtaaaatatacaacgctgaaaagtatatgactcctcttcgccagttgtttccacttttacagacaaaagatactctcgcttcacctgaggaacttgcacagttcaaggatcagacaacaattggattagaaaccatttttatctccatgcgacttccttcaactcagacacctacctatgctctatcaggggcactcatctag

SEQ ID NO: 19645 - DNA, 603 bp, Oryza sativa
  Clone ID: PAT_MRT4530_25085C.1
ctacctccatctcttatcccctttctctccttttctctctccatccttcttccatcctccacacctgagctcgatccgcgaggagagcggcggtggcggccttcccgagctccccaaggagagagacattaacacgggcctcagctcaaccgcaacaccagtggcctccccgagctccccgaggtcaacaggtgaggtcggactcaagcgcccgtcgccccgccggcgaccgtagcccccagatattgcgcggccgctcgacccgtcaaatccaacgccgtcactcgcctcagcttctccaccgcgcttccgcatgcgcctcgcacgtcggtatggacatcgatgccgatgcaagcaccctcaatgccaacgccgctcgggcctagcctacgccgtcagcttgtcgaccgcaacacctacaatggttatgccagttctgtgccaccaaatgccgtggaggatggccgatctatagtgggagagaacttggcaggagtggagggaggaaggcctaggacgaagagagggagcttgccggttgctttcgcctctcagcgagattatccaaagaggaagggagaagaagaagaatatatggactga

SEQ ID NO: 19646 - DNA, 914 bp, Oryza sativa
  Clone ID: PAT_MRT4530_25086C.1
gcacgaggctctatatatatattttcccacgcgtccgcccacgcgtccgcccacgcgtccgcccgccgtctcggtctctcggcccaccgcttccatcgttcgtcctcgtctccacgctaccgtttcgcaaccacccgcttcctcctccggagaccgctcggccgccgctcgctccagcatggccgccgcgccgtccgccacctccgtccacgacttcaccgtcaaggatgcaagcggaaaagacgtgaacctgagcacctacaaggggaaggttctcctcatcgttaacgtcgcatcccaatgtggcttaactaactccaactacactgagctgagccagctgtatgagaagtacaaggtccaaggctttgagatattggctttcccgtgcaatcagtttggagggcaggaacccggctccaatgaggagattgtccagtttgcttgcactcgcttcaaggctgagtatcccatttttgacaaggttgatgtcaacggtaacaatgctgcacccctgtacaagtatctgaagtctaacaaaggtgggcttttcggtgatagcatcaagtggaacttctccaaattcttggttgacaaggagggtcgcgtggtggatcgctatgcgcccaccacctcccctcttagtattgagaaggatatcaagaagctgcttgggagctcttaaacctaaaggtcgggatctgtagagcaacctgcacttatgcactgtattcagcactgagagttgtattaataaattggtgacatgtacttcacaggttgcatttgcactatactccttgcatcctgaatctttattgtactctgtacctgtatagttttcatgtcaataaatttccttgctgtaaaaaaaaaaaaaaaaaaaaaaaccaaaaaaaaaaaaaaaccaaaaa

SEQ ID NO: 19647 - DNA, 3273 bp, Oryza sativa
  Clone ID: PAT_MRT4530_25087C.1
atggacatgtccagttacctagctgtaggtggctggttcatccaggtcatttttgacaagtatctgtcctaccagcttcagagctgggcggccgactgcggcatcagccatgagatgaacagacttcgtgtcgcgctgcttcgcacgcagtctgtcctccatggggcagaggtaacaccttcactgtcttacggctccctcccatggatgcgggagctccgggatgtcatgtaccatgcagaggacctcctagacaagcttgagtacaaccgcctccatcatcaaatgcaggaatcaagttcaacagagagcaacagtagcccaatcagcgcctttatgcattccaggtttcgcaatcaaggggcccaagcttctggtctagagccacactgggatagatcaaccagggtcaagaatcagatggtaaatctgttggagcgccttgagcaggttgctagtggagtcagtgaagcactcagtctaccaaggaagcccaggcacagcagatacagcatcatgacaagctcagttgcccatggggaaatcttcgggcgagaatcagaaatccaacagttggtaagtactcttttaagctctcaggttgatggtgataatccagtctcggttgcctccattgttggagttggtggcgttggcaagactgctctagcacagcatgtgtacaacaacactagagtagcacagtactttgacatgagaatgtggatctgtgttactgatgcctttgatgagtccaggatcacaagagagatgctagagtcagtttccagcagtcgatttaggcatgacagcataacaaatttcaacaggcttcaggtggcactgcgagcaaggctcgtatccaaacggtttctgcttgtcttagatgatgtctggagcaatgacaagataactctggcgatagagcacgagaactggcagaagcttctttctcccctaaaggctgcagcaaatgggagcaagatacttctgaccacccgatccagtatggtggcggagatgctacagtcagcccatataactaacctggagtgcttgtcagataaggattgctggtccctgataaaaatgattgtgtttgatgatacgaaccatcttataaattcacagttggcgaatattgggagcgagattgctaagacacttaatggtctacctcttgccgcaaaggtggtcgctagacagctgaaatgtaaacacaccacagatgagtggaaacaagtcttacagagaaatgcagtatgggatgaaatcatgccaatttttcagcatagctatgagaatctcccagtgcaccttcaacaatgccttgcatattgcagtatcttccccaaggactgggaatttgaagctgagcagttgatcctcatgtggatggcacaaggttatgtatacccagatggttgcaggagaatggaagacattgggaagcaatatgttgatgagttatgtagtcggtcattttttgccattcagaagaaacaatttgtcagctattatgtgatgcctcccgttattcacaaacttgccaaatcagtttcagccgaagaatgtttccgaataggaggtgatgaacagagaaggatcccatcctctgtacgccatctatcaatccatctagatagcctttcaatgcttgacgagacaataccatacatgaacctgcgcactctcattttctttacgagcagaatggtggctccaatcaacatttccatcccacaagtagttcttgataaccttcaaagccttcgtgtcttggatttatcaccttgcaagattgacagacttcctgacagtatacgacagtgtgtgcatctccgatacctaaatatctcatcaactgccatcaacatgttaccagaatacttgggtaaactttaccacttgcaagttctaaacttatcaggctgcaggcttgaaaagttaccttcaagcataaacaacctggtcagtttacggcatctgacagcagctaaccagattctttccactataacagacataggaagcctaagataccttcagagattgcccattttcaaggtcaccagtgaggaaacaaacagcataattcagcttggttatctacaagagcttcgtggatccctccacattaggaaccttgagaacattgatgctcctgatgaggcaaaggaagccatgttgtgtaagaaagtaaacctgacaatgctgcagctgatgtgggcacctgctcgagatttggtaaactcagataaggaagcagaggtgttagagtatctccagccacacccaaatctgaagaggctggacatcatcggttggatgggagtcaaagcccccagttggcttgaaagcaaatggctaatcaatcttgagctcatcttcctcagtggttgcaatgcttgggagcagcttccaccacttggtcagcttccatctgtcaggactatttggttgcagcgtttgaaaacagtgaggcaaataggcctagaggtatatggcaatagaagttcacatgtggctttccagtcattagaggagctagttcttgatgacatgcaagaactaaatgagtggtcatggacaggccaggaaatgatgaatctccgcaatattgtgattaaggactgccaaaagctcaaagagctgcctccactacctccaagccttacagagctgacaattgcaaaaaaagggttctgggttccataccatcatgatgtgaagatgacacaattgaccactgtcaccactgtctcatctctctgcatattcaattgccccaagctacttgccagattttcctcgccagtgaccaatggagttgtagcaagctttcagtcacttagaagccttatcgttgatcatatgagaatactcacatgccctcttttaagggaaaggcttgagcacattgagaacctagacatccaagattgctcagagatcaccaccttcactgcagacaatgaggatgtcttcctacatctaagatcactacaaagcctctgcataagtggctgcaacaatctacaatcgctgccttcctcattgtccagcctggagtccctggataaattaatcttgtggaattgccctgagttggaattactcccagacgagcagctgccactgtctcttagaaagcttgaagtcgcactctgtaacccagtgctcaaggatagactcagaaaagaatgtggcattgactggccaaagattgcgcatatcccttgggttgagatagatggtgaaattctgcagtga

SEQ ID NO: 19648 - DNA, 518 bp, Oryza sativa
  unsure (1)..(518): unsure at all n locations
  Clone ID: PAT_MRT4530_25088C.1
cactgcataattgataatgctacgtacgtcagtgctcaattattctttattcttttttttgtgcccttgaatattgatgtacagaaacagagtaacctcgcatgtactactacaaactttttctgcaaaaagtacggtacaggactcctgagtactggaagataaattaggattagcacttaacagcttggcatggcacaaattatccgtgctaccaacgtctgggagaggtacgggcttcctcaaagaggcaaacaacaagctcaacattgagtagcccagcaattccaacaaactaggatgcatgttcggcttctcgtcatcatcggttgtatagcctccgttcaggtccttgctgacagatgctcaagacaagtagtgcgttaaataagaacttgcagcatgtctgggtagggcgtgtgccggagtaaaacaggnagccagtgaacttctacnccatttctttatgccgcgtagtactttgagttgcaacttgnaataaattaacatcctcacgg

SEQ ID NO: 19649 - DNA, 568 bp, Oryza sativa
  unsure (1)..(568): unsure at all n locations
  Clone ID: PAT_MRT4530_25089C.1
gttggggaggttcaattaacacagcctttggaagagggaaaaggcgtagtgtncanaggtgcgagatcgcccacattttgtgtcaagatcctncgaaagccccggttgggtttgttggttgcagctgatgccactgggatggtgcagacaaaccaaggcacaagtgttgaaactgagcgcggcatggatgtgctggatggagcttgtctgcaaagtgcgtgtggagtgtggtccaaggagatgtgcactggaatggctgcgtgacgtggagaaacaactgcacacaatgctgcaatgactgggtgaatggtgcagcttgatggtgtgcaatgggtgggatttggcgctgaagttgttggtggcnaccagtntgtaaatggtgtgtgctgcaatggctgccaatggctgcccagttgattgaaaaagacacacacaacctgttgcttgagatgggcacacagtggttgagctgtgggcagatgatgcaatgactggcccagatgacaaccatctgaattttttgaagactaatatctgatattcttgccaaaaaaaaaaaaaaaaaaaa

SEQ ID NO: 19650 - DNA, 978 bp, Oryza sativa
  Clone ID: PAT_MRT4530_2508C.1
ccggccgggagaaggcccggccgggaagaagaagaaggctccccgcggctgcggcggcggcggcgaccagcccttccccttctcctgcttcgacagttcgccgccatggccactcggtttctgcctctggtgcgccgcggccttgccggcgtcctgaatcaatcgcccgcgcccgcgtccacccgaggattcttgtttcctgcacctgtgactgctggcataagatctctgcaaactatcatggaagcaagcaataatgcttcagatgaccgtaaccaggacatagaggattccaaaaccgacaccgtgccagctacggtcccttcatcggattccggcttcaaagttagagatacatcaaacttgaagatctcaccgagacacgacctcgccatgatctttacgtgcaaggtttgcgagaccaggtctatgaagatggcgagcaaggaatcatatgagaaaggagtggtggtcgctcgttgcggcggctgcaataatttccacctgatcgcggataggcttggctggtttggggagccaggaagcatcgaagactttctagccgaacaaggagaggaggtgaagaaaggctcaacagatactcttaacttcactcttgaggacttggttgggtctcaggctaatgataagggcccttctgataaaaaatagatttctcttcagtatggctttgggtcaagacaacttaaaaaaggttaactcctaaggaaatccccaagttttttactcgatatcatgacttctcaaggtggagtagtccaactttttgcacttgttagttctgatgttattgcagtgtaattgtcaattctcaaccttgtggctaagtcccccgtgtggctttggtaaatttattgtagtggacacgacccgattatgtaataggctgtgtgtcatagttttgtgatgttcttgacaaaaagtaacaaaacctaattatggaaatgtttccctttg

SEQ ID NO: 19651 - DNA, 390 bp, Oryza sativa
  Clone ID: PAT_MRT4530_25090C.1
ggaagggggaaccgggagacgggatccttaaaggccgaaaattaaattggggctacacatggaattttccttttgattttttgggtttaaagcatcaacaaacatgcagggcccagggtggaacaaaaaaaaacaatggtggaaacctgaaacatgtgcagttaacccccggttacaaaaacaatttgggcattccggccttacaggagggttcaaaattggggcccaaggctccaaattttggccccccaaggttcaaacctttggggatccaaccttaggggggggaaagggggggttttttccccgggttcaaaaaccaaaaaggggcattgggggggcttcaatttgggcgactgttaaacacccacgggggaaaaaaaatttttg

SEQ ID NO: 19652 - DNA, 207 bp, Oryza sativa
  Clone ID: PAT_MRT4530_25091C.1
atggggactcaggatcctaggccaagttgggctcctggtcccttcctacttgtaatcttaagatgggagccccctgtcccaagtcaacttgagctctcgggcttccttcatgaggcgggggcgtcggggcctgtctcgaaaaaccgcttgagaacggagggattcaccgccaagagccatgtcgccagagacagaggggatccttga

SEQ ID NO: 19653 - DNA, 1956 bp, Oryza sativa
  Clone ID: PAT_MRT4530_25092C.1
ttatctgtattccagaccttcacaatgcttgagcactgcagaagtggatttcctcatatggaagcacgctgcttcgcttgattgtatatctgtctcaagtgatcttcctactcccaggtactcttcagcaaaaagttcatcattttttgcaagcatgtctgtcagactgcagtctatctttctactctgaagtacacaaaaccgcggctttatcctcccttccagtgaataactgaagtaccttggatattctacaacagctttaagtggcttcttcatggttcttaacagaaattcaagctttggtttcataacaagttcaatactgtaacccagaagtggagagaatctatagatcatcgagcacacatttttcttagacaatcccatatccaagaggtagttgattctgtaaacattggaatacatagatgagttaaagtcagttacatgttcacaagaactggggagcattgtgcgatttatgtccaacaataaaagctccggatacttcctaatgatgcgagggagataatgcttgggaacaccaaagtcaataagaaagtttattttcttcttaagggtattctccacacttgaagcaaatatttctggagaacgacacaaaatctttgccactgttttcttatcaagacccatatctttgaaaaagagaataatctgcataacctcatttggttttctcagcaacaactgtggacttgatgtaacaactggaaccaacattttcttactgatacccagatcatcaaacagctccacaattgagttcattctttttgttgagcaacccagaatatggggccaacttctcatcgcaacaccaaggactgtactggaaatctttcttctttggaagaacattaacatttggccatagttttctagcacacatgttgaaagaatccatggatacttcagcaacatcctaccaatatattcttgttcaatgccaaccttttcccatgcattaatccttggtttgatatcattttcaacatcagaaaggatgataggaggaaatgacagcagcacagatgcaatccttggcttgggaattccaatgtactgaagaaaatcaattaatggtttaagatgattgttctctgagcagagaagaagcattggaaatgattcaatgagatagggaaacgacacatctccatgtcccaacatattaagaccgccatacctggcctccattttttcgaaaaatgataaagtactttggagtgactcatctgcaggtattgataagtgcatcatcatgcgtttagcatttctacttattaatgtttcatagacattgcttgaaaatagaatttccttcaaaaacttgatcctatcgatcagcaccgggagaccagccgccgaaacatacggcgcgatgagcttcgcggaggagagccgcaccccgacgctctcgagcagcggcaccacgccgcggtcgcgcctgctcttcgccttccccatgtagtacaccttcctcccgaacccgagcccggccatctccacctcgcggcccgcccccgccccggagctccacgactcccagagcccgagctcgtcgagctcgcggacgccgtcggcgagcatggcggcgtaccccggcgcgcgcgcggcgatggaagccgcatcagccggggaggcgccgtgctcgcggaggagctccgcgacggcgcgctcggcctccagcgcgtcgtaggaacgcgaggtggaggcggtctctgcatcggcggtgggtgcgcaggcggcgacggggtcgcggcggcgcaggagaggacgcggagacagacgccgccgctggcgtatcgggcggaggaaaggctgcttgaggagaatggcgcggagtggaggaggaggaggaggggtcggggaggcggggagcggaggagagaggagcgcgagcgcggcggtggcggtggcggtggccat

SEQ ID NO: 19654 - DNA, 631 bp, Oryza sativa
  Clone ID: PAT_MRT4530_25093C.1
tcatgatactcccggtcccatgtcaccgacagcgacacgaataaccattggggatggcgcaatagcacgcttttgggagtcaacctgaaagtgtggacgccaaccaaaggacgtgttgccacaggtttacgctatctccaaaagaaagaacagaaccttaagagaggcgattgcagatgatacctagtcgcaagacctatacctcttgatcctaggagcaatgataaccgagcttctagactagctagtgaccctctagacaacagtggatagtgtgtagctaaccctagatgtggtagatgaaatcacctggaaactcacaagtcccggagagtacatggtaggctcagcctagaaagcatagttcctcgaagccatcaacacgaactacaatgcgaacatctagaagccatggggaccaaacaaatgtaaaattttcgcttggctggctatccaaaatagagtctgaacttcaaacaggcctacgacttggggatagcatactgcacttgtgcagagacgcacccttgagacggcggttcatctcctcatggagtacagatacacctggataatttggggcatcctaacgaattggatggcacaggagtatagcaagccgaccagctag

SEQ ID NO: 19655 - DNA, 198 bp, Oryza sativa
  Clone ID: PAT_MRT4530_25094C.1
atgccgccccattgcgcaatcctcaccgctgcacctctagccgtccccgttgcaaggtcatcgccaccactctatgcagtcaacatcaccacatcacatagtcgttccgtcacttctcgcttcgtgcaccctcgatgcaaactgattaacgataactacagtcctatcacattatctcagccagggagatcgagttaa

SEQ ID NO: 19656 - DNA, 304 bp, Oryza sativa
  Clone ID: PAT_MRT4530_25095C.1
atggacatctctagggagaatgaaggctacacgagctgcggcccagtagtcgagatccgtgcccatagttatgatgtcacgaccggaaataacccaacgggcgttccttacgtgcgtgcattaatccttgtcccaggaggcaagcgaaggcccagcacacaaagacaaacgggaaacaacggaagactagggcgacgaccacaggcgcttgacggcaggcacgagctagacaccaaagccttcatctccaaggagctcctcttctggacttgggaaaaattgagcaagactgagtacaaccacc

SEQ ID NO: 19657 - DNA, 647 bp, Oryza sativa
  Clone ID: PAT_MRT4530_25096C.1
ttttttttttttttttttttgttgttttgccgggtggattatttcatattttcactatgttatgaaagatgaatcagatggcttacaagagcctgtttcaactgtacatgtacacaggaaaatttcctcatatttacatacactcacgaatcttaacactgagagcagggcttccactccaagaattgccctgaagaaacgaaacaagaaaattgtgccgcatgctagttcagcaagcacaaaggtaaatccttctaaaactcaaggaaagtgtaaaatgtttcatgtcatggactcatggggaaacatcagaaaatcaatccatctttagaagattgcagggatccagcttaggagcagttgaacaaagcacttaaaacaaacgaaatgacctgttggtttctcattagtcattagtatgcaaatgaaagccattgatgttgtagcgcttcacttgccgttggtcttctcctggggtttatttgcagcaaataggatcggacgcgtgggaactctgaatcagggcattgtaagtgatgctgcagagaagacttttctgggatcaatactcgaattgatctgtttcctcattctatggtgaaaaggtcgtaatcatccagtgaaatacttttgcgtctcctctccca

SEQ ID NO: 19658 - DNA, 249 bp, Oryza sativa
  Clone ID: PAT_MRT4530_25097C.1
atgccgccgcgccgttgcctcgaagccgccgcgccgcgccgagtgccgcgccgtgcatcgctgccttgcgccgccgccgagcccgagggagttgcggatctgagcgagggtgaagacccacaggactacgagcaaggcaagtcatcactattctttgaacatgttgatcccaattgcgaaattattttgtttacaaataagattgcatgcaatgatgaacatcctacttgtgattatgtcatgccttga

SEQ ID NO: 19659 - DNA, 3333 bp, Oryza sativa
  Clone ID: PAT_MRT4530_25098C.1
atggctaacccagctatatcattaaaagatatatctgttggacagcaaaactgcaaggtttttggacgtctaataagattatgggatgctataaacatgagatcaaaatctgcagatcccctcatcagcattgacgtcatcctattggatgaacttggctcaatagcacagatcactgtgccaaaaagggaacagactcaagatgtcctactctggggacaatatggagaatcattcaacgaagatgcaacactccataaatcaaaggatggaattgtagtagccatctttgctggccttactgcaggaaaattttcagctataacaaaagcatcttcaagctctgctactgaaatatatattgacctggacacacctcaagttagagagtttcgcactagctacaaatgggaacgtccaactcttgagcaacaactccctaaggttatacgtttaaccccgatccaagcagcaggaaaaatgtacaccttaagtgagatatcagctatgcctatttcagcctttcagatgtatctaactaatgtacaatgcttcaggtacaaactccctgtcacgattacagatgaatcagggagtttagatgcagtagcattttcttttgttgctgaagatttggtagagcttgatgcagcccaagcttcccaaaacatgaagatagacccggctgatcatccaacaacactcaataatgccattggtaaaacaaaaatttttgctatagggatgaatactgatacatcttctaagttccctatcagctatgtgcttaagaagagtttcacaattgagcctactatgtcggtccctatgctcacagatggagagcctttgaagaacaaagaggtactacagcttccaccacctgcaccacatacagataacccaagcacaactattcataatacaggagcatcaagcaaaagtacacctcctgaaatatctttggctgataaaactccaactgaaaaaaccagctcaactacaaaaagagccattgatttcactaaagactccattgaggaaaccagaagtcgccatgtgagagatgattcaaagtttcaagctatgtggtatgggaatccaaacttctgttgggatcttcttccaaactttgtggggcatgcgattttggaagcggagttgatacttgatcgagatggtaatggagggcatctgtgctccctctattatttagctctctctattattttgtgttttttgattttgttccgtctctcactatatgctggcttttattggtacacaaaggttaaagtagaagatgatgtggagggcagtggcatcaacgcttctgttggtgatctcagggatgctgctgtcaatccacagcctgccctgctgcgtgctactgttaaggaggaggtggaaggacagccaagctcttcctccagtcatgtaagatcacaatttattggcatggggttttcaccaatgttggttgacagggtgcttcagaaacacggtgacagagattcagatactatactggaggctcttttgtcacagtctgctcttcaaaaatctgggtctgaatcaggttcattgggagatctctttgattctgataatgaagaaaatagttctcattttgcgcctaggaaagaagttatccaagacattaaggttgaagctgattcatcctcagaaaagagatcatatctactgagtacaatgaacttctcgcagcgagaagttgatttggcactcaaccagctaggtgaggaagcatcattggaacagcttgtagatttcattgttactggtcaagtgtcaggttgctctggaggaaacgaaaatggagatgcttcaaatgaggtaaaggatgaatcactgtttggagtaatggataaaacactacatttactccagatgggttttacggaggaagaagtgtcatctgtcattgacaaagctggtccagaagcaacagttttggagctggctgacaccatttttgcacgtagaattgccagtagcattgagcagaaagaggtgaaagttgagcctgactttctagatgagacagaaaccagctattcagcataccatccctcaaattctggtctaaggtactatgatgacgaccatgacaacataaggattaaaagggctaagcatatgtttatagatgacagtgcgggttccagtagtcgtgctggaaatcaacctaacttagatccatggcttaaggatcaccgtgccacaactagtgatgggtctgtcaaggaagaatttgatgcaatgacaccaggcatccgtagaaatgttcgcagtgatgtcgccaatcccccatatttcttatatggaaatgttgtagaaattcccaaagctacatggcgtcagctgtcagagttcttatataatgtggagccagagtttgtaaatagccagtttttctcggctctctcacgaaaggagggttacattcataaccttccaacagagggaaggcgtaacctggttcctaggtcaccaatgactatcgaagaagcattcccattcacaaggcagtgctggccatcgtgggacacaagaaaacaacttaacagtgttgctacagaagttgcaggaatagagcagctgtgtgagagactgggaaagatggtaagagactcaggaggttatctttcacaagaaaagaaaacgcacatcatgcaccagtgcaagctggctaacctcatctgggttggcccagataggttaagtcctttggatccacaacaagtggaacggatacttggctacccacggaaacacacaaacctgtttggcctgaatccacaagatagaatagaagccatgaggtacagtttccagactgacacactcggctatcttttgtcagtcctgaaggacctgtatccagatgggctaagggtgctatcaatctacagtggaattggaggtgcagcaattgccctccatcgcctagggataccactacagtgtgtagtatctgttgaccaatctgatacgaacaggaaaattttgagaaggtggtggagtaatactgaacaaaaggggcaactgaggcagataaataccatttggaagctgaagattaatgtacttgaggacctggtgaaagaatttggtggttttgacataattattggtggaaacttcagttcctgtaaaggtggtacaacagtaaactcatccatgggcatggattccaaccagttttttgagtatgttcgtgttgttcaaagagtgaagcatataatgggtcggctccaggtgagggcgcatgaatctgctcgacatcgacatcgctctccatcaaattga

SEQ ID NO: 19660 - DNA, 546 bp, Oryza sativa
  Clone ID: PAT_MRT4530_25099C.1
atggagagcgaaacaggggaacgcgaagtacgttacgatccatttcttccacgggcacccggttggtttcagactcctttgcgtcgcagagcagcgagctccgttttacggctgccgagattgtggttcttggaggggtttaggactaaccaaacgtgcccagataaggatgaaggccgcgctgcattgaatggggaaatagaccggtcgaaacgacccagtgagtctagtctagagcggttaaacgtcaacaattgctgtgagggtccggctgcttgctctgggttggtctggttctcccgtggattactcaaggtggctagagattcgacatgctcctacacgatagtaaatgaccaaagaaaagcagcaacgaaagtgcaacaagcggccagaggacccgcttccaacagaaaacagaagaaaaatcccaaaccatctgaaatgcgccaggttgctggacgcacctgcaaggctgcagtcgaaacgaattttcagacgcatatggccccgataggtcgcaacaggcagatacgtatgaaatga

SEQ ID NO: 19661 - DNA, 942 bp, Oryza sativa
  Clone ID: PAT_MRT4530_2509C.1
atgtcccaccaatctgaaaatgatccgccaagtgaatcccctttgcatgatgattctttggatgaggtgagcagcatagatccaatggatctgtaccctttagatgaggtgagcagtatattgggcgatattgctgatcaagtgattgttgaagtgaagtccgaagttgcagctctacaagacatgagacctaccaggcggagtggtacaagaagttatattgataggccttatgcagaatctgaacaggggctcttgaatgattactttgtagagaatccagtcttcaatggaacaaacttccgtagaagatttaggatgagaaggcccctgttcttacgcattgttgaagcccttggtgagtggaatgagtattttactttgaggatggatgctcttaaccgcccagggatatctccaataaaaaaatgcacatcggctattcgccaattgggaaatggcagccctgcagtggagtgcttgaagatattcgtgaagggtgtgattgaggtgtatggcgaagagtatttgcgacgacccaccgtacaagatgttgaatgcttagtgcatactagggagcaccgtgggttccccggcatgttagggagcattgactgcatgcattggcattgggataaatgcccagttgcttggaagggaatgtatacccgcggtgatcaaggtgttcctacagtgattctagaagcggtagcgtcgcatgatcgttggatatggcatgccttctttggtgttgttggatccaacaatgatatcaatgtgctgaatcaatcacctttgttcatccagcagttgagaggggaaggtcctcaagttcagcaccatgtcaatggaaggcaatacaacaatggctatggccttgcagatggtatatacccagaatgggctgctttcataaagtcaattcgccaaccacaatcataa

SEQ ID NO: 19662 - DNA, 225 bp, Oryza sativa
  Clone ID: PAT_MRT4530_250C.1
atatgtaattaccatctttttttttttattgtttttctttgcttgttggtgggttaaacttgcatgacatttttattcaaaattgaatcacccccatgtttgaacttgtgacacacaacgatgcatgaatttatttttctttccccatggcctttggcctttgaaagcggtctttctgcaaaaaaatagggtgcataaatggccccacaattttctttacaggtt

SEQ ID NO: 19663 - DNA, 571 bp, Oryza sativa
  Clone ID: PAT_MRT4530_25100C.1
ccttctcgtccgctcctctcctagtctcctccctcccatgcacgccgcccatggtggaggtggaaggcaaccagtaaccatcttgccaatctcgagttctcagcttgtggtcacaggtggagattggccacttcttgcctacctggtacgtgctaatgaccagctagctagaatggtacgaggctgagcgagtgagtggaagcttggttggtaggtaggagaaggctctcatggcgctggaagctgtggtgttcccgcaggagcacctgtcgtgcgctgccgccatgtacgcggcgccgccgtcgtcgctgggatgcggcgttgacatggacgagttcgaggagaacggtggtgtggtgctgcaagaggaggccggagtggcggtgcacggcggcggcggcggtggcgctggtgggatgatgagcctctgggtcaacgcggcgacctgcgcgcgctccattgctgcttccggcgccgtggaggagttctgggacgagaggcagtaccccgtgtcgtcaccgccggcggcgccgacgccagcagcgtccggcggtggtggcggccacgccaa

SEQ ID NO: 19664 - DNA, 1244 bp, Oryza sativa
  Clone ID: PAT_MRT4530_25101C.1
ccgggctcccggcctcgttttctggccccgcactctgcggggctctccccgccggcctcttcttcctacttcgtcttcttgctggtgtgttcgaggaggaggaggaggaggagaagctagcggcggcggcggcaatggcgacgagcgggctgaggagctgcagcgcggtgggcgtgccgagcctgctggcgccgtcgtcgaacaggagccgcctgccggtctgcgcctacgccaccacctccgggcgcgtcaccatgtccgccgagtggatgccgggccagccacgccccgcccacctcgacggctcctctcccggtgacttcgggttcgacccgctgggcctcgccaccgtgccggagaacttcgagcggttcaaggagtcggaggtgtaccactgccggtgggccatgctcgctgtgcctggggtgttggtgccggaggcgctggggctgggcaactgggtgcaggcgcaggagtgggcggcggagcccggcggccaggccacgtacctcggcaacccggtgccatggggcacgctgccgacgatcctggtcatcgagttcgtcgccatcgccttcgccgagcaccagcgcaccatggagaaggaccccgagaagaagaagtaccccggcggcgccttcgaccccctcggcttctccaaggaccccgtcaagttcgaggagtacaagctcaaggagatcaagaacgggcgattggccatgctggcttttgtgggtttctgcgtccaacagtcggcgtacccgggcaccggcccactggagaacctggccagccacctctcggacccgtggcacaacaacatcggcgacatcatcatcccgagaaccatctacccttgagcttggcacgaaccggtgcgtgcgtccgggcgtacgtgaaggctatgggtggtttttatgtgcgtgcgtactgtgtgtgattggttgattattgcgcgcgcgtgcgcacgcagtggtcggccggcaggcagctgctggttggccttgtaatgtaaagcttaagtagagggtgctctcttgtgaatccgtccatcttaatttttgtatcaaacacgaaatcaaactggtcttagttaaaaaagaaaaagaaagatacgacgatttgaacggggagaaggatgacaagagtaccagcacgcacgttcatgtactctcaagtcgaaaactcgattacttaagggctgttggcttgcagtaccaattaccaaactctcttagcctgcc

SEQ ID NO: 19665 - DNA, 555 bp, Oryza sativa
  Clone ID: PAT_MRT4530_25102C.1
atggccggtcaggtgttcgtccatcacctcggcggcggctccggcggcgacgaccccacccacccatggctgtccctcaagtcgtcccatgagatggacgacgccgtggcgagctggcgcgagaagctggcggacatggccgccgccgacgaacgcgccggcaggtacccgtgcccgctgtgcgaccgccacttccccacggagaaggccgtgcacgggcacatgcgcagccacccggggcgcggctggcgcggcatggagccgccccgcgagccgtcccccggcgacctcgccctcgccgccgacgggaagcggtaccgctacgtgtgcgaccgatgcaaggcgccgttcgagacgcggcaggcgctgggtgggcaccgtgccagccacagcaccaagaagggctgctcctggcacgccaagcagctcgccatggccaagccgcccaagaacgacttcgacctcaaccatctctcacttgaggccatccaggcggcggcgcaagaggaacaagctgctcaagaggggaacaaggatgaggagcctaagaattaa

SEQ ID NO: 19666 - DNA, 1100 bp, Oryza sativa
  Clone ID: PAT_MRT4530_25103C.1
gagctgcagcgcggtgggcttgccgagcctgctggcgccgtcgtcgaacaggagccgcctgccggtctgcgcctacgccaccacctccgggcgcgtcaccatgtccgccgagtggatgccgggccagccacgccccgcccacctggacggctcctctcccggtgacttcgggttcgacccgctgggcctcgccaccgtgccggagaacttcgagcggttcaaggagtcggaggtgtaccactgccggagggccatgctcgctgtggtatggttcttgattctgatctccgcatggcatggcctgcgccgccatggacgaactgaactgaactgaatcacgcttgtgcagcctggggtgtggtgccggaggcgctggggctgggcaactgggtgcaggcgcaggagtgggcggcggagcccggcggccaggccacgtacctgggcaacccggtgccatggggcacgctgccgacgatcctggtcatcgagttcgtcgccatcgccttcggcgagcaccagcgcaccatggagaaggaccccgagaagaagaagtaccccggcggcgccttcgaccccctcggcttctccaaggaccccgtcaagttcgaggagtacaagctcaaggagatcaagaacggtcgattggccatgctggcttttgtgggtttgtgcgtacaacagtcggcgtacccgggcaccggcccactggagaacctggccaggcacctctcggacccgtggcacaacaacatcggggacatcatcatcccgaacaccatctacccttgagcttggcacgaaccggtgcgtgcgtccgggcgtacgtgaaggctatgggtggtttttatgtgcgtgcgtactgtgtgtgattggttgattattgcgcgcgcgtgcgcacgcagtggtcggccggcaggcagctgctggttggccttgtaatgtaaagcttaagtagagggtgctctcttgtgaatccgtccatcttaatttttgtatcaaacacgaaatcaaactggtcttagttaaaaaaaaaaaaaaagggcgccgctcgcgatctagaactagcggacgcgtggcggacgcgtgggcggacgcgtggg

SEQ ID NO: 19667 - DNA, 221 bp, Oryza sativa
  Clone ID: PAT_MRT4530_25104C.1
caaacccaaacattttaaattttcatccaacataatttacataagggttaaagggatatcttaaaactaaattctcgcaaaaatgcgcggggtttcacctaattaaatttttaagggcggtttccttatgctgacccgacttgatttatttattcaacaacaggtccctttttttttctttcccatttcgtttcctggggggcggggtaaaggaaaacaac

SEQ ID NO: 19668 - DNA, 555 bp, Oryza sativa
  Clone ID: PAT_MRT4530_25105C.1
tcttctaaaatgcaaattctattggagagtttgggcgcttattctaaaattctactatgcacttatttggagagtttgggcgctggaaaaatgcaaattccacacatggctagtcatctaaaacagggtctggacctccgaccagctcacgactagagtatggcaaaataatggactttgcgccctctgccatagagaagtcgaaacggctctgcatcttgttgtcagctgcaggtacatgaaaaaaaatatgaagcctgatagctgtctaggtgtcttaccaacagcttgacactagacaatgggagacgactcagaccgtaaaagcctggtgggaggctctaacaaacatggtagaagttccaaaaaggaggatacgcactctcatcctacttgtcgtttgggagatctagaaggaaaggaaccaatgaatcttcaagcataacgatgctatgttgtcagtcctttttgccaaaatcaaggaagaggggcggacatgggcaatggcaggagcaaggcgcttacatgatatttgccctactctatatagtgtac

SEQ ID NO: 19669 - DNA, 265 bp, Oryza sativa
  Clone ID: PAT_MRT4530_25106C.1
gtgaccagtctgacactggtcatgtcgtcagcagacagccataatcccacgtcgcacctgcttccggcggaagtggagatcccccaaaacacaggagtagggtattacgcttctcagcggcccgaacctgtatacatcgcccgtgtcttatgctctttcgacggtcgcgaaccttccacatacagagagcttagaatttcaccctgagtccccggccgaaccggcaaaggggggcctgcgcggtctcccggtgaggagccccacg

SEQ ID NO: 19670 - DNA, 597 bp, Oryza sativa
  Clone ID: PAT_MRT4530_25107C.1
atggctctcgccgccgccgccgccgccgccttctgctgctgctgctccgccgccactggcttcgagttcaacgaggccaccgtcgacgccatccagctcggcttcagcaacggcagcctcacctccacgacgctcgtccgcttctacctcgaccgcatcgcccgcctcaacccgctgctgcacgccgtcatcgaggtcaaccccgacgcgctcgcccaggcggcgcgcgccgacgctgagcgcgccaccggtcgccgctgcgggccgatgcacggcgtgcccgtcctgctcaaggacaacatggcgacgcgcgaccggctcaacacgacggccgggtcgctggcgctgctcggctccatcgtgcgccgcgacgccggcgtggcggcccgcctccgcgccgccggcgccgtcatcctcggcaaggccagcctctccgagtggtccaacttccgccctgtcaaatccggctggagcgcccgcggcggccagacggtggtgtttgtgaaattgcccatggagaatccctacgtgctctcggctgacccgtgcgggtcgagcagcggtccggcggtggcggcggcggcgaacatggcggcg

SEQ ID NO: 19671 - DNA, 426 bp, Oryza sativa
  Clone ID: PAT_MRT4530_25108C.1
atggtagccgcggcggccacggagcacaaccaatccaagcaggaagaactaacaggagaggagatgaagaggcaagagctacgcggctcccatgggtggcggtggcgccctcctctctaccagatccagccgggggggaggaggcggcgactgcggcggcgggaggcgccctcccctccgccagatcttgccgggaggggagtcggcaacagcaggaggtgctgtgacggcccgacagcggcctccccacccagtggtggtggcggcccgacagcagaggcggctaaggtggcccttgaagaagttattcatgttgtgttccccttgaaggagagacctcaaaggtgttggttctggaacccggcaccgatgacggaagttatttgtaaggccttcatggtgtctgttgggaaaactggcacctaa

SEQ ID NO: 19672 - DNA, 516 bp, Oryza sativa
  Clone ID: PAT_MRT4530_25109C.1
atgggctgctttggtcgacggccgccgtcctcctcaccaccccacatggaaagaagagagatattggtgaaggcagagataggtgaagatgttctgacatgtaggacccatgttgactcaacgctgatgacttgggtcaaattgcgatgcgggacaaaatcgcctcgctgtactgccatgggacctatattgcaccggtttttgataattgagagacccgttgtatttgacgacgagtatgcaggtcggtttgaacatttggaaggaaatggaagaaacaggcgaggtttgcaaaacgaggtaggtagggatgcacagcaacggccaaaacagaaggatgatcatgccgactgtcaccaagagcctacaacaatcgagcatcaagatggggatagcctttaagttgtcggccttcagggttgcaagcaaagcagtgacgaaagcagcactgctttcagttgtgtatggattcaagcgaagcactgacgaaagcagcggcgtcttcagtgcgacggg

SEQ ID NO: 19673 - DNA, 1785 bp, Oryza sativa
  Clone ID: PAT_MRT4530_2510C.1
tcaggtagctggattcagtgctgcaaatgcagataaaccagcaccacatttttgtaccacatcttggctgttcatatgctccattgctagagcttgatttccagcaccaccacccgagctcctcttcagctcctcgcacatctcctcgatcattggcttccatagccgaactcgagcgtttatgaaccaattcgacacctggttcctgctgaggccgctccttgctgcgagcatctccttctcgctgtctttcggatacgggcggaggaagttctcgaacatccaggccttgaggacggcgacggacttctccgggaggccgcgctgcggccgccagcactgctgctcgccgcgccgcagctgctgcaccgcccagtgcttctggatgaacgccgactcccagctccgctccctctcgccgccggtcaccgccgacgacgactcgccgccgcggcaaggcctgccggccgcggcggcggcggacatgatctcgccggcaatgcggcgcctcaggccgtggtacattgccgacacggcgcggtgcgcgaacggcgcgcagatgctgctgctgctcatcccggcggcgcgcgccgtggcgtgcgtcagggtgttgaacctcgccgtcgtgctctggatctcgtcgaggcattggttgtacttctgatccatctgcgcatttgaattcgtatcgtcgtcaaaagatggtttcaaatttgattcgaaatggtagtacgaaatttgcttgaactgatgcctcgggagtcgtgtggagaagggcgagctcaccagctggagcatggtgaggagctcgctcctgagccgctgagccgaagcgtcgccgccgccgtgcgtgtgctcgccggaggaggcgatgagctggttgttggagctcacggcggacgacggcgcgccgccggccaccgagcagctcgacggcctcgagctgccgctgtcgacgccgctggccgagtcggcggcggcgtccgcgacgccgcccagcacgcagccgacggcgtcgttgagcacctgctgcgccaccgcggcgtatcgggaccgcgccaccaccacggcgaagttcgccgccgggtagtacggtacgagcggcggctcgggctccaccaccaccaccctgctcatctgcgtcagcccggaacggctcgccgccgacgagcactggtcgccgccggcgttgagcatgctgtccgaggacgacttggagcacaggctcagcgacagctcgctcgccgccgccgccgcggacacgaagccggcagcctccggcaccccggcgaggtaatacgaaccaccgtgcacaccggcgttgctgctgctccagttgcagctcggcttcctcgccgacgtcgagcaccaccccgccgccatgtcgcccggctggccgtggccgaggcacgcgaggctcaccgcgccgccggagctgtcgccgacggcgacgtcgtacccgccccccatctcctcctccggcggcgtcgtcgcgccgaggtagtcgccatgcccgtgcgccgccgccgccggcgcggcgccgaacagctgggtcgccagggacgcgagcacgaggttgttcgccgccgcgaagtgcgcgccgacgtccatcgccgccgccgccgcgtcgccgtagccgaagctcccgccgtgatcatgcggcggcgccatggccggatggaacagcggcacgtcggcgccattgccgctcgccgccatgaagtagccgccgttcatggcggcgtccaccgcaccgagctgcgagaacgatggattgccgctcat

SEQ ID NO: 19674 - DNA, 915 bp, Oryza sativa
  Clone ID: PAT_MRT4530_25110C.1
atggagtgtgaattttcttcgttccacgccactccgtcccctagcgtcagtcacgccgtcgttctctccgtcctcccggcgccgccgccgtcagtccgccaccgctcgcgcccgcgtcagccctgccgtcgcccgtccgtcgccgcccgcgtcagccccgccgtcgaccgttcgtcgctgcccgcgtcagccgcgctgtcgaccgtccgtcgccgccatcagcgcatgcgatggagggctggagcccggtgtggcgacggctcggggcggcatggggaaggaagagctcgccgtcgttcgcaaagaaaagctcgctggtgtgggggaggacaagctcgctggcaggaaggacgagctggggtaggaggagctcgctggtgtggggaggacgagctcgccggcatggggaaggacgagctcgttggcggccagatgtgtgcgggcaaacggtgcgagaggggtgaactgacgacgcgtcttcggtggacggagtggtatggaacgaagaaaattcgtactccaatggagaaggacaaggtgcaggaggaggcggggatcgagacgagggaggaggacgacgacgagtccgggacgaagagagagcgcgaatcaggggagatcgaaggaggcggaggagagccgagccggaagaagcgagaccccgaggcggtgtcgcgcttcaagcagcggtcggcggcgtggttcgccaagctcaaggaggagttcgagaggaaggtcgcggagcatcccgacgtcgactggtccgactcgctggccatcgacgcgagctcgtatcgcaaggattgggactacgtctggagccaagcctacggctccttcgacaaaatcagtcagtcactagtcgatcttgatccccttttcatctgtttaattgtgtcgaaaatctatctcagt

SEQ ID NO: 19675 - DNA, 925 bp, Oryza sativa
  Clone ID: PAT_MRT4530_25111C.1
atggaggaggctcaggaaaaggggggcgaagagattgctcatttctgcctcatgggtaggctgcgatggactttcttaggcttagttttatgtgtgattgcggattctgcatttgtcagaattaggaactgtggtggtttctgcgacatgatgcaatttggggactatagatatgtggctttggtcatcatagataggtcttacatgggggcatgggactatggccatggaattgtggaatccaaggacggaacgatctcagttgcttcagcatttgctggtcatcaggaagccgtacaagacagggatcacaaatttttgtctaaagcagttgaagaagcttaccaaggagtagattgtggccatggaggtccatttggtgcagttgttgtccgtaatgatgagatagtagttagttgccataacatggttttggattacactgatccaactgcgcatgctgaagtaactgcaataagagaggcttgcaaaaagcttggaaaaattgagttgtcagactgtgaaatgtatgcatcatgtgaaccttgcccaatgtgtttcggcgctgtgcatctatcacggattaagaggctggtgtatggagccaaggcagaagctgctattgccattggattcgatgacttcattgctgatgctttgaggggaactgcttactaccagaaggccaacttggagataaggcgggcagatggcaatggagccctgattgctgaacaagtcttcgagaacactaaggagaagtttcggatgtactaattgtaagtaaatacattgtgggatttcacatcgcaaaagttccaaacgttcagaagtcagaaagaataatgtaaccttcggcattctgccattagtggaccataagctatcaatttaaatatatgttactctcattatgagggtgcag

SEQ ID NO: 19676 - DNA, 487 bp, Oryza sativa
  Clone ID: PAT_MRT4530_25112C.1
ttcaacctcttttgtcaactaggtcaatctgtttgtccatgccttttgttgtactgtacagctgtgctcttgaaatgttctcttttacagatgtacaatggtttcaattttcttttcctttcagtgaagtagaaaggcacaattttattgaaaaatattgttatgtgcagggatagtattcatgtggacctgctggtttgctattagttggaaatttgagataagaatagtttgtttccttattagttggggtttcctctttgtacatatctcctaggtattagaggagctaatcttagagagagagattctctttgcagtagtcattccaataaaaaattagcacatagccattagaaattaagcaatgtagatgaatcaatctggcctctctcccacaagtttttcattccaacctatagtcttctcttataccaaccaagtcaatgctaccctgtcaccctttaagtggtgtttggccataaca

SEQ ID NO: 19677 - DNA, 255 bp, Oryza sativa
  unsure (1)..(255): unsure at all n locations
  Clone ID: PAT_MRT4530_25113C.1
agaaaggaaaaaaaaaaaaaagaaaaaaagagagaaaaaactcactgcatcgcctccgcctctcgccgccatcgccgcgatgaagctgnacgtctccgccatggagaacaacttcgccgcccaccncgccggggcgagngacgacggcggcctnttcggngccggcgccgacctgcccganatggagntcccnacctgccccgacganttcgacgggttccagaaggagaccaaggagatgcttgaagcacaaga

SEQ ID NO: 19678 - DNA, 644 bp, Oryza sativa
  Clone ID: PAT_MRT4530_25114C.1
atcagagctcttcgcctaaggtggctatggtttgaatggaggccgccataaaaacttggatagggaatgaaacgccttgtgatgaattggataaggatctgtttgcggcatcaacgaaagtccaaattggtgatggacaaaaggcgaaagtctaaaaagtcaagcgccaaatctctgtaggcattccaagaggaaaaaccgcaccgtccaggatgccctgctacaatgaagatggatcaacaatattcgccacagcctcactatccccctcctcgatgaattcttccatgtttgagaaattctagcccgtgacacccccacagctaacagagggggtacaagactcaattatctggcgatggacaaccaatggggaatacaatgcaaaatcagcatatcaatttcagttcaatggaatggtgctttcgccatcaacaaagttgtcttgggaggcatgggctctggcaaaatgcaatatcttccactggttggtgcttcaaaaccgggtgtggacgactgatcggctacagatcaggggatggccaaaaaattatttctatcagttatgcttccggaatctcgaaaccctcgatcatttattgttcgaatgcccggtctcaaagcaaatctggtttagagttctc

SEQ ID NO: 19679 - DNA, 230 bp, Oryza sativa
  Clone ID: PAT_MRT4530_25115C.1
tcgtttatatcttaagagtcattttgggtaacgggggaatgcagcataggggagaggttgaaggtcctctacaagctacaatatcagcctgcacttgattgagctgataactactacgatctttacaaggtgtctatgaccttatagcatatgtaaaaactgtgtacttatagtagagtctggttagtactacctcgagatgctaggtggtgatcccaattttcaaaagg

SEQ ID NO: 19680 - DNA, 995 bp, Oryza sativa
  Clone ID: PAT_MRT4530_25116C.1
tcaatcgtctgctttcaaccctagtgccacctcgatgagctctccgcggacgacgcagcggtggcacttacctccgcccaacgtgttgtggcacgggccaccctcgccacgccccttgccgttgccgccgaggtcgccaccctcgccctcctcgccgccatcgaggaattcctcaagatgcattggcgccgcacatgcacaacattccttggcgagatgcctcgccgagctcctgttgccgcctaaggcctttgcctgctccgcccagacttctatgtctccactatccttggagagataggactcttttccaccagtcgtctcctctcgttgggcttccttgactacttcgggaggactgccttcctcagctccacctcgccaccgcctccctccgtggacttggtccagccaagccatgcgcgtcctcgtcgtgtctgcttccccaaccaccaccgtataaaggccgcgccaccgtgaccgcgtcggcgtcgccgccgccaccgccgcccgccacctcgccgccgaccagacgagccgccgtttgacccaacaccgagctcccgcgcggagttgatgtccatctccccttccgaatccaccagaggatcccagccgctcgcgccgcgcccttccaaccctagccccggaccccgccatggcaacagctccgccccaccgcgccgccgcggccgacgctcccctacggctcccgtctcaccgccctcagccgccggcgggagcggcggcccgagctccgtctcggtggttccagctatcagagaatatgttgatacttcccaaaaggtagttggattcagaatctctagagaagagaatgatgattcatatacccaagaagttggcaatttttctgaatgccactcttctgaacatgggaattcaggtttttcagccaataatggcacctcaggccaggcaactcctcagagacctgaattgatgggatccctgaagattgatctatccactac

SEQ ID NO: 19681 - DNA, 366 bp, Oryza sativa
  Clone ID: PAT_MRT4530_25117C.1
agggggaaagggggggttttttttttttttgtggaagggcgggccggtccttagcagaaaaacaatgggtgggaatttttttttttggttttttttttcccgcaggccgccctaaggggttttggccgatttataaacgtttgggtaccttttgttttggttgggggggaatgccccaactttttttcttttttttggttgggccctttggccctttttttttggaaggggatttgcttttgttaaaacttttttggggaaagcccggaaaagggacctttttccggcaggggggtttcccaaaaaattaggatgggttttaaaggcaagggaaccccttctttttttttgggccttttttacaac

SEQ ID NO: 19682 - DNA, 1242 bp, Oryza sativa
  Clone ID: PAT_MRT4530_25118C.1
atgaccagatcgatggtgctcgccggctcattgccagacccaggtgtggcaagcgaatctgcgacagcaagtcagtcatgtgcttctaatcaactgaaaggtcatatgttcacacctccatcttcttcgttggtctcatgtgaaccggttactactgaagctgggagggctggtgatgaaaatgaggctgacatggatgacgaaaatgacaataatacatattttgagtacctgcgacatatatcactaggcaaatgtaaaaagaattcaacttctgggtccaaatcacccaagaagaagagacaaaaaggggattatgccggctctcctatcataacgatagcatttctgcagcatagggtgggctcaaaatgcagtccgggtgacttcaatgcaaacataaaagacctcaatcctgaccagaaagaaaagacaaccgtgctcccacattgcgtctgcgtccggcggagtggagattatgtagatgcacctggatgtaatgtgccatggggagagcctagggtggcattttggacacatcaagcattaaaaccattgaaacaggctgataagggatctgggctttatgcagtttatggattatgcaagagttactcgatcagtgtgcatcgcccgttccatgtgaagcacccaaacgcttctaagaagtacatggtggcatgcattggtaaatcattaacaatgtgggagttgaggtcgtggaggccatatggcaccaccatcaatcttatgaggcataagtgggcacggccctgtgatgttggagctcgtagattcggcttcatgactagcaatatggcagagagtttcaacaatatgctcaaaggcattcataggctaccagtaacatccatcgtggcatacacgttcaacaactgcaataagtggttcgctgataggtacaaggccacgatggctgcaatacaaaagtgtgagaggtggccgaaaagaattaaggagtttgaaatacaaaaattttgtagactacgatgtatggatgaggaagtgccccctcggatgtgtttcgaagctaccaaggaagctgtgcaatgctcgtactcccctaggttcgagccaagccaagatcccactcaatggccaagtgatgacggtgaggagttcatacccgacttgtcgaagatgatcgatactcctggcggaagaactaagaggttcatcaatgacatggataagaattggtcggtcatagaagtcgaatga

SEQ ID NO: 19683 - DNA, 378 bp, Oryza sativa
  Clone ID: PAT_MRT4530_2511C.1
atgacggagcgtggggctcctcaccgggagaccgcgcaggcccccctttgccgcgccgtcactcgcctccactccgccggaagcagatgcaacgtgggagcacggttgtctgccgatgacgtgaccggtgttagaccagtcacaaaccggtcattcttgtccaccacgcgtcagtttagcatgccacacgtctgcccttcttcatacaatgacttccttgccatggttgcgatgaagcctggaatggatctgaccgggactgacatgccaactccaggagttaccacgccggctccggctagggacgagagccaggaagctctcatcattccgacgggacggggcgaggcgtgtgacaggccgcctgttgccacctaa

SEQ ID NO: 19684 - DNA, 234 bp, Oryza sativa
  unsure (1)..(234): unsure at all n locations
  Clone ID: PAT_MRT4530_25120C.1
ctcacgcgtccgcccacgcgtccgcgccagccgccacaccgagctccgcncgcgccaaccccaccggggggagctccgccttccgccggccgcgatggctcccaaggccgctgtaaagaagcgtggtggaaagactcaaccggccttgaaggttgcctaggcagggaagtctgggtcaatcaaaacaaactcaaagaagatccgcactnngccttagtttcacagaccaaagac

SEQ ID NO: 19685 - DNA, 7866 bp, Oryza sativa
  Clone ID: PAT_MRT4530_25121C.1
atgggcgtgcagctgcagcagttcaggaagaagaaggagaagaggggtcctggtaagaaggccgaagccaaggcggatgcggcggaggctgaggagggctcgtcgaagtcgggggcagacgcggaggaggccatgccggagccgaaatctcccgttggattgaagttgctcgccggtgagggcggtgctagtcatcgcacgccgtttgaggtgaagcttgtgctccttctgggtgggtgtgggtgggggtttggatcagtgcttgttgtgtttaacactgatgtttcaatgcaggaagcggcgaggtcgcaggtggagcaatgcaatgggcaggggcctgataccgcggagtcctgcgatgtggataatgccgatgtcttgcctgtacaggagggtggtgatggtggtggtaatgcacaggatgtaggtgtaagtgaacatggcagtttagagcatgtaaaccctggaccaggtgatggcgaaggtgcaacgatcccggttaccggtgcagatggttctggccttcttatagaaggagctcagccagtggagatggatgttgatgagaaactgccagataatagtttaaaggaaaacacggagctgtgcacatcttcccaaggtgacatagctgatgataatggcgacagccaagcagaggaacaccagcaggtggagatgtaccctgttgagaggccgaccagttctgattccaaagaaattacagatatcattggtcactctcaagacattggagctggtaatactaataagggggaaggaagggctagagaaacggagattgatgtttctgggatgccatctggtgctgtggtagagtgtgaaggagaattgaatgttagagcttcacatgaggcttctgagagtacttcaagagaagacactgacaaggaagctgatgcactgggggaagaagctgctgttcaagaagatccaggtgtggcaaatgctacagagggagttgtcacggtagatgatttgagtttacatgctaagtcaattggggcagtctctcttcctccgcataaggagattgaccaagctttacttgcacgtgatatatcacaagacatggcgccataccatttagaggatatccagaggcatctctacttggcaactatgtcaagggattttctccagctgcagatggatgagagtgcagacctgaatacagatgatacaccacagtcttctaatgaagtcatcaatctccaggtactactagaagagactgaaaaaagcaagctagctgtctgtgaagagcttcagcaatgtagacatgagctctcggacatgaatactgtgaaggaagaacttgaactaactgtagcttctctgacagacagaatcaatactagcaacaataaatgcgaacatctggagtttgagttacagtcctccaaggagaacacacaacaaattctgaatgagttagctggttgcagagcaatgctggaagctctacagaaggagaacctggagctaactgcgactcttacttttgagaaagaagctagaaaggaagttgaggagcagcgggagcatctgtgtagtgaaaacaaaagggttttgtcaaatctgtctgaccttgaacttagtttagcttctttgaaagaggaaatgaatgatggcagtaatagatgtgcagatttagagtgtgaactgcgttccaccaaggagaacatggaacgtactttggttgaattagcaagttgcaggaattcgttggaaacactgcaaaatgataatttggagttatctgcaaattcttcctttgaaaaagaagcaatcaagaaacttgaggaggacaatttatgtctatctaatgaaaagcagggccttttattagatttgtctgaaacaaaggaggagctgcatctttcatatgccaaacatgagcatcttgagtcgcacgccagagatatggaaacatactttggacaacttacggagcaattaattgaagaaaatatttacacaagtaccagcgtcgatatttatcaaactataaccaaagagttgtatgctaagtgcaatgttgtgctgggtgaagcccggaatgcacatcaagacaatgaggcctgtctggactcatcagaaatcattgttgaaaatgtggaaagagaaaccacaagtcctgaattaattggacatgatgataatcagcgtccgcttctagtcgctgagaatgactcatgtaactctactgctttacagtcactgaaaggccatctgaaggtcgctaaaggtgatttgcgtgaccttcaaaagttagtagagaggatttcttctcggtctgatggacgtgtgctggtatcaaagctcattcagtcctttgagtcaaaaggaaatcaggaagatcttgggatgtctgagggagagcatgacaatttaagaaaattaactcaggagatgatatgccgccttgtggagaagttgaaggctatgacgtcagacattgcaaagacagaagaatatgtggctgagctgtgcaacagaatagaactttctgtgaagtttatgtcacagcatgaagcagaaatagagcatactgcagttcttgtggccaaaatggatgggtttgctggtaagctgagcaactacaaggacacaattgatcaactggttagtcaagttgctaatgtacaccaggatgcagataatcatgctggaaggctcattgatcaagcagaacttttgcagaatgatgtgactgaaaggatttccactcttgagaaggaaaggacgtccttgacagatgtgctcatggaagtaaccgataagctcagcgctttgagtaaaaatgcacttcctagtgatttgggtgggagtgaaggtcttggctctcttgctttgagttctgtggaatgcgctgctaagttagttcaaaatcttcaggagaaactagagcatgctcaaactgacaatgctaagcttaatgcttctctggtggagctcaaaactgcacactctgatgttcaagaaaggagtaaacatgcacatggaattgtcaagaaaatgtacatttccctgcaggaacttctattcaactcattgggaaatccagatgaatcaggtgtcgaatacaatgctgaagaaccaatagaagctctttttagtcaatatggagacattgttgagcatttgaagagtttattgcacgagcggcaatatttgctatcaaagaatactgacctagagtcaagattgttgagcaaatgtgaagaaactgaagctctcagcagttctctgacaaaaagtatgaacgattttagcttgctgaacgaggagcttaaatcggtttctacaagtagaattgaagcgcaggatgaactgcatggtagatgcctcgctatagcagaaaaaatggttcatcgttccacaagccattcatcaacagtactttcttcgatggaaatgtccagcaaggcaaaccatattcttactacattattgccatgtattgaggagggtgtggcttcatacattgaagaatttgaaaatatggcagaagaaatccgcttatcaaagatctgtttgcaagaaagcaatattattggccaaagttcatctgaaaagtggtcagtgtccttgcctgtgttgatcaaagaggaaattgtacccatattttttgacctgcagggtagaattgatcagctcagcacgttaaacattcagctagaaactgaagttccagtcctgagggatggcttgacaaagctggatagtgctctcgaaacttcacgtgctgaacttcagaagaaggtttttgaacttgaacaatcagagcagaaactttcttctgtcaaggaaaagcttagcatcgctgttgcaaaaggtaagggattgatagttcagcgggacagccttaagcagaccctgttggaaaagtctggggagcttgagaagcttgcacatgaactgcagtcaaaggattcattgctgatagagttggaagccaagatcaagtcctatgcggatgcagatcgaattgaagctttggagtcagagctctcttacatacggaattcagccactgctttaagggactcattcctccaaaaggattctgttcttcagagaattgaagaagtgttagaagatctagatttgccagagaattttcattttagagatatagtagaaaaaatagaacttctgtcaaagatggctgttggtgcttcttttactgtacctgatggtaataaacaatcatctgtggatgggaattctgagtctggtgcggccattgatagtataaatgatgaacaaaactcaaattcaaattcaggggcagaagaaataaaaataaaatacgatgagctacataggagattctatgaacttgctgagcacaataacatgttggaacaatctctagtggagaggaacaatcttatacagaaatgggaagaagtccttggtcagattagcatcccccagcagttcaggatgcttgaaccggaagatagaatagcttggttgggaaacaggctactggaggttgagcatgaaagagatgcattacatttgaagattgagcaccttgaggattcctctgagatgttaatttctgacctagaagaatcacacaaaaggatttctgaactaagtgcagagatagttgctgtaaaggctgagaaggaattcttctcacaaagcctggagaaactgagatttgacttccttggactctctgagaaagctgttcaggatgagtttgtcagagataatttgcggaaagatctagctgaactgcaggagaagttagctgagaagactgaggagagcaagctttaccatgatatggaaatggagataaaaaaacttatggatttagtacgagatgcattgcaggatgacagtaatactgaaatcccatcgggtgctggtgttggtgctgctgtgttgtgcttgggtagtctgttgagtagacttatagatggctataagactcatttgtcagaatcaactgttcgcagttctgcggagatggaaacactctcggaaaccaaaatatctaaagatgcctctacatcagagaggggtatggaggaaaaagagatggcattgaatactttgagtggtgagttagaacacactcgcaatagtctggccttggttgagcaacaacgtgatgaagctgtggagaagacacaattactaacaatcgaactggagactctacgtgctcaaatagaccagttgcagggagatggtgccgaacagatgaataggtaccaatctcttatgcttgaactagaatcaatgactaagcagcgtgatgatctgcaagagaaactgggtcaggaggagcaaaaatgcacctcattgagagagaaactaaatgttgctgtaagaaaagggaagggcctggtgcaacatagagatagcctgaagcaaactatggaagagatgaacactatgatagaaaaactaaaagttgaaaggaaacaacacatcgaatcacttgaatctgagagatcttcgttgatgggtcgattagctgagaatgagaagagcttgcatgatgcaacccaatatctgagtagattattaaattctctgagtacagtggatattggtagagaattcgatactgacccaatcaccaaggttgaaaatttttcgaaattttgccttgacctacaaaatgaagtgaagaaatcgaagcaagcaacagagctgcttctggctgagctaaatgaagttcatgaaagagctgacaacctgcaggatgaactggtcaaagcagaagctgcactgtcggaatcatttaagcagaacagtgttgtagagtctgctagagctgatgccgttcgccatcttgaacgtattatgcatatgcagtcacagacaaaaaggaaacagatagatcatttgatggagctgaactccaccagcagtcaactaagagagatcttctctgaacttttacatcatcttctcaacactttcagtaaggatgtggacattatcaactacatggagagctttgtgaaatcttctgataaatggatggacagcacgagtatggtggagatacccatcacatctaatcatcatttgtcaaatagcataagcagcaagacttgctcctcgcagatggctcatattccaaatgttccactgaaaattacgttggacaatgccgatgaaacccagattttgcatcatcttgctactgcatgccatgctgtagctgattgtgtaaatgactgcaatgatctcaaaagtaggattcacgagcatggtttttcagttgaccggaaagctgccgatctgttcaatgttatgtccaacttgcagaacaaatttacttctcaaaatactgagttggaatctttgagagagaatattattgaattacagtcagagatcaaacagagagatgaggaaattttgtcaatgcgcagaaatttgagtttgctttatgaagcatgcactagttcagtttctgagattgaagggatgactggtattgagtctggtgaccatagttgttctgttgtgcagaaccatttatctgcagatgaccatataaaatcagtagttaatcaattagttgcggccataaagactactcagaacagtaacgaaggcaacacaaaggaactaaaggccactgttcttgaattgcagcaggagcttcaagaaaaacatatccaaataagtacaatcagtgcagaacttgcatctcaggtaaaggaagctgaatcttctgcgaagcagctatctgttgagcttgaaaatgctagaatggaaatccacaacttagagaaacactctgaaatgttgcttaatcagaagaagaatttagagactcaagtaagcgagcttaaagatatggaggcagtggcacatgatcagcatggaagaataaaggacttgagtgatgaacttagcaaaaaagaccaagagattgaaggtttgatgcaagcacttgatgaagaagaaagggagcttgaggtcttggagaacaaaagcaatgacttagagaaaatgcttcaagaaaaagaattcgctttaaagagtcttgaagtttctaggaccaaagccttgacaaaacttgcaacaactgttgacaagtttgatgagttgcatagcttgtctgaaagccttcttgctgaagtggaaaacctacagtcacaactgcaagagagagattcagagatctcttttctgcggcaagaaatcacgagaagtaccaatgaactgctaacaactgaagagagcaacaagaagtactcatctcagataaatgattttactaaatggttggaaactgcactattgcagtttagtgtacactgtgatagcacgaatgattatgaatgcactcaagttcctgtatatatggatatgttggagaagaaaataggatctctgatatctgaatcagatgaattaagggtgaccctgcaaagtaaagattctttattacaggctgagagaaccagaatggaagaattgctgcgtaaatcagaggctcttgaatcttctttgagccaaaaagattctcagatagggttgcttcgtcgagacaggacatcaggccaacctagcagatttataaacttgccaggcacttcagagattgagcaagtgaatgaaaaagtaagcccagctgcggttgtcactcagattcgaggggcacgaaaagtcaataccgaccaagttgctattgatgtagaggtgaaggacaagccattagatgatgaagatgatgataaagcacatggtttcaagtcactgacgatgtcacacattgttccaaagttcactcgacctatatcagataggattgatggaatgtggccctgctgttcagaagagatataa

SEQ ID NO: 19686 - DNA, 4901 bp, Oryza sativa
  Clone ID: PAT_MRT4530_25122C.1
atgggggcctcaaattggaggcggcgccggcggcgaggaaggtatcgaagtcgaagccaccgtcgtcgacagccatgtctagcgggcaccacatgctgtggccggctcgccgcccaccgccgccgccgccaccgccactatcgccggcatcaagggaggcgaacccttgttctggtgggccggcccaccaagccagcccatcagcggaggcaactggtgggccagcctgacatcctgggcccaccgttcatgtgtcccgccttgtcagtgacagcctccccccctactcttcaaattctcctgggcttcgcgctctcggtctcgggtgagttgtttcttctcctcgctcgaggctgcaagaaaatcaagaacccgatcgccacgtcgagatcaacctctctccaggccggcaatggacgggcgcgccggttgctgcgtccgcttcatcggctgctgcctcgccgccgacggtgacgccgccctgagccagagcgcggccgcgctgcacaggatggcgtcggcgttcttggacgctcacggcgagcccttggtactcctcgaccaccgggtgctctgctcccatggcgtcgccaccgtggggcacagccaggccttcgccgcggcgatgaggcagcgcagagaggagattccccctgccccattcaggattctgctgcaggaagaatatgtcgggtgggctgaagtggcggcatgcgccaatgggaacaagattgtggacaagaagtcctggagagcttcggtcaggaacatgctcgatgctgtgtacaggatgatatgtcaggtccttgcctctgctgtgagatctgtttgggctattggcacctatctgcagagtttttcagaaggagactacccgcatcagctgtgccagaaaaaattagctggcggggtgtcattagcactttcagatttcaaatcttccctggtatgttacttacttattgtcgactcccatgaaatgaatgaatatagtcaatacatattctgtgtttggctgttgacacacatgatgatgcatatacatgcagatacctgcgccatagtagcatgctcagtctgtatcgaggcacaacacaggctcgagtttgagcgcctacacgggcaaggcacattcatcctcgaattgcctgattccaccaggaagctgagaagattctgcctggagagaaaagcttggtttaagggtaaaggggctcatatcgatagcctcctgtctctgatccaggagactggtggagtgcccgcaataagtacaacgaacacaagaagcagcctccttctgccccttcacagctatgactacttcagcctccgggggtgctggacaaacctgacaccccagcaggctgcacagctgatcttcaccggtggtccctgcattggcagtctctgggttgatggatcctacaccagcaagcaccactacagcgatgacaacgatgacgatgaggaggacatgctagtgtaccgtggctgtgatcccaagaagaagatacaccgggataaggagacaggcttacatgccgtcgtgtgttacgcgtacctcttcattgggaaggagctgcacatccgtgtccaggacaatatgcctatctgcagtccccacaactggatccttttccaggcgtttgacatgttttacaccctacgagtcatgcccttagatgcttcaagactgtatgatcccttgaagatgacagtgccgccgaagatttcacagaagataggcaaagaccgagcatggctccatgccaaccttcgtcggctacatgaagcgatgatgatccagaaagggaaagagaagatcagatcaaatttgtttccttttccgattctgttatgccaagcgcaacgcaatccccccataaaccccacgcccgatccacgggttctcgtcgatcaccaagaatttgaatctccggtagcgatcgatcgaccattgatgggatctgcactctcctccgccgccgccgcgttggactcggccatcaccgccgccgccgcggtgcctggggagacggtcttccgccgtcgcctctcgcgcacggaatccgacgcccgcttacaagaatccgggacgaaacggtccgccaaaatcggccggaccaatccatcccacttcgatggagagaacggtgtcagctctcgcagcctcccgctcggctccgtcgtggtgccgccacagccgcccatccctcctccgcctgctccctcccccggtgccactccgtcctcctccgcctgcttcctccacatccgcgatcgccgccgccacatccgcgaccgccgcctcctcgtccgcgtccaacctctgcctccgcgaccggcctcgtccgcgatcgcctccgcgaccgatcgccgccgctcgatgaggcgaagagacgcgaggggaagagtacccatcgccgccgtgaagggcctcgtcggcgccgccctccgccactacaacgccaacaacaaggccggcgccggcttcatcccgctcgagccttccatggccgcgtgcagggcctgctgctgcggccccaaggggttcacgcgcctcgtcggcttctgggctcgccgccggaggagcggcacgccgccgccggggacctcctcctcggcggccggtcgctgccgccggaggaggaacactgcgccgccgccgggggcgacgcccgattgctgctgcttctacgccgagctgcacttcgaccgtctcggcagcctagtcgttgatacttgcatcatcgtcggaaagccaccttctcggcaggaacaattgacagacaagcaaccacgacccaacaagatatctaaccgtattctcttcggttgctatccggaagggtcagcataccgtctcatcctggccgtccatttacctgatcggatggtgggcacggatctccaaagcccagctagatctcaccaccaatggcgcttccgttctgagtcactgacgaggtgggcccttaggtggcgcttcttctccatggccctgatcgccgccaagtccggcggcggcgtgctcgcgcagcgcggcggcggcggcggcaacctcttcggcctcgccgcgggcctccgccttgtccgcgtccacgtccacggccgccgccacgacgcctcagcgcatctcccactacctcgcgcaccatccgagagcgacatgggaggcgctctccgccgccttccccgccgccgaccacgtcgacgccgtcctcctctccctcgccaagcacctccactcctcctcctcgtcctactccccagagctcgtcgccaggaacgcgctcaccttcttctactgggccgcctcctcgtcgtcgtcgtcgaccccccacaccctccgcgcctactgcctcctcgtccacctcctctcccgcgccgccctcatccgcgacgcgtccgtgctcctcgaatcggccatagccaagcactcctcctcgtcgcccgcttctgccttcttggacgccttcttcgcggcctacgaggacagcggcacggccgcgacgacccgtggactccacctcctggtgcacgcctacgcgcgcgcgcgcctcccggaggaggcgctcgaggcctgccgctacctggcgcagcgcggggtggtcccctccctgcccgccttcaacgccgtgctgcacgcggcccagcgcaccgggcggttcggggtcgcctgggaggtgttcgagcttatgacgctgaagcgggtgtacgccaaccagagcaccgttgagcttgtcatcggcgtcctcagccgggagggtgcgcttgccaggatggctgcactcgtagagaggattcacggtaagaagtgtgcaccaggcgtggtggcacacgtcgcgctcacgctgaaaatcttcgaggaagggaggactgagcaggggatcttgctgctcaggaggatgctgcagaggaacatggtgtttgacaacattgcctactcgctgatagtgcatgcccattgccaggctggtgatctgaagtccgcatgcgagcaacgggatgacatggttcgccgtggctgtcgcctgaattcgttcgtgtatacttgccttatcagagtacattgccgtgcaggcgatgttgatgaagccatgcaattgtttgaagaaatgatctctattgtgttgaagccgtatgatgctacatacagccatctcactgctgggtgtttcagacaagggaggatgaaggagggctcggagtacatggacaagatgctccatcaaggttctgtgccggatattggcacttgcaatgatatgctagaggcgctttgcgattcaggacatgtcagcaaggcaaacgagctgctaacggcactgatggacaaggggtttgttcccgatcaaaacacatacttgaggatgaccaatggatatggcaaggttggtgatgctcaaggtattatcaagatttatcatgagatggagcacagggggcttaatattggtgttgatgtttttagctccctcattagggccctttgcaagtgtggagatctcaaggaagctgagaaattcttggctattctggaaagaaagctgttggcaccaactagtgaaatatatgatcttttgatcagtggtaactgtgagaaggtgctcatgccgcctggttctccaagcaagagggccaaggaggggacgccgatgttggagcgttgcctcccacatttcgccgttgctattggcagcgtcagctcagatgtgcacagtgctaccagccagctccgaggtagcaacagcaacagcatttgcagtgccagattgatgtgcaggagcaagcaaccaagaacgggagtaccggagcatgtgagctatgtcgtcgtcgacagcggcagcgtggcgccgggcaagatcgccggcgccgccgtcgccagccggagccga

SEQ ID NO: 19687 - DNA, 1506 bp, Oryza sativa
  Clone ID: PAT_MRT4530_25123C.1
atgaggacgtggcggctcgccgtgctggcgtgcctgtgcgccgccgcggcggcggcgccggcggaggcgaagacgcaccaccacacgtggaacatcacgtaccagtacaagtcgccggactgcttcaggaagctcgccgtgaccatcaacggcgagtcccccgggccgaccatccgcgccgcccagggcgacaccctcgtcgtcaccgtccacaacatgctcgacaccgagaacaccgccatccactggcacggcatccgccagattggcagcccgtgggctgacggcaccgccggcgtcacgcagtgccccatcctccccggcgagaccttcacctacagattcgtcgttgacaggcctggaacgtacatgtaccacgcgcactacggcatgcagcgcgtggcggggctggacggcatgctcgtcgtgtcggtgcccgacggcgtcgccgagcccttcgcctacgacggcgagcacaccgtcctcctcatggactggtggcaccagagcgtgtacgagcaagccgtcggcctcgcctccgtccccatggtgttcgtcggcgagccccagtcgcttctgatcaacggcagaggcgtgttcaactgctcgccgccggcggccagcaatggcggtggcgcggcgtgcaatgcgtttggcggcgagtgcgggtggccgacgctgttcaccgcctcgccggggaagacgtaccgcctccgcatcggcagcctgacgtcgctggcgtcgctgagcttcgagatcgaggggcacacgatgacggtggtggaggccgacgggtactacgtcacgccggtggtggtcaagaacctcttcatctactccggcgagacctactccgtgctcgtcaccgccgaccaggacccgtcccggagctactgggcggcgtcgcacgtcgtcagccgcgaccccaccaagacggcgccgggcagggccgtcgtcagcttcccggcgacgccgtacctcgtcgccatgaagcacggcctccgcggcgagttcgaccagcggccgccgccggacagctacgaccacgggagcctcaacctctcctccccgccggcgagcctcgccgtgcgccacgccgcgtaccgcctcgccctgggctcggtggtcgacgtggtgctgcagaacacggcgatcccgccgccgaacgggcggagcgagacgcacccgtggcacctccacgggcacgacttctgggtgctcggctacggcgagggcaagttcgtgccggaggtggacgggccgggtctgaacgcggcgagcgcgaggggcggcgccgtgatgaagaacacggtggcgctgcacccgatggggtggacggcggtgaggttcagggcgagcaacccgggcgtgtggctgttccactgccacctggaggcccacgtgtacatgggcatgggcgtggtgttcgaggagggcgtcgacgtgctgccgcggctgccggcgtccatcatggggtgcggccgcaccaagggccatcactactaa

SEQ ID NO: 19688 - DNA, 474 bp, Oryza sativa
  Clone ID: PAT_MRT4530_25124C.1
atgaaacaacgcagtgatcggaacggcaagaagacgaatgagccgagacgatgccgccacgcaaatgacgttgcgtgcgtgcgtgacgccgccgccgccgaagcccacgtcggaatttttactaccgccagaactcctgctcaagatcctcgctcggacgccgccacactcgtccgctcccatatggacaatgcgactgaggaggcggacaaggcggcgacggtgggagatacggacggcgacggtgggggcggacaaggcggcgaggccgggggaggaatagcgagggggagcaacggcggtggcgaggcgaggtgcggggctggccacacggcgcggggcagcgacgacgacacagggggcggcggcggcggctcccatcctagatccggccggagggaggccaggggagggcggcagcggcggcggcgaggcgaggcgcggggcgggccacagcgcggggtggcgacgacg

SEQ ID NO: 19689 - DNA, 182 bp, Oryza sativa
  Clone ID: PAT_MRT4530_25125C.1
acgtgaagaaaattgtacaaaatttcatgggggggtcaatggagggggcaacaaactacagacattaagcaccactagtacggcgctacaacccagacgaaaactttcaccgactgaagccgtaaaaacttactctcaatcggttgtggtcatctaatccactcagaatgcatgtatatata

SEQ ID NO: 19690 - DNA, 341 bp, Oryza sativa
  Clone ID: PAT_MRT4530_25126C.1
gcaggaccggccgacctcccggggcgacccaaccgttcttaccaaccaagaacaacaaacaagggggcgggcaaaaagaaaaaagcccccaaaccaaccaccaacaaggaccaagggcacaaccgccgcggcgacagccagcaacagccaaggggccggccgacacacaaggacaggacagagacgagaaagccccaaaggccacgaaagacagagcgcccgcaagaagcgcaccggaccccagcagccccaagacccccaaggacacagatggaagggaaggggaaaaccgcgaccaagccccgccacccaaaaaggcaacaaccagccgaaagcgaccc

SEQ ID NO: 19691 - DNA, 300 bp, Oryza sativa
  Clone ID: PAT_MRT4530_25127C.1
atgaagaaggcgacagcgccatcgtcgatgaggccaccgccaccgtctcctcgatacgaccgctcgccgtcggagagaggaagggagggcgaggagggaggcagcgtcggcaagcgcaggttgcggctcagtgacaatggtggcaacgactacctctactgcgagcacacgtccacatccggcggtggtgggcatgcaagacgacgccagattggcaactaccagtcggccatgctattcctcacgagcatggatctaaagatgacgacctacgctctctctcgccaactacaacgatga

SEQ ID NO: 19692 - DNA, 593 bp, Oryza sativa
  Clone ID: PAT_MRT4530_25128C.1
tttttttttttgacggaacaaatatacgggtgtagagtattttatatgatcatcagctaaatcctgattgatacagaaacattcggccagaaattaacgaacgaatcgagaacacgaaagcgaaaaaaaaaccggaattgagacacaactgcatagtgtctggatcaattgatcgaaccctttctgaacaacatgagctgcttctcctcggccgcgcgctcacgatctcttgaagctggtggcgatgggcacgatgacgaggaggacgaggagcagcaggatgatgatgccgatgcagagccacttgcggctgctgcgctggtgctcgcgggccttgcgtagctccttgttgccgccctggacgtaggtggtggcgctgttgacgtggcgctcgatgtcgtcgagctgctccccctgggactccaccaccacggccatgtcgaggaacacctggtggagctccaggaggctgcgctccacctcgcgggcggcgtcgtggcggtcctggatctcgtgcaccgtggccaggcaccgcgcccttgccgtgctccgccacggcggcgcacaggagctcctcgctgcgtccctcggag

SEQ ID NO: 19693 - DNA, 1464 bp, Oryza sativa
  Clone ID: PAT_MRT4530_25129C.1
atggacgccagccgcaactccgacctcgccgccgacgagctcctccgggcccaagctgagctgtggaaccatatcttcgcgtacaccaagtccatgtccctccgctgcgccgtcgagctcggcatccctgacgccgtccaccgccgtggcggcgccgttacggttcccgagctcgtcgcggagctcgcgctgccgcgctccagggagcccttcctgcgccgcctcatgcggctgctcgcgcacggtggcatcttcgacgcggccgcgggtgcggaggacgcctacgggctcaccgcggtctcgcgtctcctcgtctccgcgcccgggggcgcggggcaggggctctcgccgttcgcgcgcgccatgctgcaccccatcatcgtgtcgccgtccatctctctggcctcgtggttccgcgccgccgccgccgacgacgacgacgaaggagcggacgcgccgcgcgtgccgttcgccgccgtccacggcgggcgcgaactctgggcggtggcgaaggacgacccggggttcggcgcggcgttcaacgacgccatggcgtgcgacggccgcttcgtgatggacgtgctcctgcacggccaccaccacggcggcgcgcagctgttccgggggatcacttcgctggtggacgtcggcggcgggtccggcggcgccgccagggccagcgccgccgcgttccctcacgtcaggtgcaccgtcctcgaactaccgcaagtcgtcgcgaccgtcccaccaggcgacggaggcgtcgagttcgtcgccggggacatgttcgaccacgtccccaaggccgacgccgtcctcctcaagtggatcctgcatgggtggggggacgaggagtgcgtgcggatactgcggcggtgcagggaggcggtgccggcgagggaggacggcaggagggtgatcgtgatggacctggtggtgggatcgtcgtcgagcttgggagatggcgcgagggacacggagacgcagctgctgtgggacgtgatgatgatgggggtggtggggagccccgagcgcgacgagcgggagttttgcaagatattccatgacgcgggcttcagcggctacaagatcctgcacatgcctgcgattaggcggccacggacgtgcgtgtgggacgtcgaggagacggggaatcactggatccaggaggtcggtgaaccgatttggagagggagctgcatgatctgtggcattggtgtcccgtttcggacagcggcggtctccagtacggcgggtgctgctggatctgccgcatggagggctcctcgtcagctccatcctacctcttcttctgcctttttggaaggagcttgtagtgaagctttgttgagcttacgcaaagcagagaagggcatcggcgcggggttcctagaggatgctgccacctccatccccttgcgtcacggccgtgctgccctactggtcctctggcacagcatctaa

SEQ ID NO: 19694 - DNA, 322 bp, Oryza sativa
  unsure (1)..(322): unsure at all n locations
  Clone ID: PAT_MRT4530_2512C.1
gtccgnatccggtcgccaccgtcgccacgctcgggaccgtgggcggcgctgatattactaataaattttaccatcgctcaaggcgcactgcgctgtctgacagaccagtgctgaagaaaggaccagctatgggcgcatattgaagccaaagagccatttaggaggcgcgcggcgagagaacggcggtgaatgcggaccagtgctctgaccgctgcaatgcggatggaagcacgaacaccgaacactgccgcgcgaagtactacttattatccacataaaaccacctatgagggggtttgttaaaggttatttggtgataacc

SEQ ID NO: 19695 - DNA, 306 bp, Oryza sativa
  Clone ID: PAT_MRT4530_25130C.1
atggattactccatgatcaaatcgcggatgcatatacctgtctacctcataaacccaacaagcatcctagcaacgaggcagctgacgaccccagtgattccatcctcgggaagcagcttcccgatcgaggtggcatgggcgtccaccaggcagaggccctttggcctgacgctggcgacacggccggatgacgagacttgctccaccttggcgccggtggacgaaccgccgtcgagggagccctcgctggagcccggagacgaggactgccgaccgctggtaaacgcacctacttgcgtgggctga

SEQ ID NO: 19696 - DNA, 487 bp, Oryza sativa
  Clone ID: PAT_MRT4530_25131C.1
tttgctgacgcagtcaatcgaggcattgaatttgtgcgtcaaatgtgaactagataatgaaaacacagatacatataacgagctgaattcaaatgtagttttcagaagatttgatgcaatttgttctggatctgagtgtgtgattcacgcagaactgtgctgtcacactgcattgtttattcgagccgtgtcaagaagtcttggatccgatccagcgatgatccagggctgtgaattgcagcgaatccctcttgtttatccaacttttgtcaacgttatgcagccttttccccttgttttcatgtaccaaattggtagagagaaagtaaaaactagacttgattcaggagttgagaatcaatgccctgttacctgtgtgaattggtagagagaaagtaaaaactagacttgattcaggagttgagaatcatgccctgttacctgtgtgtgatttctttgtgctccataaaaaaaaaaaaaaaaaaaa

SEQ ID NO: 19697 - DNA, 305 bp, Oryza sativa
  unsure (1)..(305): unsure at all n locations
  Clone ID: PAT_MRT4530_25132C.1
tgngccctntnaanaagtgantaggctccccnanaaanaatnttttgcttcaatncgatcctcgctaagctggggccccccncgatnaaaaantctctgngttttanttggttaatttttgtgtttgagttatttgcaatggcggncgctaccatggcgctgagcagctccttcgccgtcgccgccnttnntgctggtggcgcgccatggcgtggtgtcgtctccgctgggcgcgccgcgcctcgccggggtgtntcgctcgtcgtcaggggccantccganccggangtggacntttttttntt

SEQ ID NO: 19698 - DNA, 565 bp, Oryza sativa
  Clone ID: PAT_MRT4530_25133C.1
tggatccccgggctgcaggttcaaagtacacaccaacggcaaaacaggcagagaaggcggcgttctgtgcagagagcaaaggtaccatggacctgatgcgcaccaaacaacttgcaaaattcgctgtacctatactgtcggcatttctgctaatttacgaagttggcaacgtctactgcgcaacagttcatgagaacagtgtcgatctgcactcgctgctcgatttcaagcagggcgtcaacgatccaaacggagcattgaggacctggaacatcagcacccacttctgtaggtggaagggtgtgaactgcagcgacgcgcgaccttggcgtgtcacgggactcaatctcacccgcaaaggtttagcggggaaaattagtccctcccttggaaacttgacatcccttgacatgcttgacctctcatataataacttcgatggcccgttgcctcttctgaaccgtctccaacgcctgaaatttcttaatctgaaaagcaaccatttgcaaggcgttattcctgatggacttacaaattgtaccgatttgctattcttagatctctc

SEQ ID NO: 19699 - DNA, 542 bp, Oryza sativa
  Clone ID: PAT_MRT4530_25134C.1
gcatcaagggttaccgaccgctcgaccggaagcgccgccgcggcaggtgcaggggctaccgccggtggacgttgccgccgccgcagtaggggcacgtcgccaacgccgccctccgcggccgctgctggagccgtcgccaccgccacaggagtcaaccgccgccgcaggtgcacgtcgcccctgccgccgtgggggcacgtcggcaacgcccccccccgcgcccgtcgcggccgccgctgcaggtgctcgtcgcccctgccgccgactcctgtgatttcatcgctctcgtagaggcaaactctttatgggtgaagatatgggtgagaggagtatcgtacgattactgctatgagattcaagactgaggatgacggcttcaagttataggctattacattttgcaatcatgtctctaagttgttttgtcattcctacaatttcaagaaagtagaagaagatgtgtgagatggataagaagtagaagcagccctttgctatgcactttacatagtttcgtcatgctcttggtcgtaatgaataca

SEQ ID NO: 19700 - DNA, 300 bp, Oryza sativa
  Clone ID: PAT_MRT4530_25135C.1
cgccgttgcaggtgcttgttgcccctgccgccgactcctgtgatttcatcgctgtcgtagaggcaaactctttatgagtgaagatatggctgacaatttcaggacccttgaggaggaagaggagtatcgtacgattactgctatgagattcaagactgaggatgacggcttcaagttataggctattacattttgcaatcatgtctcaaagttgttttgtcattcctacaatttcaggaaagtagaagaagatgtgtgagatggataagaagtagaagcagccctttgctatgcacttta

SEQ ID NO: 19701 - DNA, 287 bp, Oryza sativa
  Clone ID: PAT_MRT4530_25136C.1
gcgatagatagaccgcaactatgtgagccaggaatcgtgtacccgaaatacccgctgccgcgatgcctctcgttcttgaagcgccagagaatcccccccagcacggtggacgaacaggtccggcgaggctgatgccggcagctcgccgccatcgacagcagctggtgcaggtgcgatgcgctcaaccacatgctgaggatcatctacagggagagcggcgccgccgacgctgggcaccccatggccgaggtgttccgcggctgccggagaggggacatcgagcgcgc

SEQ ID NO: 19702 - DNA, 180 bp, Oryza sativa
  Clone ID: PAT_MRT4530_25137C.1
atggtccggaggaggggaatcggcgatgaggatggggatgcggaggatggctccggtgacgaggcaaggataaccatatattcgtttacccacaattcctgtattccctgctcaatgctcaatgctgaacgtaccgtttatggcatcaaccaagaatatgtgttaatcaagaatagctga

SEQ ID NO: 19703 - DNA, 1157 bp, Oryza sativa
  Clone ID: PAT_MRT4530_25138C.1
ccattcgccattcaggctgcgcaactgttgggaagggcgatcggtgcggaagctgcagggagttgaattatcactgtccttgtatgacacagcatgggtgagtatggtgtcagagcgtggttctcctcaggctccatgttatccgcggtgtattgagtggatactgcaaaaccaacaggacaatggatcatggggtataaacccatcaagttcatcagtcgacaaagatatccttttgtgtacattggcttgtgttgttgcgctcaagaggtggaatgtaggtccatatcacattaagagaggtctaaattttatcggaagaaatttctctgttgcgatggatgtcaaaactattgctcccgctggtttcaacattactttttctggtctgattagccttgccgctgggatgggtttgcgattacctgttatgcaaacatatattgatgagatttttcacctccggaagatcgaattggaaaggttagccaattagtgaaaaactaattaaaaaagcctttatggcatacgtatcggaagggttagggagcctacaagattgggatgaagtaatggcgtatcaaagaaagaatggatcgttgttcaactcaccttccacaacggcagctgcagcaatctatagtttcaatgacagcgcgctcaactatttggattcatttacaaataagtttggcggcccagtcccagcaatgtatccgcaaaatatatactcccagctatgcacggtcgatgctcttgaaaggacggggatttctcggatttttgtgtgtgagataagagacatattggacagaacatacagatgctggctacacaatgaggaggatgtgatgctggacataccaacgtgtgcaatggcatttcgcctcctgcgcactcatggctatgatatcacctcagatgaaatggctcatttttgcaaacaatccagctttgatgattcaattcatggatatctcgatgacactaagactttgttggagttgtacagaacttcacaactcctttctcgagagaggatttgatcctagaaaatattggaaattggtcagctaaacaactgaagcaacaactatcatccaacaagttatcaacaactttttgcttgcgaaaggttttacaatgggaaaggttga

SEQ ID NO: 19704 - DNA, 204 bp, Oryza sativa
  Clone ID: PAT_MRT4530_25139C.1
atggtgtccgaagtgatcaattatggaggagaaatgatatatggtcaattcaaattgctaaactcagtcccaagacagataagctacactagcctcatgcagcaaataattcatagtccacgtgttacctatcaaccgaatacaacaagtatactaacttacataatatacctgaagacaaaggagcaaataataaatgaatag

SEQ ID NO: 19705 - DNA, 330 bp, Oryza sativa
  Clone ID: PAT_MRT4530_2513C.1
atgggtcataccaacctccactccgccggaagcaggtgcaacgtggaagcacggttgtttgctgatgacgcgaccggcgtcagaccagtcacagaccgcctggaatgtatctggccggggctgacgtgccaactccaggagttcccacgccggctccggctagggacgagtgtctggaggctctcatcattccgacgggacggggcgaggcgtgtgtcaggccgcctgttgccacctaacccgcgatctgaccggtctgtgaccggtcacacactgcgaccgatcacggaccggataagcatgcgctatgctgcattaaatgcggcgtga

SEQ ID NO: 19706 - DNA, 1610 bp, Oryza sativa
  Clone ID: PAT_MRT4530_25140C.1
atggcggacaagaacggcctcctcctcctttccaccattgctgccgtcactctctcctccctctcgctcgcggcggtagcctcgccggcgacccgtaggagccaagaatcgcgggaggcggtgcgggccgggtactacctcgccgccgacgcccacctccggccgctcgccgcgctcgacgcgtcgatgtacacgcacctctactactacgccgtggcggtccaccccgcgcgccgcacgctgctgctgccgccggacccggcggcggcgagcctactgggggatttctccagggcggtcaaggccaagaacgccgccgtcaagaccgtcctctccatcggccgcggcggcggcgcgggtggtgcggctgcggtggcggggtcggggtcggaccccgcgttcgccgccatggccgccgacccggcgtcgcgcgcggcgttcatcggggcggcggtcaaggtcgcgagggagaatgggttcgatgggctcgacgtggcgtggcggttcccggcgtcggcggtggagatggcggagttcgggttcctcgtcgccgagtggcgcgccgcggtgccccgcgggttcctgctcacggccacggtgtacttttccaaccacgtgttcgacgcgccgttcgccggcgtggactacccgtcggagaccgtcgcgaggagcctcgactgggtgaacgtgatggcgttcgggctccgcccgcccggcgccgccaacgccaacgccacggcgttcgacgcgccgctctacgacagggcgtcgcactactcggcgagctacggcgtcgtgtcgtggctcgacgcgggcgtcccggcgagcaaggtggtgatggggatcccgctctacggccgctcctggttcctccgcaacaaggcgaacagcggcgtcggcgcgccggtggtcgccgcggggccgaagcagcggggcagcaacgccacgggcgccatgtcctacgccgaggtccagtggctcgccgcgacggcgacgcgcggctcccgcgcggtgatcaccgcctacgacaacgcctccgtcgcgtcgtacgtgtccgtcggcgacgtctgggtcgcgttcgacggcgtggccgtcgtcgccgagaagctcgccttcgccgcgcggtgcggcctcctcggctacttcctctggccggtcaactacgacgatgccaacctcaccgtgtcgcggcgagcatcacaagtctggacacagaccaaaatctcgccggagttcaagaacgtcaccggtggcgcccggcagacgcaggcgccggtgcagcggccgccggcgctccagtcgcctgcgccgaccaccgcgccgatgtcgtcgtcgtcgacgacgtcgtcgttctcacggttatcttggagaatgctggatgtgcgtctccatctgggtgctcttcttcttctcctccttctcgtgtgctaccaaatctagaagaaatgttagaaaattctttagtttttatgaaggtgttgtgctcaaattcagattagttattcgttgcatttgtaatttcgtttcaaattgtatcatagcagcaggttccaataggaattcacattaacaatggagtaaaaacagtgtgtttttgtgactgaccgtac

SEQ ID NO: 19707 - DNA, 2205 bp, Oryza sativa
  Clone ID: PAT_MRT4530_25141C.1
atggtgtgctccgtggctgccaccgcctcgctcctcccctctcctcctcccaaacccaccgccctcgccgccgacgaccaccacgcccgcctcagggcggcggccgcgcgctccgacctgccggccgcgctggccgccttcgtcgccatgtcctccgccggggcgccacccgtcctccgcaccttcacctccctcctcaagctctgcgccgcccgcggcgacctcgccaccggccgcgccgtccacgcgcagctcgccgcccgggggatagactccgaggccctcgccgccaccgcgctggccaacatgtacgccaagtgccgccgccccgccgacgcacgcagggtgttcgaccgaatgcctgtccgggaccgcgtcgcgtggaacgcgctcgtggccggctacgcgcggaacggcctcgcccggatggccatggagatggtcgtcaggatgcaggaggaggaaggggagcggcctgactcgatcacgctcgtgtccgtgcttccggcctgcgcgaacgccagggcgcttgctgcctgccgagaggcgcacgcgttcgcgatccgttctgggctggaagagcttgttaatgtcgctacggccatccttgacgcctactgcaagtgtggggacatccgggcagcaagggtggtcttcgactggatgccaaccaagaactccgtgtcctggaatgccatgatcgatggatatgcacagaatggggattcaagggaggctctggctcttttcaataggatggtcgaggagggtgtcgatgtgacggatgtctctgtcctggcagcactgcaagcgtgtggggagcttggctgtcttgatgaagggatgcgtgtccatgaactgcttgtgcggattggcttagactccaacgtgtcagtgatgaatgcactcatcaccatgtattccaaatgcaagagagttgacctggcatctcatgtgtttgatgagttggacagaaggacgcaggtatcgtggaatgccatgatccttggatgcgcgcagaatggatgctccgaggatgcggtgaggctttttactaggatgcagttggagaatgtgaaacctgattcattcactcttgtcagtgttattccagctcttgcggatatttcagatcctctgcaggcaagatggatccatggatattctatcaggttacacctagatcaggatgtatatgttctgaccgcccttattgatatgtatgcaaaatgtggccgtgttaacatagctagaattctgttcaattctgcaagggagaggcatgttatcacatggaacgctatgatccatggttatggatcacatggttttggcaaagctgcagttgagctatttgaagagatgaagagcattggcatagtgcctaatgagacaacattcctttcagtcctctctgcatgcagtcatgctggtttggttgatgaaggacgggaatattttaccagcatgaaggaggactatgggcttgaacctgggatggagcactatggtaccatggtggatcttcttggccgagccgggaagctagatgaagcatgggctttcattcaaaagatgcctatggaccctggccttagtgtttacggtgcgatgttaggtgcttgcaagttgcacaagaatgtggagttggcagaagaatcggctcagaagatttttgagctagggccacaggagggagtgtatcatgtcctcttggcaaacatttatgcaaacgcttccatgtggaaggatgttgcaagggtgagaactgctatggagaagaatggcctccaaaaaactcctggatggagtatcattcaactcaagaatgagatccataccttctactctggaagcacaaatcaccagcaagcaaaggagatatattcaaggttggctaagttgatagaagagatcaaagcagtgggctatgtgccagacactgattcaatacatgatgtggaagatgatgtcaaagcacagctgctcaacacccacagcgagaagcttgccattgcttttgggctcattcgcacagcccctggcacaacaatccagataaagaagaacctccgagtttgtaatgactgccataatgcaaccaagctaatatctttagtgacaggacgggaaataatcatgagagatattcagcgattccaccattttaaggatggcaaatgctcatgtggagactactggtag

SEQ ID NO: 19708 - DNA, 295 bp, Oryza sativa
  Clone ID: PAT_MRT4530_25142C.1
agtcaaaacgcctatcaaccgtttggtcgctgtttgcacttgcgtgtggcctcgtaacccttattggttcaatgggatttatccagcattcatttgagcgtattggaaaatccagtttgctgatgggggtatctaattatggacactaaattatttccagcatgtgcacggttcggcctggccttgggtgaagaaaatccaaactggagaagagggcaatccataaccattcatgacaacttaggttgcaatgggcaccatgacatgatagagaatggctagggatccaactatg

SEQ ID NO: 19709 - DNA, 566 bp, Oryza sativa
  Clone ID: PAT_MRT4530_25143C.1
gagttcgtaaatttttattagagttatttacatagttaataatatcaatcaaaaaaagcaattttaatttttttggtggaatttttaaaagttttttaaaattaaaaaaagcacttttagttttttttggtgggtttttagggtattttaaaattaaaaaggcaattttacaaaagagattatactataaaaatttacaaaagaaaaaatgacaagagagatttgaaaattcttggctgctgttcttcaatccattttgatggtcatatggggttgttgggagggagttgttgctgagaagatggtggaaggtctaccggggtttattccaagatatatatattggatccggcctaaatccaaaaatggattagttttaagaccaacttgccttggatgttgtctgttttgaggcagcatggagttgttggggcatagggaggatcactgggttgttcgtgcaggatggagttgcattatggatcatggaccaccgttgttgttgtagttgccaccagccatctttgaatcccaaccagaagaagaagagaagaccaaatcctttc

SEQ ID NO: 19710 - DNA, 786 bp, Oryza sativa
  Clone ID: PAT_MRT4530_25144C.1
atggagcggcagatggcgcggatacagacgtggtcggggagggacgggaggtggaggagcacaagccctcgcagatccgccgagagatcctgccacagcggcgaaggctactgcgccgccgccaccctcctcgtcgtcgtcggtgccgccggcggcggtgtggagtgcgaggaggaggtggctgccaatgtcgtcatcgtcggtgccggcggcggtggcgtggagtgcgaggaggaggtggccgccagtgtcgtcatcgtcggtgccggtggcggtggtgtggagtgcgaggaggaggtggccgccagtgtcgccccaccgtgcctccgaggccaccatgctgttcccggcgaagtcaatgggaaggagaaaagaaggaaagagaaggagaaaaagaaggaaagaaggggcaatccggtcgtgaaggtgcgcagagcaaacggtggaggcggcggcctagaatggcggcgcagggagcagtgtggtggtggtggagattggtccatggcggcgaggtggagaggatccggtggctggcctgccctccacctgggcacgggaaggatggcgctggcgatgggcggtgacggcttgggcgagggaggccgacaacagaggacccggatgagggcacaacagtggtctcctggccaccacccgcctctctgccacgcccaccgctcgctgcaccaccgccacacccgtagtggcccagcagccaccgccctcgagaaaaaggggaagaggggaaatagagagaggagagaaagtctgacagctgggtaa

SEQ ID NO: 19711 - DNA, 996 bp, Oryza sativa
  Clone ID: PAT_MRT4530_25145C.1
atggaggagaagaagccatacgtaatagcgatgctgatacaagtgatttacgcgggtatgttcgtggtcaccaaggccgccttcgatgaggggatgaacaccttcgtcttcatcttctatcgccaggctgctgccactcttctcttgcttcctctcgctcttcttctcgagaggaaaaacgcgcgatcgatgtccttgatgttgctcatcaagctcttcttctgcgccttcatcgggaatacatttagcttgaatctgtacaacgtaagcatgaagttcacatctgcaacagtggcatctgcagcaagcaactctttgcctgtcatcaccttcttcctcgccctcataaccaggatggagtgtgtgaaggtgaggagctcatcgggcatagccaagctcgccggcgtggcgctctgcttcgccggagtcatggtgctcgccttgtacaagggtccggcgctgaacccagcggcggtgctcagggagttccccaacaagatgctggtgacggcggcgcagtgcgtcttctccacggtgcagacggcggtggtggcggcggcggcggagagggagatggccaggtggaagctccgcctcgacatcagcctgctcgccgtcctctacaccggtttggtggtgacgggggtgtcatactacctgcaggcgtggtgcgtggagctcaagggacccgtgttcttggccatgtccaaccgagatcgtccacctcggcagctaattgaattcatggacagtattataggggggattctgctggtgggagggctctacagcgtgctgtggggtaagagcgccgagatgacgatgaatggcaatggtgatgaccagcagcagcagcagcagcagcagcaatcccaccacaaaatttctacagagatggttgtggtggagaagacgatgatcagtggcagccaagagaaggatcagaataataatgaacaatccacaccaacaaaatcaccgcttcagcaagtatag

SEQ ID NO: 19712 - DNA, 597 bp, Oryza sativa
  Clone ID: PAT_MRT4530_25146C.1
atgaaagatttgctggaggagtactcccagcagttggcgcggctcgacgtgcagcatcagcagcggctctcagcctacacagcctacaggcgccggcgtctgcgtgtcccgccgcacggcacgctgcccatactgccacgccggatgccgcatactgccatggtcgcgccgtgccggatgcaatgccgcgctgtctcctgcctggctatccggctatcgccgtgcggtgggatgaaactcaagcgccgagcagagcaggccgggccgtcacgacgtagagcggcaacaacatcctcgggctcatctccggcaagcggcaagcggaggagcggcagggccgctcgtggctggcgagctccgggtgaccagatcaggggcggcgtggccagcgagctccgagcggccggatcggcgggcggcgtggctgacgcggccagcgactcgccatggcgaggtctcgtctcgtcgcgccgagccgaggaggaggaaggcagcggcgaggagacggagcacagtgacgaggagatggcacggcggcgaccccggtggctctccctcaccacccgctccttcctcgccatcgccgcaccgttgtga

SEQ ID NO: 19713 - DNA, 1920 bp, Oryza sativa
  Clone ID: PAT_MRT4530_25147C.1
ttgatggagacgttgtcttcaccgccggccgccgtcattgcagccgactggtgccctcgctttcacggctgacctattaggccgtcattgatgggcgtcttcgctttcaccgtcaaccaccttggtcgccaccgactggtgttttcgcctatacggttggcggacatcgccaccgttgatgggcgtcttcactttcaccgcctgcctatccttgtcgccgccgactggtgtctccgccaacacggttggttggtcacaccaccgttgttggtgtccatgtcttcagcaaccggccaccttgtccgccaccgactggtgtctctgactacacggttggttggtgggcgtcttcactttcaccgcctgcctgtccttgtcgccgccgactagtgtctccgccaacacggttggttggtcacaccaccgttgttggtgtccatgtcttcagcaaccggccaccttgtccgccaccgactggtgtctctgactacacggttggttggtcacaccatcgttgttgggcgtcgatgtcttcaccgccggcttgccttcaccactgccgactagtgacctcgcctacatggctggttgtcacatcaccgttgatgtgcgtcatcatcttcaccgaccggccgccttgtccgctgctgactggtatctttgcctatacggttggatggtcacaccaccgttgttgggcatctacatcttcaccgccggcctgctttcatcgcagccgactggtgtcctcgtctatacggtttgatggtcacatcaccattgttgggcatcaacgtcttcactgtcggctgtcgtcatcaccgacgactggtgtttccacctatacggttggcggattccaccgccgttgatgggcgtcttcactttccctgacgactgccttcattgccgtcgattggatccttcgtctttatggttggatggtcacaccaccgttgatgggcgtcttcatcttcaccgctagttgcctcagctgccttcacggctggtgtttatattgctattgatggacgaatttgtttccacatcgtccacctctgccgtcaccaaggcgaagaccaaaaagctaaaacatcaccgaccggcttgcctccgtcgctgccgattggttttgctcgccttcacggttggatggtcacaccaccattgttgggcatctatatcttcaccgctggcttgcctctgtcaccgccgactggtgtgtcttcgccttcacggttggttcgtcacaccaccgttaatgggcgtctatgtcttcacttccggctgctcccgtttgttgccgactgattatctcgccgccatggatgcacaactccgtcataactactgggcgcattcgtcttcattgctggccgccttgtttggcgttgactggtttcttcgcctccacggctgcacgtcttcgtcaccattgaatggcatcattgtcatcaccagcttgccttctccattgctgattggtgtctccgccttgatggctggcctattatactgctgctcatggatgtctctattttcaccatctgcttcttttgtcgccgactggtcttcgccaccggtttgcttttgttgccaccggcttgtgtctacgtcatcacggcaatgtaactctatcatcattatggggcaacttcatcttcattgtcttcagcaccggcaaattctattgcctctacttcgcaagattttctacttcaccaaccatgacgtctacaagagcctcaacatctcggcatgcgttaccaaatatgattccgtgttattatactacaaaagtggtgctccaattttcaagatttctactcggacatcttcaacacatatcttcactcaagcaatggctactcgacaacaagaagctacagttctcgactctatgtttagttatttctcaac

SEQ ID NO: 19714 - DNA, 228 bp, Oryza sativa
  Clone ID: PAT_MRT4530_25148C.1
ctttgggctgcaaagctggatgtggtggttgcagggtgatttggaccttgagtgctgctgggtggaaaatgaaacccccctgagggcttgtggatgctgcctgatgatgatgatgctgagcaagttgtggcttgaattttgaaaccctgtgtgtggtggaaagtgtgtgtttttaattctccaaatgggggaaatatagagaaacatactgatcaaaaaaaaaaaaaa

SEQ ID NO: 19715 - DNA, 608 bp, Oryza sativa
  Clone ID: PAT_MRT4530_25149C.1
ttcatctggccattcaggccccgccggacccggcgacggcgaacgggttgccgggaggcttcaaggagcgcgtcaacggccgcggagtcgtctcccgaggctgggtaccacaggtcaagttcttggctcacgcatcggtcggcgggttcctgacgcacgccggctggaactccatcgccgagggcctcgcgaacggcgtcaggctggtgctgctgccgctgatgttcgagcagggcctcaacgccaggcagctcgccgagaagaaggttgccgtcgaggtggctcgcgacgaggacgacggctcgttcgcggccaacgacatcgtggacgcgctgaggagagtcatggtgggagaggaaggcgacgagttcggggttaaggtgaaggagctcgccaaggtgtttggggatgatgaggtgaacgatcgatatgtgcgagattttctcaagtgcctgtcagaatacaagatgcagcgacaaggatagtgctgttttcttgtgtgattgtgtcttcaggcgtcactgtagtagaagcaattgatgttttggaattaaacagagtgatggaataaagttgcgtttataataaaaaaaaaaaaaaaaaaaaaa

SEQ ID NO: 19716 - DNA, 506 bp, Oryza sativa
  Clone ID: PAT_MRT4530_2514C.1
tgaaacacaattaccagatcagcagcatttgtgatagccttcttgatgaagaccaaaggctggagactttcccagtgtttccaatgggtgaaagaaagaagaccacaagtgcaattggctgatggtacctttatacctctacaaaatatttacttattttcaagatgatgcacttaaaaaactaggcgagaaatagagactaaatcacacatgtttttagtgtaaactgaaatatgtcgcatttaagaatcttctgccaatccaattcccgcatttgaagaaaagtgaaatctgtacaccctagatggaaataacaatttacagttacttggtaagatgtaacatgaacttttcatggtatgctgtcaagagggaactcaaggcaaagtgtatcctggattgttcatatttagaagatgtggtacaccaagttagcgttaccatttctcatcagttttcttgttaatggcatggtaaggaaacaactgagtagttcagctagcata

SEQ ID NO: 19717 - DNA, 563 bp, Oryza sativa
  Clone ID: PAT_MRT4530_25150C.1
atgagaacaaaacttataccatatctgacaaaaaaattattatttttcagagtacaactagacatgtgagacacaccaaaggactatcttaaattacaatatattagacgcacacaccttcaatacaacatttaaagttggtggcactattgcatgttttttttaaaagcctatcgtacatgcaaatcatttcttcatttgggagataaggaaggctgatgagcatataagccatgtaacatgtaatgggccacacatttgtaagcggctttattaataagcactccatcctactagaagtatttccatgggttaacgcaatgatttcttgacctgccaccgcaactgaacaatgtgttggagttgtacggcccaacatccccatagcatacaaccaagacagtctgcttcttcaacccattaacagcaaggtgatgggtgattcctaaagcgcccttgcagaaatcaccatacaataccgtaactggtggatcaccacggatctcatacaacataccttttatttcacccttgtgatacaccaataattcattcaaccactt

SEQ ID NO: 19718 - DNA, 573 bp, Oryza sativa
  Clone ID: PAT_MRT4530_25151C.1
ataagctcgctatccaggttgatggagagcataaagcgaatggctgtaacttcacccgaaccgcgaacaattcgaggtgaggagtccaaagcgttgcaattgcaacctgggccttctcagccaggggacaggagaccagctgataaggtttgccgaatgcgcggagctcctaaacgtgtactggctggcggtgattggggagatcgcaacggaggacctgacgccgggtactcgctacgcggtgtacctggtgtacaagctgacgggcacctccgtcggctgagaggtggccagacgcagaggtcatcgctcaggctctacggcgagatcaccgtctccaccggcaaggtcagcgtcgacgtcgtccctgcagcggcgcgcggaatggccgccggcgtggcctatcctgtggccaggggagacggctggatggagctcaagctggccgagtttgctgccgacgagaagctgctcggtgagaagaaggtgatagtggacttccgcgaggagaacgaccatgtcaagaagagtggtcttgttatagagggcatggagttcaggcccaacaagtga

SEQ ID NO: 19719 - DNA, 630 bp, Oryza sativa
  Clone ID: PAT_MRT4530_25152C.1
ataagctcgctatccaggttgatggagagcataaagcgaatggctgtaacttcacccgaaccgcgaacaattcgaggtgaggagtccaaagcgttgcaattgcaacctgggccttctcagccaggggacaggagaccagctgataaggttacatggggagaaagccccgagcactggaaatggatcaccctccccgattctaggtttgccgaatgcgcggagctcctaaacgtgtactggctggcggtgattggggagatcgcaacggaggacctgacgccgggtactcgctacgcggtgtacctggtgtacaagctgacgggcacctccgtcggcctgagaggtggccagacgcagaggtcatcgctcaggctctacggcgagatcaccgtctccaccggcaaggtcagcgtcgacgtcgtccctgcagcggcgcgcggaatggccgccggcgtggcctatcctgtggccaggggagacggctggatggagctcaagctggccgagtttgctgccgacgagaagctgctcggtgagaagaaggtgatagtggacttccgcgaggagaacgaccatgtcaagaagagtggtcttgttatagagggcatggagttcaggcccaacaagtga

SEQ ID NO: 19720 - DNA, 554 bp, Oryza sativa
  Clone ID: PAT_MRT4530_25153C.1
atgcctgcttatgaaactatgctctcattataatacaccacttattatactacaaatggcatggcagacccactgccggatgcctccatatgactgaagatctcggacatggataaaccgacgtaagcctttcccccaccaatgcacacaggttgtctagtatcagcaccctatggactctactgagacaagctatcaccatagcaccatgcatgcctttcacttatgatagacaaactatcatttgaatcaagaacctaaatctaaccatactgcagacgaagtgtacctttgacatcacggctaccatgaccactaccatatgaatctatgtagacattcaaatggtcaagcatcacaagggcttgcaaacggaagttccgtgcaccacagcttgaaataaaggctccagcaagagcttcttcagtctttggaggcacaggtgccatgatatcatattcagcccatgaaaagtagccaactgcgacatctgaagaaaggctaggtgtcatcacaatcttgtaccctctcctgtttaggaagcaatgaaatta

SEQ ID NO: 19721 - DNA, 197 bp, Oryza sativa
  unsure (1)..(197): unsure at all n locations
  Clone ID: PAT_MRT4530_25154C.1
ccacgcgtccggaacacaaaaatggcggacgagaagctcgccaagctgcgtgaagccgtcgccggnctctcgcagatcagagacaacgagaagnncgggttgattagnctcgncgnncgctaccttagnggcgaggaggatgatgtggaatgggnaaagatnacacgncgacggacgaggnggnggngccgtacgac

SEQ ID NO: 19722 - DNA, 133 bp, Oryza sativa
  unsure (1)..(133): unsure at all n locations
  Clone ID: PAT_MRT4530_25155C.1
gttaattggagnaanaagcggacagaccccaacaatgngnaaaatgtgaaggtgcaaaacttagactcacggactatatggggtctcaaagtcatgcagtgtgaacaaaacgctagaaaaggggtgcaacaat

SEQ ID NO: 19723 - DNA, 288 bp, Oryza sativa
  Clone ID: PAT_MRT4530_25156C.1
atgggtgtcatgatatatggcaatgacaacattgtagcgtccatttttgacgagataagctatggtagctcggcgagtgtggtgctctgtggcgatgatggcatggtgccgacaccggcccactggcccagctcgttccttccaggccaacctcgcccatggcaaaggaaaaagtacaccgaagcggcggtgattgcggcggtcgctgcagccttgggggagaagaagaagcggagtccgaaggcgacggggtcggcggacagcagcagcagccagcgctcctcctag

SEQ ID NO: 19724 - DNA, 1014 bp, Oryza sativa
  Clone ID: PAT_MRT4530_25157C.1
atgtcgaggaagacctttgactacctttgctctctgattagtggggacttcacaagaaagacacaaagtttcagaaatttcaggtttggagacaaggcaattctaggcgtggaagatcaagtaggtgttgctctgttaagattgaccaccggtgagtcgcttttgagcatagggaaccgcttcgggatgaaccactcagctatctcaaacatcacttggaagtttattgaggccttggaggagcgcgctgccaatcatcttaagtggcctactcctgaggagatggcaaccgtcaaatctaagtttgaaaagattcagggcctccccaactgctgcggcgccatagacacaacgcacatcctcatgtgctcttcagctcagcctaacagcaatgtctggctcgacggcgagaacaggaacagcatggtcctgcaggccatcgtcgatgccgacatgcggttcagagacgttgtcagtggctggcctggcagcttgaatgactcgtgcatcctgcgcacctcaggattctacaggctctgcgagaaaggcgcgaggctggacggacaaacggagcttccaggagagccagctgggtcagtggtcagagactacattcttggggatgcaagctaccctctccttccctggctgatgactccataccgtgagaaggatctatctccggcgaaagccgacttcaacaagcggcacgccgcgacgatcatggtggtgcagggtgctctggccaagctgaaggagaggtggcaggttctcaagggagagctgtggaggccggacaagcaccggctgccgaggatcatctacgtctgctgcctgctcaccaacatcatgatcgacctcgaggacgcggcgaggggcggcatgccgccgtcgcacaaccacgacgacggctaccggcagcagttcagcgatgtcgccgacgtcggcgcggccgcgctgagggaccagctgtgccagtatgtgagcaggattggcagcagtttgccggcgtga

SEQ ID NO: 19725 - DNA, 631 bp, Oryza sativa
  unsure (1)..(631): unsure at all n locations
  Clone ID: PAT_MRT4530_25158C.1
tttggagcttcaggaaaatggaaccatggcttcatttccacttaaaaaagtgcatcagcttgaatccacaagtgtatattctgcatagttataacaaggattttgatgctccttatttcttccctgataatttcaagtaaagatgtttttttggaattttgaatatttgcacttgtgctgatgacttctaaattactaacgatgtaattcataaatttttatctnatcacgcatatgcttgcttaccgttttgttattctttttcacttttggatatacgtagtttgcttgaaaaatttgatgtggctaaaagattatttggtttctcaggaagatgcttgatgctaatgtcttctgcgagctttcagattggtaagcttcacaagaaaaagagtgtgcctgtggactcccaggatgtaccttggaatcttgaaaagatttcaagattgttaggtcactttcgtggctccacttcaactgtaggtgtgtgcatagtttacaatangacctctttagattaatattgtggtgaaggaaaatatataggcgttttgacaactgttagtgtttctgaaatgttcacaccttgctatctactttttacttcattaaggcaaaaaaaaaaaaaaaa

SEQ ID NO: 19726 - DNA, 295 bp, Oryza sativa
  Clone ID: PAT_MRT4530_25159C.1
catatttatttacatatattcactgggcaattttaggataaagagaggctttatcatcattagtcgaaagactggacagttcatagcagcaaaacaattggttgcaatttatttattttaggtatgctatgattcgaacgccgagctaagaggatacagccgaattatacacgtcttggtagctctagtattggattggagtgaatgcaccgaactcatctcctctattatgcttagagcctctgaggcttttattttgagatgccatattgcattgctagaaacatcatttggg

SEQ ID NO: 19727 - DNA, 1438 bp, Oryza sativa
  Clone ID: PAT_MRT4530_2515C.1
tctcggcgggtacaccatctcttcattccgtattccttatcgagattcaccaaccgttctcgagtgattgagaaggcgcagaatatggtctttcgtctctacaggatccgacaaggccttatcggctctaggcgtccccagccgaagatcccttaggttcctcggaggccttgtcaagacggcgtaaagggacagtaggataggtttcagcgctaggtgtcatctgggtaagggatctctgggtaaaacccttggcgatcttgtgtacctgacatcaactttgttgaagtaggggtaatgggagaatcgctacatcgctggtcgaggactaggcagtagtcgtaactcgaccacttgaagtggaaatagtgggagaaacgctacatcgctagtcgaggaccaggcagtagtcataactcgaccacttaaagtggaagtagccggagaaacgctacatcgctggtcggggaccaggcagtagtcgtaactcgaccactgaaagtagaagtagtgggagaaacgctacgccgctggtcgaggaccaggcagtagtcgtaactcgaccacttaaagtgaggcgagagagatcattacattttactggttcgagaaccaggagtaggagtctcttaattacctataggggcgttaaagttggtttattatatgtgcatattatgtggccagcatgggcgttagcgaggaattatccgttaacaaacttttctcgagtagtccagcgatggccggagctatgagataggtcgtcggtcttcgttggtaggttgggcgcgacgactctgcatttgtcgagatcgttctcgataatgcggtgtactcgactacaacctactcgagtgctcaattgtttcttattgtgtactcgttggacataatatgatctgacatattttggtacgccgcgtatcttgaggcttggatgatctcgatagaccaagttgtcgatgatgatgatggttccgatctcgtcgggagacgtactctggtcgggttggatctccccggtccgaagtcgtcgagtagctcgttggcggagaatccatctcttaaactcatctcgtcgaaatctgttgtcgacatgacggtctgaaggtctgactcgtagtcaacaacagggtagccttcctcctcgagttcgtgcccggcgagatcagagacagcgcaatgtctttcctatcagtatccagagacaccgtaggggactagccgtgcctatccctgaagtcgatatccggcgtcttgtcttggcgtatgttggcttctgttgttttgtagattgtggtgggtgttgaatgtccatgttgatcgtccccccctcctagggggccttatatttatacccataggtgtccccctgtttaagtaaaattagggaaaccaatatggaaacaatccgagtagtccttgtagtttacat

SEQ ID NO: 19728 - DNA, 598 bp, Oryza sativa
  unsure (1)..(598): unsure at all n locations
  Clone ID: PAT_MRT4530_25160C.1
ccggccgggataccaccgccacccgcagcccctcctactcccctctccaccgctgcggcatcgtggcatcctccccctcaacggtggtgactccggcgggctgctctgctagctgggacaacgatggctcccatgggcagatctgtcggtggcgacggcggagactgtgcagatccataggctgcggcggcggtggctcccgcgctcggatttgtcagttgcaacgacgatggctcccgtggccggatccattggttcagatgacgacaagcatgggctcccatgagcggatccggcgatgtctcccgcagatggatccagtggcgtcgatggctctcgcacatggaggcagcaatggcaacctcggcgccccaatgagcgatggcggcaggcggagttctcgtctgcagggatgttgttgttagatggattgatgggtgatttgtgttttgtgatttggaggatgttgttggataaatcgatggtggtatgggggtgatagggagcaanttaatttaagccgatgcattgagccagcgttttttttttccgcattcggggaacctcaaaggtgctagtttttaaactgaacctttgg

SEQ ID NO: 19729 - DNA, 1026 bp, Oryza sativa
  Clone ID: PAT_MRT4530_25161C.1
atggtccgcgcgcacggaggaggagacggaagggaggggccgaccgggtctgttgactcggtcgtgccgaggtggcgccgacgtggcggcagccacgcgggtcggcggaaggaagaagacgaggccggccgggatggacggcggatggcggcggcgttcgcaggagcaaggcgcgacctcaatggaaaaaggaagcacaccgggggaagggaagagacgagacgaagcgagccgacggctcggattcgccggaggatggccggaatccggcggattgtggcggcggcaatcgccggcgagcaaagaggggaatcacgacgagacgatgagggttcgattcaaagggggtggagcatctccggggttcaaggaatccgtttccgggagctcaaggacggtggtggcgcgatatggcgagaatttgggcgaggagctcaccggcgtgcgggaacggtatcggcggcgatttggggatggaaaggggtggaaggccgatggcggcacgcgaccgagcggcgacgcacggcggatgacgccgaggcggcgcggcttcgaggcgagtgcgccggggaagaagagagggagaggtggcgcccggagctcctcgtcacgcgttcacgctcgcaccggctcctccggtgctcggtgacggacgacgacgacgagagcgggacaagcggcaacaaggcggcgatggtggttcggtgtgagaaagcggcgacggcgtggatgcaagggcgcggtggtggcggtggatcggacggcgagaatcaaaccgcgagcgcgggctggcgcggtcaaggtaatgaggcggtcgcgggctcgcggtctccggcgctaggcgccattggcggagcagtgtgccggtccgggaagagaaaaaggaaaagggtagggtggcactgcctctctgctttggaagctagcggtggagccatggatgacgtcgacgatgacggcggcagtcggtttggcatggagcgggggcaaggcggcagcgcgtggcgtcggcggcgcaagggctga

SEQ ID NO: 19730 - DNA, 983 bp, Oryza sativa
  Clone ID: PAT_MRT4530_25162C.1
tcaaagattactttgacagttcttatttaaagtttttctagtttgaaggtcagaaacttgtttggcgccacctgttgttggctgatttgaaatgatcatgtttgcaacatgatttctgttatgtgaggaaaatctgtggttttctggagcatcctttgttcctgagagctgtttctgccgcagacctgccgcagatctgccgcagacctgccgcagacttttagtctgcggcaaagagtatgccgaagtatgcggcagaaagaaattttgctgcagacttgccgcataccagtatgccacaggaacagtctgcggcagatctgcggcaggatgaaattttgctgcagacttgccgcatactagtatgccacaggaacagtctgcggcagatctgcggcaggatgaaactttgctccagacttgccgcatactagtatgccacaggaacagtctgcggcagattagtatgccacaggaacagtctgcggcagatctgcggcaggatgaaattttgctgcagacttgccgcatactagtatgccacaggaacagtctgcggcagatctgcggcaggatgaaactttgctccagacttgccgcataccagtacgccacacgaacagtctgcggcggctcggccgcagcaagtccccggcaggcctgccgcagactcttcatcatactgaaagagtatgcggcaagtctgcagcaagtctgcggcagacttgccgcagactcttcatcatactgaaagagtatgcggcaagtctgcggcagacctgccgcagactcttcatcatactgaaagagtatgcggcaggtctgcagcaagtctgcggcaggtctgcagcaagtctgcggcaggtctgccgcatactcttcatcatactgaaagagtatgcggcaagtctgcggcaaacctgccgcaaaccttatcttactctgaaaaagaacacggcatggcgcaggcctgcctgtggaat

SEQ ID NO: 19731 - DNA, 264 bp, Oryza sativa
  unsure (1)..(264): unsure at all n locations
  Clone ID: PAT_MRT4530_25163C.1
caaagagaccacaacgattcacaaggtgagctagtttattttctgcaacaaggaaaccacatggtttctgatttttgtgtgttgattcgaatgaggagtggtggtgtactatctcatttttttttcttaaacactgtgctttcagatctgagacaaaggtgattngtggaatgaacaaagtcatatgtctttcttagacaccatgcttttcaaatctgagcaagggtcatttttgtggaatgaacaaagcgatatgtcttctta

SEQ ID NO: 19732 - DNA, 1860 bp, Oryza sativa
  Clone ID: PAT_MRT4530_25164C.1
atgtcgtactacgtagatcctggtaccaacggaccccaataccctctatatccgatctacgggtatccactgtcgatagtggcgcgccaagtagggagacttggtgctcaaggttctactactatgacttcaagccttctcgacgacaacgtcaacaccggcatcgaccaaggagtttcaacttcgacgatgctgatgtggactcaagtaggtgaaatcgtcttcccggtcaacaccacaatgccgatctcgactggcgcagcaattatcggtagtgagaacagcatgattacgaccccggtcgactccatgtcgaaagatcttcccgcagaagcggagaacggaacgtcgacaatatccaagcccgagaaggatcctaatgcggccaaatcttgtcctacccacaagaagcacgagcctacaaggacaacttccggggcgactaaagcttggtgtccactccacaggactagcaagcacaccttgcaagcttgctcggttttcctcagcgtacaagctgaaatctgtgcctgcaaagagcgtggaattcaacgtatttctccaactcgtgatgtctattgtcctatctataaggcaaagactcacgacctctcaagctgcaaggtccttctcagcgccatgaaggtgtcatcccctaaggtccagcaatcacaaatctctcctagagatacggacaaggaacaaggtgcggcgactactttagatcgattcgtcggggtaatcgatatcgatccccacgagccatctgtcctacatctactcgaagacctggcctcatcatcaacaagtacaccacgcgacgtgtacgctatcgatggaaccagcacatctagaggcggcaacacaggaatggaggatcaatcggttacgccgacgctggcccaacatatcagaaccctcaatgcgatattgagcgaaagccccttcgatcccgtcctgaacgctgatctcgatcaatgggcagaacgactacgggaatcagtggctaaccttagtaacgcattcgcagaggccgccaagcgcgactcactcaagataatgaaaaccattcccgacatcgcgtctcttcgtgacatcgcaagaacggcaaacaaggaggacatccgagcgagaaccgagaccgtgatgatcgccacaaccgccgcgaacatactaatcgcgagcagcgggtgccgggcgataccagtcgaggtcgacgccgtgacaatgacgacgacgaagatcgacgccgggacaacaacgatgggcgacagcaaggctcacatactcgagcgtcgtcctcgaaaccgcgccccggaaccaagtgactcatcatcatcatcatcatcttcgtcatcttcatcggacagacatccgcgacgagcgtatgatcgccgacaacctactgcccctggcagcgggtgcagggctttcactcgtactctgcgagatgttcgatggcctgagaagtttcgaccgggagcaatagagaaatacgacggaagcaccgaccctgaagaatttcttcatgtctattccacagtactctatgctgccggagtagacaacaacgcattggcgaactacttgccggctgcgttgaagggatctgcacgttcatggctggttcaccttctgccctactcaatttcttcgtgggcagaactgtggcaacagttcgtcactaacttccaagaaacatacaagcgccacgcgatcgaggacaacctacacgcgttgacgcagaatccgggcgagtcattgagggactatattcggcgctttaatgagtgcaaaaatacgatccccgaaatcaccgatgcttctgtaatccgcgctttcaagtctggcgtcaattaa

SEQ ID NO: 19733 - DNA, 1837 bp, Oryza sativa
  Clone ID: PAT_MRT4530_25165C.1
atgtcgtactacgtagatcctggtaccaacggaccccaataccctctatatccgatctacgggtatccactgtcgatagtggcgcgccaagtagggagacttggtgctcaaggttctactactatgacttcaagccttctcgacgacaacgtcaacaccggcatcgaccaaggagtttcaacttcgacgatgctgatgtggactcaagtaggtgaaatcgtcttcccggtcaacaccacaatgccgatctcgactggcgcagcaattatcggtagtgagaacagcatgattacgaccccggtcgactccatgtcgaaagatcttcccgcagaagcggagaacggaacgtcgacaatatccaagcccgagaaggatcctaatgcggccaaatcttgtcctacccacaagaagcacgagcctacaaggacaacttccggggcgactaaagcttggtgtccactccacaggactagcaagcacaccttgcaagcttgctcggttttcctcagcgtacaagctgaaatctgtgcctgcaaagagcgtggaattcaacgtatttctccaactcgtgatgtctattgtcctatctataaggcaaagactcacgacctctcaagctgcaaggtccttctcagcgccatgaaggtgtcatcccctaaggtccagcaatcacaaatctctcctagagatacggacaaggaacaaggtgcggcgactactttagatcgattcgtcggggtaatcgatatcgatccccacgagccatctgtcctacatctactcgaagacctggcctcatcatcaacaagtacaccacgcgacgtgtacgctatcgatggaaccagcacatctagaggcggcaacacaggaatggaggatcaatcggttacgccgacgctggcccaacatatcagaaccctcaatgcgatattgagcgaaagccccttcgatcccgtcctgaacgctgatctcgatcaatgggcagaacgactacgggaatcagtggctaaccttagtaacgcattcgcagaggccgccgtgagggcgccaccagaacaaacgtcgaccggcgacgctaatggggaacagcctgattagcggacgccactgcgtcaagctacccctccaccttgcggcaccagtgatctccgcaaccatctaaatggccgccgagaagcgcgactcactcaagataatgaaaaccattcccgacatcgcgtctcttcgtgacatcgcaagaacggcaaacaaggaggacatccgagcgagaaccgagaccgtgatgatcgccacaaccgccgcgaacatactaatcgcgagcagcgggtgccgggcgataccagtcgaggtcgacgccgtgacaatgacgacgacgaagatcgacgccgggacaacaacgatgggcgacagcaaggctcacatactcgagcgtcgtcctcgaaaccgcgccccggaaccaagtgactcatcatcatcatcatcatcttcgtcatcttcatcggacagacatccgcgacgagcgtatgatcgccgacaacctactgcccctggcagcgggtgcagggctttcactcgtactctgcgagatgttcgatggcctgagaagtttcgaccgggagcaatagagaaatacgacggaagcaccgaccctgaagaatttcttcatgtctattccacaaatccgggcgagtcattgagggactatattcggcgctttaatgagtgcaaaaatacgatccccgaaatcaccgatgcttctgtaatccgcgctttcaagtctggcgtcaatttttgcaaacacaccaccttagtcatcatgcgaaacagtgtcacgtta

SEQ ID NO: 19734 - DNA, 535 bp, Oryza sativa
  Clone ID: PAT_MRT4530_25166C.1
ctctctcgagatcggcatcttagagcaaacgatcacagcaacgcctgagtttctagggcttcgatcttgggagcacacttcgccaaaatgaatgacgcagatgtttccaagcagatccagcagatggtcaggttcatccgccaggaagccgaggaaaaggccaacgagatctccgtctctgctgaagaagaattcaatatagaaaagttgcagctggttgggggcagagaagaagaagatcaggcaagagtacgagaagaaggacgaagcaagttgaaattcggaagaagatcgagtactcaatgcagctcaatgcttctcgtatcaaagttctgcaagctcaggatgatgttgtaaacgacatgaaagaggcagcatcaaaggagcttctcagtataggccaaaatgaacatgtctacaaaaatcttttgaaggatctcattgttcagagcttgcttcgactgaaagagccagctgttttattgcgatgccgcaaaagtgacgtctatttggtagagtctgtgctgggttcagc

SEQ ID NO: 19735 - DNA, 2499 bp, Oryza sativa
  Clone ID: PAT_MRT4530_25167C.1
gggggaaactcaacatgtgtgcttacaagttcacggccgaaagatccatgtttacttacatatgcacagaatgtagtacggaaaggacaaaaagatacaatatgccaagtctacatcactcacgaaactacaacctttacactgaatgtggaacgagactgaattttttttctagggtaaaaattaagtcagctgaatgcttgggtcaaccaaaacttcttcccaaccctatatccaaagaaccttgtcgtcctaagaaactgacaacaattagaacctcattgtaacattcactggtcgccgagcaaaaatccttcagcttcacacactaaagaatctagtcttttgttgcaaaatttagcagtctacccttgacacatactagtcctggaaggcccacgcgttctccttgcggatctccgcctcctcctcgggcgtgaagtcgttggcgatgttgaactcggccctgatctcctccaccgtcttccccctgatcaggtcggccgcgcgctggcacgcgagggccagcaggcacggcacgttgaggtagttcgcggccaggatcaggtcgaacagcgtcgcgttgtccacttcgatgaacgccgcgtcgaagctcttcagctcctccacctcctcgccggcggcggcggcggcggcggcgtgctcgctgcagtactcgagcaccttggcgaggacggcggaggggacgttggggagggggacgccgttgtcggtgcactcgtcctcgaccatgttgcgcaccagcctcgacatgctcgccaccgcctgcgccacctcgaatctctggccgtcggagctgatcagcaggatcatgtcgccggcggcggcggcggcgccggcgacctcctttgctgctgcttccgccattggagattttggtttagttttctcgtagaacacgcgtgtgaactgttgttgatcacggacgaactcgttgaagcgtctgtggtgctcgacgatctgtttggaagtcagttttcggtaaacgggtgaggtgtgatttttacctcgaaagtctggagcagggtaagtataaatagattgctttggtttcctcagtctgatttgcccgtatctacccttgtgccctgcttgtacagcctcctgaaattccaaccactccatgctcttgttaacaaagatgcgcccaagcaatgccatgtttggccttatggtcttcatattctcaaaggtacggtgagccatcagtgcgttgtgcatattcccaggagatgcagagatgaaaatgtcgctgtgcatgctgatatagtagtcaagagctgctagaacagaagccttgccttcaacattagtcagctcctcttccgacgcaaggctcctcttgtccttgtgagaggctagatagattcgagttctgctgtcaaatccaagagctgccagtaacagcccaatttcttctggagtcaatgggcagcgtcccaagttccgaagctcctcatcagttagctgtgaatttaataccctcccttgccagatgacttgtctgtacttagccagagctaatctctcagctctgccaccaccgaagtcacaagcagaatgtgcagccatatccttatcaaaacggagatgcaaaactgcatattttccggcttggtttgtgtcttctccaacttcttggataagttcaccagattggccctggacgggagatctcaagcgtttcacaagagtctcccccagtgagataatgtgaggcaggaaaacaagagcttggaagttaactttgcaacgcagatgctgaatgtccacaggcaagtcatcaaatgcaagacggtgagaaaagggggcaatggcagcaatgccatagctttgaaggataggactgacattctccagataccaacttgcagaggcatgaacaggtgcggtttttattcttgtagcacggatgcctgtaccatagtactctcttgtgctccaggaaaatttttttgggagaactttgactattgaaacttcagcttttaaggtgttgataaaatgatccacatcaaaaatttcttcaaaggagcttgtgtctttccaaacaggatttacttcaagatgtgggatcacaagagacgcattcagaattttagcaacagcaaccgcatcacatatccccattctttgctgattcagtccaccatcaagaaatacttggatatatccagtgggttccaaaggtaccccgtgaacacttgatgacttcaagcatggtttccaaccttggtacggcaatggtgaccacagctctctcttttgttcgtttgaaattgttcgccgcaaagcctcattcagaagagactcatgcattggcttaggggcattccactccgagaagagggaagggaaggcgcggccaagcggggtgaagatcgcggggaagatggacggaagtagcacgacgacggccgccgcagcggcgagcgccgggcccctcgccgccggcggcgaaggcgacggcctccgcat

SEQ ID NO: 19736 - DNA, 975 bp, Oryza sativa
  Clone ID: PAT_MRT4530_25168C.1
agttcaaccctggtggaaactaacatgtgtgcttacaagttcacggccgaaagatccatgtttacttacatatgcacagaatgtagtacggaaaggacaaaaagatacaatatgccaagtctacatcactcacgaaactacaacctttacactgaatgtggaacgagactgaattttttttctagggtaaaaattaagtcagctgaatgcttgggtcaaccaaaacttcttcccaaccctatatccaaagaaccttgtcgtcctaagaaactgacaacaattagaacctcattgtaacattcactggtcgccgagcaaaaatccttcagcttcacacactaaagaatctagtcttttgttgcaaaatttagcagtctacccttgacacatacagtctggagcagggtaagtataaatagattgctttggtttcctcagtctgatttgcccgtatctacccttgtgccctgcttgtacagcctcctgaaattccaaccactccatgctcttgttaacaaagatgcgcccaagcaatgccatgtttggccttatggtcttcatattctcaaaggtacggtgagccatcagtgcgttgtgcatattcccaggagatgcagagatgaaaatgtcgctgtgcatgctgatatagtagtcaagagctgctagaacagaagccttgccttcaacattagtcagctcctcttccgacgcaaggctcctcttgtcctccattagggggaaaagtttgcgcaggctagaaattctggcttccccgccgtataccttgtgagaggctagatagattcgagttctgctgtcaaatccaagagctgccagtaacagcccaatttcttctggagtcaatgggcagcgtcccaagttccgaagccggacgtcagttagctgtgaatttaataccctcccttgccagatgacttgtctgtacttagccagagctaatctctcagctctgcc

SEQ ID NO: 19737 - DNA, 192 bp, Oryza sativa
  unsure (1)..(192): unsure at all n locations
  Clone ID: PAT_MRT4530_25169C.1
ggggtgtggtacgggggtgatacaaaaacaactttgctgtgggcaatcgaatctggntttcttgaaaattactgacatacataccctactggaatactactactacttcttctactactactactactactactacttcttctacttctacttctactagtttttatcttcggagctnnggtgaagatcaag

SEQ ID NO: 19738 - DNA, 342 bp, Oryza sativa
  Clone ID: PAT_MRT4530_2516C.1
atggcgtacgaggaccgctgcgttattgctgtagtcgtacctcgaccatctgaggttgcggtgcgggagattgctacgtactggttcgagaaccagcgagcaagtagaaccatctctcgaacacccatggaggttgcggtgcgggagattgctacgtactggttcgagaaccagcgagcgagtagaaccatctctcgaacaccaatggaggttgcggtgcgggagattgctacgtactggttcgagaaccagcgagcgagtagaatcatctctcgaacaccaatggaagtttgcggtgcgggagattgctatgtactggttcgagaaccagcgagcgagtag

SEQ ID NO: 19739 - DNA, 1701 bp, Oryza sativa
  Clone ID: PAT_MRT4530_25170C.1
gcacgagggcctcgtcttctccggcgagccaccggcgatgggaagtcgcagcggcggccgccaccgactcttcctccgattcatcgccctctcgtcgctgctcctcatcgccgccggggaggtcatcttcgaggagcgcttcgaagatggttgggagtcccgctgggtgaagtctgattggaaaaggagcgaagggaaagctggaacgttcaaacacacggcaggaagatattctggagatcctgatgacaaaggtatacagacaacgttggacgccaggcattttgctatatcggccaagatccccgaattcagtaacaagggccgtacattggtactccagtattccataaagtttgagcaggatattgaatgtggtggtggatatattaaacttatgtctggttatgtcaaccagaagaaatttagtggagacactccatacagcttaatgtttgggccagatatatgcggaactcaaacgaagaagctccatcttatactttcttatcaagggcagaactaccctatcaagaaagatctgcaatgtgaaacagacaagttgacgcatgtttacacattcatactaaggcctgatgcgtcctatagcatactagttgataaccgtgaaagagaatcagggagcatgtacactgactgggacatcctccctcctcgcaagattaaggatgttcatgccaaaaagcctaaggattgggatgacagagaatatattgaggatccagatgcagttaaaccagagggctatgattctattccaaaggagattcctgatccaaaagacaaaaagcctgacacgtgggatgatgatgatgatggcatatggaagcctagaatgataccaaatccagcatacaagggaccatggaagcgcaagaaaatcaagaatcctaactacaagggtaaatggaagatcccatggattgataatccagagtttgaggatgatccagacctatatgtgctgaaacccttgaaatatattggaattgaggtttggcaggtaaaggctggttcggtttttgacaacatcctcatttgtgacgatccggaatatgcaagaaaagctgctgaggaaacatggggtgcaaacagggaggccgaaaaagaggcttttgaagaagctgagaaggagaggaaagctagagaggataaggaagctgaacgagcaagggaggaaggagagcgacggaggagagagaggggtgatcggcaccgtggcagggattacaaggacagatacaaaagacgtcatagggatcactgggatgatgactaccatgatgagctttgaaatcacggaaaaatgctttcttcctaggagaagctggaatttgcatggtcattgcttataattgttaccaataaatgatctgggaggccagaatagccgcaagtgttccttgctgcgtgtgctgaaaatttgaatatccggattggaatgaaatgaacaaaagcctgaagatcattccttttggacagcagggcatacgattctacttaccagcaacacgttgtttttagttgtgaattggtgaaatgttgacgttgtaacgttgcgacttgcgaatataatgtgcacggggtgatgttctgccactttttgaacactgaacattttactgcatatcaagctagcaactgcaagcagcttcctgccaaaaaaaaaaaaaaaaaaaa

SEQ ID NO: 19740 - DNA, 482 bp, Oryza sativa
  Clone ID: PAT_MRT4530_25171C.1
cgccttttcttctctcccctatcctccgctccgagggagaaaaaaaaacaaagaaagaaagaaagaaagaaaaagagtactagtagcacccggagagtggaggaaagggagtaggcggagccaaatctcgtttctctttagttgttgttagtacccttagtggaagaatctctccccttttcttgtgtttcttgggttttgaagttttttgttgttgggaggtatgaggaatgaaggcctaacctgaggcaagatcttcgttttccttcatttgtgggggtgtttgttggtggaaacggatcaagaaaagccggaatttcggttctgaaatcgtcggttttgatatcggtttctctctgttgattggagagagagggagagagcaaacgcatgatctgtgtctgattctgacgggccttgtcgcggtccgtatcagttcatccatcccaacttgctgttcgttttgtgtggtggtgtttcgc

SEQ ID NO: 19741 - DNA, 291 bp, Oryza sativa
  Clone ID: PAT_MRT4530_25172C.1
atggagcttcggcggccgtttgaagtcagcagtgtagcagtttccgacgttccggaggagagcgttttcattgaggaaggttcggaagtgtttgaagaagctcaaggcaatggcaagaagttcgtgggggtcgctggggagtccattgcctctggttttgagggggagattatgatccaggaacggtgcaatgtgtggtacatctatggccagagtaaaactatacgaatagctgtgcccgcggttaaggaggaggagtacttcagtgaaggtgattttcaggaggattag

SEQ ID NO: 19742 - DNA, 240 bp, Oryza sativa
  Clone ID: PAT_MRT4530_25173C.1
atgggcatcgacggttccgttcctcctgacacgccgaggaggcaaacaggctgcaaggcgcgctcggctcagcgtgggagggggagagatgggcgtcgtaggccccggtgcgacgtgcagcgccgtgggtgggaggaggcaatgcggttgctgcggtgtgcggatgaaggaaacagtgaagaactcactgctggattaataccggctggcccatggttcaccttaccaagggagtcatga

SEQ ID NO: 19743 - DNA, 892 bp, Oryza sativa
  Clone ID: PAT_MRT4530_25174C.1
aaatcacaagagggggaaaaagaagataaaaaaggagagaaagaagccgtcaaaggtagtgggggcggcggcgccttggaacttgttttttttttctcttgtggcgatctgtgcgaagaaatcgaagaaccctactacctctgttcccccagattcagcgtcgattccccaaattggctcccgcggccaggctgagatggttttctgattgcggattggagtgatgaatttgagaccagtagttctcatcttcctcctgcttgtgctcattatcacatcacagtttgaatggaagcagcaggttggtgaggctgaggcaaacccagcagctacacggcgaaggcaacaagtaatactaagggaagatgctgttaaagagaaaataatattggcacaggagaaaaacattcaacagctaaatgggcttattcaaagccttcagctgcagctactacattgccgtctcagtaatagtactgctcacaccacctcaaataagtcgacgaacaacagtgcagtggagggacataaaatgattgatgattaacctctcagctgtacttgtaatagcataataggttgctaacttgatggtatacagccagctcaagagcaggcatctttgaggcaatgaatacctttatcgtcatcatccagtaggacggaagtaaggcatattgttttatgtattgaagctgcgtgcttagctttttctagcattatcattgacagtattatcctttttttttctgcacaatcttgtacaggattgtactatgtaccatttttttcttacttatgttgtatcataatgattgaagttactttcctgattaactaccaaatatatagtgcagatgtttcatctgaaaaaaaaaaaaaaaaaaaaaaa

SEQ ID NO: 19744 - DNA, 247 bp, Oryza sativa
  Clone ID: PAT_MRT4530_25175C.1
ctgccgtgccgccgtcgcctcgagcccgccccgccgtcgcgtcgcccgtcccgtcgccgcgcacctgtctcctcgccgcagcccgagggagttgtggatccaagcgaaggtcaagacccgcaagactttgagcaaggcaagtcatcactatcccttgaacatgttgatcccaattgcgaaattatttttatttacaaataagattgcatgcaatgatgaacatcctatttgtaaatatgccatacct

SEQ ID NO: 19745 - DNA, 1723 bp, Oryza sativa
  unsure (1)..(1723): unsure at all n locations
  Clone ID: PAT_MRT4530_25176C.1
tgtctccatctgtgcacggagggattcattgtccctccggccaatttcccggccggccggaacggcggaacctcgtccatgatcacttgaaacacctcccttgctcttcatggccatggagacgacgagccaagattcgcaggtgatcatgggccggtacaagctcggccggctcctcggccgtggcacgttcgccaaggtctacaaggcctataagttggccaccggcgaggccgtcgccatcaaggtgttcgacaaggaggcggtgcagcggtccggcacggtggagcaggtgaagcgcgaggtggacgtcatgcggcgtgtgcaccaccgccacgtcatccgcctccacgaggtgatggctacgcggtccaggatctacttcgtcatggagtacgcgagcggcggcgagctcttcacccgcctctcccggagcccgcggttcccggagcccgtcgcgcgccgctacttccagcagctgatcaccgccgtggagttctgccacagccgcggcgtgtaccaccgcgacctcaagcccgagaacctcctcctcgacgcccgcggcgacctcaaggtcaccgacttcggcctcagcgcgctagacggaggcctccgcggcgacggcctcttgcacaccacgtgcggcacgccggcgtacgtcgctcccgaggtgctcctgaagcgtggctacgacggcgccaaggcggacatctggtcgtgcggcgtgatccttttcgtgctcctcgccggctacctccccttcaacgaaaccaacctcgtgatcctgtaccggaatatcacggagagcaactacaggtgcccgccgtggttctccgtcgaggcgcgcaagctccttgccaggctgctcgacccgaaccccaagacccggatcaccatctccaagatcatggacaggccatggttccagcaggcgacgtgcccgctcggcgacatgtccctcgtcgcgagcgcgccctcggtgctgcttgccagaaaggaagccagccagcagcacgacgacgaggaggacgatgggtttgcacgggagaagaagaagcggtccaatgtgatcatgtcgtcgccggtgatcgacgtgaggccctcgagcatgaacgccttcgacatcatctcgcggtcgagagggctggacctgtccaagatgttcgacgcggaggagcgcaggtcggaggcgcggttctccaccagggagaccacgacggcgatcgtctccaagctggaggagatcgcggaggcggggaggttcagcttcaagctgaaggagaaagggagggtcgagctggaggggagccaggacgggcggaagggcgcgctggccatcgaggcggagatcttcaaggtggcgccggaggtgcacgtggtggaggtgaggaagaccggcggcgactcaccggatttccgggacttctacaagcaggagcttaagccgtcgcttggcgacatggtgtgggcgtggcagggaggtgattcgccgccgccgctcgtgccggcggcggggaggaggccgatcacgaagcgctcttgatatgccgactcgatatcgaattatcacgttgtaattgatacgctctctgcttattgatctctcgtacgtgtttgtgaagggtgatgggtgaaccaccgtccagctgatctgtgagtttttaaaagcacgaattacatttaaattggcattccgctgtcaaaaaaaaaaaaaaannaaaaa

SEQ ID NO: 19746 - DNA, 573 bp, Oryza sativa
  unsure (1)..(573): unsure at all n locations
  Clone ID: PAT_MRT4530_25177C.1
ccacgcgtccgctccgacgcgatcaccctaaacttctcgatctcctcctcctacgccgccgccgccgccgccgacgacgacgacgacgatgacgtccgacgcgtcgccgcagcccatccagagcgccaagtcagccgtggagtccctcgccgccgtcctcggtgccgcgctcccgggcaccctcgcctcggccgacgaccccgcgaacgcgctcctccacgacgccggcgtcgcccgcgccgtggntggggcgcctccgcagggaagggtcgggcgccgggaacgacgggctctgccggtggctctacgacgcgttccagtcgaacctcccggagatccagctcgccgtgctccgcttcgtcccggccctcgccggcgtgtacatgtcccgcgccgtctcgaggaagccgctcgccgggttcgaggccgtgctcctggcgctgtacgcgcacgccgcggcgcagcggggctccggggaggccgagaccgtgtcgctgccgaacctggccaaccccagcgtgtaccacgacgcgaaggtgcccgcccaagaccaaggccggcgagctcgacgtc

SEQ ID NO: 19747 - DNA, 1410 bp, Oryza sativa
  Clone ID: PAT_MRT4530_25178C.1
atgcacacgtcgaccaagctccggatccccacgtcgcagcagcagcagcttgacgcggcgattatggacggcgcgcaccgctcgccggcggcgaggccgccggcgccgccgcggtccaagatgaagctcctactcctcgtcatcgccacgaacctcgtctccgtctacctcttctccggcgcgtcgctgtcgctccgcctgccggcgggggcggcggcgccgagcatccacctctgggactcctcggcgctgctgcgcgacctcggcgccacgcgcgcggcgctcgccgcggcgcgcgcggaggtcgcggcgctccgcgcgcagtgcaacgcgtcgtcgctcctcctcgagtccgtgctcgccgggctcggcgccgcccacggggacaagccggcggcggcggatcggggattcgacgggtggcccgaggagcccaccggcgagctcaggctcgccaccgagccgcaccggctgccgctcgggttctccgccaagctcggcaccgacgagctccacccgggcgtcggcttcgcgtgccgcaacttccaggacgagctcgcgcggtacatggcgtacgacgccggcggcgagtgccccgacgacgccgacgccctcgagctgcagctcatcctcaaggggtgcgagccgctgcctcgccggcggtgcaggccgaggtcgccggcgaggtacgtcgagccggccccactccccgggagcctctggtccatcccgccggacaccacggtgaactggtccccctacgcgtgcaagaactacacctgcctcgtcggccgcgcccgcgccaggggcggcggcggcgggtcgtacgagtgcaaagactgcttcgacctcgccgcgggcgggaaggagcggcggcggtggatgtccgacaacggcgggcccgggttcagcatcgacggcgtgctggcgtcgcgggcgcccgggacggtgcgcgtcgggctggacatcggcggcggcgcgggcacgttcgcggcgcggatgcgggagcgcggcgtgaccgtggtgaccacgacgctggacgtgggcgcgccgttcagcgcgtttgtggcgtcgcgcgggctcgtgccgctgcagctgtcactggcgcagcggctgccgctcgccgatggagtgatggacatcgtgcacgcgatgcagctcggcgggtgggtgcccggcgccgtgctggagctcgcgctgttcgacgtgtaccgggtgctccgccccggcggcgtgttctggctggaccacttcgcctgcgtcggcccgcggctgaacgacacctacgcccccatcctggaccgcgtcgggttccgccgcctccggtggaaggccagccgcaagctcgacctcggcgccgagaggaacgagtggtacctctcggcgctgctcgagaagcccttgacatga

SEQ ID NO: 19748 - DNA, 906 bp, Oryza sativa
  Clone ID: PAT_MRT4530_25179C.1
atggtgaacgcaggcaaccaacgcgaacgcggggtgcttctccgggccgccgcgccgcggaggtgggagttatacatgtcattgctcatgattgagaagtttgctgtacgtttcccacagccttgtgatgcagagtcattcttgaattgtgtgaaggtctatacatcaggtgttcttcaagatggtaaagaaaacaccatgttctgcttatttgtcttgtctcttttaaattctattcatgacctatcaagaatgtttgacacagttgttgctgctaaagaaatgactgctgataaagttgaaggcgctggtaaagagattgatattaccataaaaagaggtattatgccatctataaaggcgggcgatcatctgcctgcgaaaatgcacagtttggtgttgatggaggaagctgctgtgaccctcgccaacctggagatcaaaggacaaatgagttggacctccagcattgctgtggaacaaacaggtcgcctctttggttctcagacaacattgataccatcatgctgccgccgttctgcaatggtcatggcagagccaagcgcggtcgggtccctgggtgtgtcagctatctgctggcacacggacatcgtggtggcaacccggatcgctgcagggatgaagccgtggagcgcaatgccaactggatctccctcggaaggcgcgagcacacaccgtttgccggtttctgatgagcaggagtgctatccggctagccgccggcggagggttctggcctctcccatccgcccgtgcattcttctccgcgcgggggagctgcctgacgacagtgatgtcgttttagctcaatcagctatggatgggaaacttcgttggaacctttcttttgtcagatatggaacagatattgctcttgcgtattaa

SEQ ID NO: 19749 - DNA, 2639 bp, Oryza sativa
  Clone ID: PAT_MRT4530_2517C.1
atttgtcgatagaggaatggaataagatatacgagctagaagaaaatctagaacacatgtatgagatggaagaactttttttggcacaaaagatgtggagatcaagagttgctgaaggcggaaaaagacacagagtttttccatagtatgggcaatggaaggaaaaggaaatgtacaattacaaccttagaggatgatggtagagagctgacaaccaaagaagaattaactaaaaacatcctagactattacaaatccctgtttagagccgatgaaaaccctataattcaattgtttcagagggtgtggcaaaatgagtaatgtctaaatgaggagcagagaatccagattatttgacctttctgtattcaaaagttggataaggtgttgaaagaagcaaaactgaacactgcccaaggccctgatgagttcagtatcctcttttatagagccttttggactgaaattaggaatgatctatatgagatattcataatgtcgacgggtggtaccgcgagtacggcgtgattattctgatgtctgattttcctgaaatcaatactcagaacatttaccgtacttgcttagtcgatcccggtgtagaaccgtagaaacatggagtcgtggtacgaggatcgctgcgttactggttaaagaccagtcgtagtcgtacctcgagcattagaagtcgtggtgcgaggattgctatggtgctagtcaaagaatcgctacgatctattggtcgaggactaagtgtaggcgtatctcgatcacctgaagatgactttttgggtggtgagagatcgctaggatctactggtcaaccaggtgtaggcgtatctcgatcacctgtaggtaactgataggcatacggaaacaaaccgtattcgcgaaaacatctcttgttatccatgactacccttatcaatatttgccgtactcacttggtcgatcccagtataagaccgtagagacatggagtcttcgacatcaatatatggagtccaacggtctacaagtgaatttaaattgataggcagcgagatatgctgattttcactggaggatcacacatttgcatatgctgatgacactgttatttttatcccttttgatatatacctcccaagtgataaccacaaaatttttgctatactgctttgaggaaatggctgggatgaagataaactatcacaagagtgaagtgtttacggtgggattggagatgaaggaaacaaagaaagtagctcaaatgctgaactgtcttattggcaaattctctatgaaatacctaggcctttccattggaccttttagaatcttaaaccatgagttgtctttcttagctcaaaagatggagaagggattcggatcttggaatggctgcaacctctcccatgcagggagagcagttcacatcaatgcctacttatcttccttcccctcctaagcaattggtttttatcagttacctaaaggggttcatcatcagaggtttgatttagttagagagagatactattgggctggtgacaagcaacataggaaatatcatatggtgaggtggatagacctagctttccccaaagagtttggaggcattggcctcactaagactaggattttaaatactgctttgctagataagtggttaattaagcttgtgtattgaaatgttgagaaagaaatacttgtagtcaggaggggtgttccaagtggtgcagtgggagtttcaaaattctggagagggattctaaatgtcagaaaatgtatgaaacttggctcaaaatggcaagtgggagatggatcacatatctggttttggcatgatatctggtatgaatcttgccctctcaaaataaccttccacgagatatatgaggtttgtaatcagcaagatatcctactatctgagttgaaacaaattgagagatgttggaggtttaaccttcagaagatcttttggaatgattgagatggaacaatgggaggagatcagaccaattgtagagaagttagagttgggtactacccctgatattctattctggggtttgacgtactgctgacaagaaatataccgcaaattctatgtacagagctatatcctttaggggggtattaaatgagaaaatgcaaataatatggaagtgtccatgtcctatgaagatgaaacacttcatttggttagctataagagatagaatccaatcggctgaacaactcaagacaaaaggctgggaatgatcatacagatgccaattatgtaatgagattgaaactacaagacacattctgttcagctgcactatggcttccttagtgtggtgtgtgtgtagagatgatctgggctgggggactattccgaacaattttgatgatttatttctgttaattagtcacaaaagttgcaggaaagttaaaagtttatgctgccctgctagcagctgtgtgttgggtcctttgggtgagcaaaaacgatatgatttttagatggaaacttgtatattcgcctctaatatactgtctctcatctttcgcagtggaagatcttaagttgcgttgaagaagcgaggataatagatcagttaacagagaagctgaagatggcgaccgcaagtatggggacgcctagaatt

SEQ ID NO: 19750 - DNA, 218 bp, Oryza sativa
  Clone ID: PAT_MRT4530_25180C.1
acccgtctgtttggcagaagaggaatccggtatggccggcgggggggtgatgagaaaatggcgtggacctaccagtggaggacctagcgtacttcgaccccccagccggcaccgagtgcataccaaaggcgtgcgtggagaccggattcttctacgtggtcaaccatgcagaggaggagggatggctataaatgacttgaatggacagctcactggaa

SEQ ID NO: 19751 - DNA, 195 bp, Oryza sativa
  Clone ID: PAT_MRT4530_25181C.1
ggaaagtgagggaggaggtgccttattagaaaagttatacggtttatcacggcgtataccatccctatgctttacagttcctgtgtaatttagagaggagagagaccggctaagtttactctcttacattccagcctcaagggagggattctcactttttattattggaggggcattcaatatatctgagttata

SEQ ID NO: 19752 - DNA, 314 bp, Oryza sativa
  Clone ID: PAT_MRT4530_25182C.1
ttgtttcgtacaatgcatgatcaagcaagggtgatgttgtccatgaattcgattcaagcattaatgctcaacacatcattcacacatcctctgcaacaagatggagatacacagaccttcacgtgcccctttgcatatgcaactaccatatgatgtactggatcaaggctgatcgctgacgggccaacctaggactcctggtgctttcagcttgcctgaggggcttcaacggtcattgggcaccggactgactggggccgcgatatgaggtgacgccacttggacagggaacgcctgcttgtgcagcacaacct

SEQ ID NO: 19753 - DNA, 1653 bp, Oryza sativa
  Clone ID: PAT_MRT4530_25183C.1
cacaacgtggtacgatcacccatcggagatcgaaaaggtgacacaacccacagaaacccaaaccccccaaaaaagccatggccatgtctcctctcaccaccatcctcctcctcgccgccgccgtcggcgccacctgcgccacctccgccaccgcctcggccgcgccgctccacggcatagcgaacgacctcctcccggagtacggcctcccgcgggggctgatcccggagacgatcgcgtcctacaccttcgacaacgacacgggggacttcgagatccggctgacgagcacctgctacatctggttcggctcccacctcgcctacttcgaggacgccatccgcggccggatcgcgtacggcaccatcacggggctctccgggatccaggcgcagaagttcttcgtctgggtctccatcaccaccatcgtcgcccaccccgaccagggcaccgtcgagttccgggcggggttcatctccgaggcgctgccggagtcggacttcgccgaggtccccgtctgcggcgccggcgcgcggctccgcggcgccgccgggcttcgcacgccagctcggcctgcagctccccaccgtcgccgaggtatagcttattagcttgtgtgtatgagttgctccatggctttcacttttcacatggtgacatacgcatgtgtgtgcccatgcttgattgcccatgtcaatcatttattttccaagcgaggtcctcatttctggcgataaaatttattaataaatttgttctaaaaaaaaaaaagaaagaaaaaaataactcatgcgagacggggtcaggctatagaataaagtgggaccgagctgtactagcgttgatgagaggtgtggtggtatatggcaaaggacccgactgaaagttgccatggaacttcggagatgtcgtggaatcctgagtgtgtaaagggcaagtaccgggctgccgtgtcccatgttttcaggagaagagtcggatcttgaagttttaacctgaatctcgctcgcgcaagcagaaggcgcaaaacgtctcgccccgcgcggtgtccgcaggacgaacccggcatcctcgcaatcaccccatcaatcgagagatcagtatattttttactacaagtttacaaccaactccaaaattaatctaccacgtgagatcgcatcgctccagatccgaagaagttactgcaactaccactacaccaacaactacagcatgtccaacgccccagtggccactggtggtcagttcgtcacgcaccttggctccagaccctgcgacagaatacgtacgcaccgctggcaaattttgttgccacccttactacacaacgtgctcattcaatttccatcggcccggacgatcaagatcgagatggaccaggtggcgatggccatcgaccgaccgatcgatcgccatctccaccaccagcttcgcacatgcgcacacggccgtgacgagacgacgcgctcgggaacagaagaatccaaggcgtttgcatggccattgactagaagcataaaaccatcttgtaatcatgcactactgcaacacacagaacactccagctctcgtcggccgtacacgcagactatatattataaaaaacattacgacggctttttacgattccgtcttacggcaaaaatccgt

SEQ ID NO: 19754 - DNA, 127 bp, Oryza sativa
  Clone ID: PAT_MRT4530_25184C.1
cccacgcgtacgatgaaactagagaagcgtctaggaagacgactaagacaaatcgcccatggaaccctttaaccgagaaggcgccgcggctccgatcttggagggggaggtctaaatggttctcatg

SEQ ID NO: 19755 - DNA, 916 bp, Oryza sativa
  Clone ID: PAT_MRT4530_25185C.1
atgactgccatggaggatgagggcggcgtgcacgagggcgagcggcaaacggcggcgtcgcggctacggctgagcggaggctactacggcggcagctgcgggcgcggcgcacggggcgggcggcggacaccggcgtcgcggcgatggccgagcggaggcgtcgcggcgactcttgggcacaatggcacacggcggcatggggacggacggtggacggcggcgcgcgggggtgcgctggcgggcggaggcgtcgtcgagaccggacgctcgacgaacaacggcgacgaggtagtcgagcagggcagcagcagccacaccggcacgcgcagcccgctgaaccgctcctggcagagcagcaagcagaggacggcacagccggagcacagcgtccggtccgcgcccgcagccgccgccgcagtcgatgccgtggtgaactcgagcgccgccgtattccgctacgcgacccacgtctcgccgtcggagttgaagatgccgtcgccgagcaggtcacggaagacggtgtgccagaaggggggtggccgccgccgctcgccgtcaaccgaagcaacccagccgcgcccgccgtcaacctaagcaaccctggggaagtgaggaagaggggtggccgcagccgctcgcctgcgccgccctgccccgccgcttgcctccccgcgttccctgcctccgccgtcgcctcgccttgcctcgccgcctccgctctcctccccgcgctcgctgcctccgccgccgcactcgctacctccgccgttgccgggaggagagagtgtgtgtgagagatagaagagatagaagagagagagtatgacatctgggtcccacattttttaataaatagaacgttgactggactgccacgtgtatgccacgtaattcaaaaccaccgcggattggatcg

SEQ ID NO: 19756 - DNA, 843 bp, Oryza sativa
  Clone ID: PAT_MRT4530_25186C.1
atgtggaccccacatgtcatcctcactcacctcttcttcctccttttctccctccccatcccccctctcttcatctctatgcaggggcgacagttgacgggcggtggcgagcggggagcaggggtggcgcgcggcagccgtcgggagaggagccccagtgtctccgttcctccgccacttcgccaccgcctcttcccgttcttcctcctcatcatcatcatcctcgtcgttgtcgcctcgttggagggaggtgggcaacgcgcggcgcgcaacgtcaatggcgaagacggagtgggtggggaggacaaagtagaactgatgggagtcgagcttgacgagctcgccgcatggctcgtggaggatgccctcgacgaagcacccgttcttgttgagcacctcgaccacaaagcaacagcgtggaagtcgcagaagatgtgtgcgtggcggtgggacacgttcatcccaccaccgaggatgccgaggtcgaccgtcgccgtcgacgttgttcactgccatggccacggcggcggtgccgctgacgccgggatggttccccagccggagccagccatggcgtccccgtccgccacggaagcggtagcatggggagcggcgccttggctgcggcgtcgatgggaagaaggggaaggggaaggcccttgctccggctggcctgcagcaccgcaatgctccacgtgttccctgacttcctttacgtcgactgcgagggtgcctcccacgacttgcgcgtcctcaatgccatcaaggagatcgaaactcttggtgttcgtccgcgttcttggctgctacaccgctgattccaacgtctacgacctgcaatga

SEQ ID NO: 19757 - DNA, 207 bp, Oryza sativa
  Clone ID: PAT_MRT4530_25187C.1
atgaccgatcgactatggtattggacaattcccatcgtgcttgaattcacccgccattggggacttgtggatgtccatgtccaattgagttgctttctgacgatgtttttttcgctttatgcgtacatgaacgacaacttgataaatatacgagttgcctacgcattcaagcgacaagaggagaggggttgttgcatcagcaatcgc

SEQ ID NO: 19758 - DNA, 528 bp, Oryza sativa
  Clone ID: PAT_MRT4530_25188C.1
atgaacgtgtcccaccgccacgcacacatcttctgcgacttccacgctgttgctttgtggtcgaggtgctcaacaagaacgggtgcttcgtcgagggcatcctccacgagccatgcggcgagctcgtcaagctcgactcccatcctccacgagccatgcggcgagctcgtcaagctcgactcccaggacctcctccagatgggggacacacagttctactttgtcctccccacccactccgtcttcgccattgacgttgcgcgccgcgcgttgcccacctccctccaacgaggcgacaacgacgaggatgatgatgatgaggaggaagaacgggaagaggcggtggcgaagtggcggaggaacggagacactggggctcctctcccgacggctgccgcgcgccacccctgctccccgctcgccaccgcccgtcaactgtcgcccctgcatagagatgaagagaggggggatggggagggagaaaaggaggaagaagaggaggagttccgcctaaggaaggatgaatag

SEQ ID NO: 19759 - DNA, 422 bp, Oryza sativa
  Clone ID: PAT_MRT4530_25189C.1
gctaggtagagcaggacaaggaggaaattaaagatgtctgatcttacagggctgctgagcgtgagagtgctgccaggggtaaaccctgttagccgagatgccagcggcggtgatccctatgttgtgcttcacctggacactcagaaactaaagacaggtgtggtaacgaacacaactgacccagattggaacgaagagctgactgtagctgacaggaatccaaatgcacctatccaggtagaggtatttgacatggacacattcgtttacgatgaccagctgggcgacgcagaattcaacattgacgcgctgatgcaaatcgtgaggatggatccgcatgacatcctcagtgacgccgcggtccacaccgttcgagccggcagacagtgctgtctagcagaccagagtcacattgtgcggga

SEQ ID NO: 19760 - DNA, 1150 bp, Oryza sativa
  Clone ID: PAT_MRT4530_2518C.1
tctcggcgggtacaccatcttttcattccgtattccttgtcgagatccaccaactgttctcgagcgatcgagaaggcgtagaatatggtcgtttgtctctacatgatctgacaaggccttatccgctctgggcgtccccagccgaagttcccttaggttcctcagaggccttgtcaggacggcgtaaagggacagtaggattggtttcaactctaggtgtcgtcgtggtaagggatctctgggtaaaacacttggcaatattgtgtacctgatatcaactttgttggagtagaggaagtgggagaattgctacacctctggtcgagaaccaagtagtagtcgtaactcgaccacttgaagtagaaatagtgggagaatcgctacaccactggtcgagaaccaggtagtagtcgtaactcgaccacttaaagtggaaatagtgggagaatcgctacaccgctgattgagaaccaggtagtagtcgtaactcgaccactagaagtaaatgtacgagagatcgctacgattgactgattgagaaccattgagtaggtgtctctcgaccatggtttgagaaccagcgagcgagtagaattatctctcgaacaccaatggaagttgcggtgcgagagattgctacgatttaccggtttgagaaccagcgagcgagtagaattatctctcgaacaccaatggaagttgtggtgcaagagattgctacgatcttttctcgagtagtccagccatggccggtgctatgaggtaggtcgtcggtcttcgttggcaggttgggcgcgacgactctgtatttttcgagatcgttctcgataatacggtatactcgaccacaacctactcgagtgctcaattgttcccttttagatacatgccggatatatctggccgaggcttcccggtgggaaacatcaaaccatcgttatccccggcgacgatatcttgtagctcggtcgatctcgccggatcgacaagttaacggcgctgattccgatcttgtcagggggcatactccggtcaggttagatctccccatagccgaagtcgtcgagtagcttgttgtcggagaatccatcttttaaactcatcttgtcgaaatcttgaagcaccaaaatccccctacctagcgcgccac

SEQ ID NO: 19761 - DNA, 366 bp, Oryza sativa
  Clone ID: PAT_MRT4530_25190C.1
ataattaattcacaacaccatatttcattgaccaggttcaaaacctgcacagaaatacacactaccggcacagacctaaccttctatccaatactgggacattcatccacgcgggccacaccaatacgtccatatatacggtacacgtacgtacatctactgcactgggtacacacacccacactctcctgcaaagacgcccattgaggtaaacctagctggcttagctgaaggcgatgcgtccccatggcagcacgggcggaggtggtgctcacttgccggggacgaaacaggtggcctaggcccaggctttgttgtttgacggggtcacgcaggcggtctatgaggttttcgagggggcccttg

SEQ ID NO: 19762 - DNA, 373 bp, Oryza sativa
  Clone ID: PAT_MRT4530_25191C.1
ctgtcagcatggcatacctggagcgaaaagaaggaggagcagcgttggatgtagtctaaaaagatggcccgaaccctagaatggagtcttatgcaccagggcacttatcgttgatggactaacgtctatcagaaacgctgccatgaatcagaaatgcactgactgcagcgtatgtaccgatagcaccggcaacatggtcaagatactgctacgagagggcgttgatggcagcgagaagaaacatgccgtatgctacatgtctccgttgaccgtaactgtcctacatcaagagagtagagcccggctgggaatctagtggactcccacccttttaaagcgtatgggccgacccggcttacgagtgtaccccaac

SEQ ID NO: 19763 - DNA, 297 bp, Oryza sativa
  unsure (1)..(297): unsure at all n locations
  Clone ID: PAT_MRT4530_25192C.1
canaaacttccttgctcttggcctgcacatagtatcagtattatatctgttgaattaattttacagtgcattgttctgttctgaaagattactgggatgctgctagtttgttttgttgatctagtgaagtacaatctacggggctggtttcaaaagcttanccaaatgttatatatgtttgccggcttgtgtttgttggcacggggttgtcaaatttgtcatggtccgtacctacccgtccagactgantactcttttgcctgtattaattgaatataaggccgtgtttanttcttt

SEQ ID NO: 19764 - DNA, 1095 bp, Oryza sativa
  Clone ID: PAT_MRT4530_25193C.1
atggcggacctcggcatttccacctccgatctggcaacgctagcgaagctctccatcgagggggcccttcctccagagcaagacatggctagagaagaaggagctctccgcgcggatgtcgtgacgcagcgggtcaaggacgtcctgatcagtcctgcttccacggccgaggaggtcctaccgttgatggacatcatcggccctcttgtcgatcaccaggcttccgcctcccttaaggagaaagtcacggaagaggttgttgtcgcttccactgcccctatcgtcgcagggggcagtggaaccaagaggaaaatttgggccaagacaagtggcgatgccggatctcggcagaagtccagcagctctgaggacaccagcggcctccctcctcctccgaagtggaggtctgtgaagaagatcatcggcaacctattgacaccattttctgatgtcggtaggaagacttcggcgatctctgcccagagcggcgacgagtccgagatgatggccgagtaccgccgcctttttgagaacacttctcgggaggtcggggcccagatggaccgcctaacggcccgcgcgatgtcgtcggatgggagggtggcgcagctggagacggaattcgaattcactcgctacgacctccagaagatgaaggagatcgtggctggcaacgagatgcaacgtctgggggtggagaagaagatgaacgaccttcaagaccacatcttctccatccgcgaccagctccagaagagtgcagcctgcaccagcctgcaccagctagccctagagtgcagcgtgaagtcttccatccctgcgcaccccgacgagacctctctgacatcggcgctgggcgagctggcgacgaagatggaggccatcccgtcgaagcatgctgccagggtctcggaggagatctccatcgggatccacactggggtttgtcatgtcctcgcttgtgtgaagctagctcttcccaacgtcgatcttaaagagatcttgtcgacaggggttgccgatgccacgcgcgaggacgtgatggccgttgtggcggatctcggggagaccgtcctcccccttttcgaggagtag

SEQ ID NO: 19765 - DNA, 1035 bp, Oryza sativa
  Clone ID: PAT_MRT4530_25194C.1
atggccgccaggccgggaaaagttggatttgttccgttggttcatgggagaaaaatcttgatcgctcgttcaattggaatttgttcaaatgagatggccgactgtcccctaacgcaccaaggtcagactatgggaggattcgtcacagagctgtcccgcatggcgtttgtgattggttatccaagggagccgaagtacaccagcatcgaccttttcagtggcgagttcccgcaccaggtccgcttggagcttcacggcatacactcctacctgcccaacatggaggtgatagcttgcgggggcacatttgagcatgcttgcgaggaggccgccctcaggatgatggccaatttgagggagctgcatgacggcactttgaacaccaccgcctaccgcttccacccttgccgcggttccacctccaataccatcaccttcaagtcagcatggggagagaatgacgtcaccttcggccacatgagtgagaagcttgtgaggattgccgagttgcaggatgagaatgctcgcctcaagaaggaggtagccaggctacagggacgcccaccgccaggaggaatccgcatacgcaccatgcccaggaagtcgaccacagctccagtgcgcattcagctcgcgcccaggaacccgccgccgcctccacccgcagcacctcccgcagctctagccccagctccagctcctgctccagtgccgccctctcctttgtgccagcttcagcttacaagggtccagcaggtttgttcgcttgtgggtcagtcgacgatggtcaacaccaggaacggtggtcgtgcagctggtgacagaagcaacagtgaagaacgcactgatggtggacaccccaacagcgcctccggcaatggtccgccaccgctccccgaaaacctgacgctggcacaagtaatggcccatcagacccagatgatggcagccatgatgcagcagatgcagcagcagcaccatcagatgcaccagaggatgaagcagctgtcacgccctaaaaatcgcctaaattaa

SEQ ID NO: 19766 - DNA, 1416 bp, Oryza sativa
  Clone ID: PAT_MRT4530_25195C.1
atggcggcggcgatgcatcgtgcctcggcggcgcccaggggtatcccgcatgccttggcgttgacggcgaggcggcgccccaccaaccggccggcccgcccaagaggagagaagagtcgtgtccgtccatgcccacaagaccacaaggcccacaacgagctttggcgtaggctaaggtacggcccagaacatcgcgttctcatctcatgcgtgccggaaaaagtatactttgactccctcaactatcgcccgagtatgattcatgtcatccaaccacaaaaccaggatgatgaacaaattgttgctatctggatcgatcgcaaagcaatcgaggcgcagattcgctttaggaccctgcacaacaagattcacctaccgattaaggatgttacagagggcaattacaaggctacggatgttgaggttattgggagcattcacactgttgatgaagatgtctggcatccatacgtttatatatatagcagtcaccgtgatgatactatatacaagaacgagcgttattgggattctgttttttgtattgatgtcactaaccgtgaagagacacgagatgttgtggattcaatgcttaattttgttttcaatcgcagcagagatgatcccattgttgtgcagcagtgtccaaacatccgatgtgatagggacttaaaactatctaaacagggtctagagacctatctgacacagctatgccagtgtaaaggtgctaatggttctattattgaaatgactggccctaagagaggcattggtatggttgctgatgttatatttgagtttgacatgagaatcaagaatggggagaaagaagaagatgatctacagctgattgatgaaataatagagatcgacgacaacgtggtaacgatgatagggacaccgaggacatttcgacttagtggcgattgtggccctgttgacatgtctatggcaatttttgataatgctgtggaagcaacagtagaagttgccatatcggaacttcattatggttttgatttatccataagctatgtcctttctgagctggaagaaaatagagaatttcagcttttccgtggtgctattggtgagtcgtgtggcttaagaagctgttgggcgatctcgctcctgggcagagatgctaaagcagtggagctcagggtggacagcaagtccgctttggccttggcgaagaatctcatcttccatgagcgcagcaagcacatccacatcaagtatcatttcattcggagctgcttggacgaggggagcatcaaggccagctacatcaacaccaaggatcggctcaccgaccttctcaccaagtctcttgggcgggtcaagttccaggaactttgcgccaggattggaatggttcaaattccccagaaggcgccacacaagacttag

SEQ ID NO: 19767 - DNA, 1191 bp, Oryza sativa
  Clone ID: PAT_MRT4530_25196C.1
gtgacactatagaatactcaagcttgcatgcctgcaggtcgactctagaggatcccctgagattagaaggtttcatggtttggcaggatactatcgtcgcttcattgaaggattttcaaagattgccagaagttattgaagaaggataaatcttttgagtggtcagataagtgtgagaagagtttccaagagttgaagacaagattaactagtgcgccggtacttgtgttgcccggttgccaaaaggactttcaggtgtactgtgatgcatctcgacgaggatttggatgtgtgttaatgcaacatggaaaagttgtatcttatgcctcgagacaactgcgacctcatgaagagaattatccaacacatgatttggaattagcagcagttattcatgcattgaaaatttggagacattatctactaggcaacaagtgtgaagtgtacactgaccataaaagtttaaagtatatttttactcagccggacctgaacttaaggcaatgcagatggttggagttaataaaagagtatgatgttgacatccagtaccattcagggaaggcaaatgtagttgctgacgccttgagtagaaaaggacactgcaataatgcaatgattcaacagtgtccagcagagttacagaaggaagtgcaacaactaaggttagaatttgtaaaacctggacttttgttagctttagaagttaagccaacattttagatcaagtccgagaggcacaaaaggaagacaaatatttagaacagattcggcaggatattcagaaaggagtcaccacttattctactaaagatgagcaagggacaattaagtttaaaggaagattatgtatacctgataagaaggaaattagggacatgatacttgaagaagctcatgattcagtattttctattcatctaggtagcactaaaatgtaccatgatttgaaggatacattttggtggaagaatatgagaatggagattgcagaatatgtcaacttgtgtgatgtttgtcagaaagtaaaagcagatcatagacgaccagcaggtttgctacaaaccttgccactaccagaatggaaatgggatgaaataggaatggattttatcactggttttccaaaggttaggtcaggttacgatgggggatcctctagagtcgacctgcaggcatgcaagcttgagt

SEQ ID NO: 19768 - DNA, 117 bp, Oryza sativa
  Clone ID: PAT_MRT4530_25197C.1
atgggacagttcaggcttgagactgacaagagtcaacgtgaacgtgttactgcccccgcgggtcgacatgagcttctctttgctagttcaagtcgactggagccggccaatggctag

SEQ ID NO: 19769 - DNA, 267 bp, Oryza sativa
  Clone ID: PAT_MRT4530_25198C.1
atgccgttctgggaggaggagagagaggggaacgcgagcacggtctcccaggtttggacgcatgcggcgtggagcagtagagctggcgtgggaaagagagagcgaggaagaagaagagagcgagcactctctcccgagcgcggcgcacgcgcgacgcacgtgcgaggggaggagaaagagcggctgagggagagaggtgggctgagggagagaagtgggccgaggggaggaaatccggcccacaaggatccgagggaggcaaaatag

SEQ ID NO: 19770 - DNA, 225 bp, Oryza sativa
  Clone ID: PAT_MRT4530_25199C.1
atggaggacaggtaccaatctacctgggcccaaggccatcagctagcgcgcgtgcgtgacaaagacggcccagcaacacctagagaaaaccatgagcaacgcagcggcggaagacggccatcggtggtgtatcaatttgctagtcggccgtacaccgtctggcgggtcgttgtgtttggcatctgcggttctgcacagtactcttttctaaccgtccgtccctag

SEQ ID NO: 19771 - DNA, 2319 bp, Oryza sativa
  Clone ID: PAT_MRT4530_2519C.1
atggccgaacgggcagtggcgcacagcctctctccgagcgctagcggtgacgacggggagcagaacccgcgccgtcgggctcgcaccccaccgtccccctctcgccgaagtcttcggcgagggaaggcgctcgaggaggtcgaaggatccgtgacttcgccacgcgcgggcgacgggggaggacggcgagacggggcgcatcgccgcctcgtctacggcggtggcaacacaccccagggcacgctccaggctgcgggcgcgctcctgcgtcacccgcccgtcgtccccgatccagagactccagcccgacgttggctggatgacgtggccgatttggtcatgacggcacagcagcgcctaggcgccggcaggcggtcctccgccaccggaacctctggcgctgccgccgccggctccacgacgtcgaggcggagggcgcggcgagcggcggccgctacccgccgttcgtccgccattccctcgtcaacgcctccgacccaagaagatgtgcgtggggggccggatgcccggctcgatatcgagcgccggcgcgacgatcgtcgcgccgcccacgcaacggagggcgcttcctcgtccggagcgccacttcggtccgggcacgggggccggccccccgtgtccccggttggcggtgctggctgtcgagcctttgtggcgagccttcggaacgtccgttggcccccaaggttccggcccaccatcaccgaaaaatacgacggaagcgtcaaccccgccgagtttctccagatctacacgaccgggattgaggccgccgggggtgacgacagggtcatggcgaatttcttccccatggccctgaagggtcaggcgcggggttggctaatgaacttgccacccgcgtcggtccactcttgggaggatttgtgccagcagttcaccacgaacttccggggcacatatccgcgcccaggcgaagaagcggacttgcatgcggggggcgtgcggcacaaccgtatgctcgagaagatcgcctccaaagagccccagaccaccgcgcagctttttgagctcgcggaccgtgtggctcgcaaggaggaggcctggacctggaactcctccggttctggtgtggcagctccggccgcccccgggtccgccgctcggtcagggcggcgggacaggaggaggaagaaggagttggcccgttccgacgatgagggtcatgtcctcgccgtcgagggcgcttcgcgggccccccgaaaggggaggcctgcgagcgacaaaaagaaggaggccggcgctcccagcagggagcgcccgaccggcaagtggtgtaccgtgcacaacacctccctccacgacctcgcggactgccgcgcggtcaaaagtttggctgagcggacgaggaagtgggaggaggagaagaggcaggagcgccgtgagggcaagaccccggcggctcccaccggtaactggcgaggtgaggccaagcagaaggccaccgccgaggacatcgacgatggcgacgatgacctggggttccaggagcctgaggccaccgtcgccaccgtcgatgggggagcgtgcgctcacgcttctcgccggagcctcaaggccatgaagcgagagcttctggccgcggcccctacccatgaggcgacgcggcgggcgcggtggtcggaggttgccctcaccttcgaccagaccgaccacccgccgtgcgttgcccggggaggacagatcgcaatggtggtttcccccaccgtttgcaatgtgaagttggggcgtgtcctcaaagacgggggtgcagccctcaacatcctttcccccgcagcctttgacgccatcaaggccccggggatggtgctccggccgtcccagccgatcatcggtgtgacgccggggcacacctggccgctgggtcatatcgacctcccggtcaccttcggtggttccgccaacttccgcacggagcgggtggatttcgatgtggcggaccttagtctgccctacaacgcggtcctagggaggcccgcgttggtgaagttcatggcggcggtccactacgcctatctccagatgaagatgccgggccccggtggccccatcaccgtccatggcgacctcaaagtcgcgcttgcttgtatggagcagcacgcggaccaccttgccgcggcgtccaagcccgcgggtggcgacgagagactcagcacctccgtcccggccgccccaaggcagcggatggtcacgtgcgacgaggtcccggtcaaggaggttgccctgggcgacggcccgtccaagaccacacgaattggtggtcttctggacgacaaatag

SEQ ID NO: 19772 - DNA, 1966 bp, Oryza sativa
  Clone ID: PAT_MRT4530_251C.1
aattaaaattgcaaaacaaaaatgcctttgccgtcgccgactggtgtctccgcttacacggctggcctattatcccgccgttgttgggcgtctacgacttcaccgctgtcctgcctccaacgtcgccgactggtgtcctcgccgtcacggttagctggtcacacccccgttgatggccatcttcatcttcaccgccggcatgccttcgccgccgccgactagccgccagcacggctggcctattacgccgccgttgtcgggcgtctacgccttcattatcaccgcggcttgcgactggtgtactcgtctatacggttggttggtcacaccgctgttgttgggcgtttacttcttcaccgactagtcgccttcgttgccgccgattggtgtctttgccttcatgactggcttatttcgtcgccattgacggatgacttcgttcctacatcggtctcctttgttgtcatcgagggaaataccaagaagctaagtcattattattttattctttatatgatattttcattttcctctgcctcgatccagatccagatatgcacagtagggattcatggctttaagcttatctcctacgcttcaggaatggatcagtcagaacatcaccatcggcttgccgtcgttgccgccgactggtgttcttgcttaaacggttggttggtcacatcaccattgttgggcgtctacgtcttcaccgaccggccgcctcgtctgccgccgactggtgcccttgcctatacggttggttggtcacaccaccgttgttgggcgtctacatcttcaccgaccggccgcctcgtccgccgccgactggtgtttccgcctgcacggttggttggtcacaccaccgttgttgggcgtctacgtcttcaccgaccggcttgccttcgccgccaccgactggtgtctccgcctgcacggctggcctattatgccgccgttgtctggcatctacgtcttccccgactggcttgccttcgccgccgctgactggtttctccgcctgcacgactggcctattatgccgccgttgtcgggcatctacgtcttcgccgaccggcttgccttcgccgccgccgactggtgtctccgcctgcacggctagcctattattccgccgttgttggacgtctacatcttcaccgaccggccgcctcgtatgatgccaactggtgttgtcatcttcacggctggccatgtcgccgccaccgctaataggccttaccatcctcaacgcaagctgctgccgattgctgcgcgtattcgtcatcattgactagcatcatcgtcatcgccagtttgcctccgttgctgttcatggtgacttcaatttcacagctggcctattttgccgccgttcaaggacgtctttgtttttgtcatcattctacttcttccagcgacttcatttttattatcttcggcaccagcaaactctattgctactacttcgcaagttttgctacttcactagccatgacgtctacaagagcttcgacatcttggcatgcacttccagattcgacgccgtgttattctactactacaagtggtgttccaatcttcaatatttctacctggacatcttcaatatgtatcttcactcaagcaatgactactcgacgacaagaagctacaattctcgactctatgttcagttgtttcccaactaaagaaagagtcgggggctacacaaatacaagactcaaaattcgacaagttttatgtcaagatgaagaaatcaatcaatcaacgagtcaactctgggagttattattttcgtcttcgcttcagagaagacattctactttagcaactccaattattttactggcaattttgttttctagacgctgccataatctactccaaatttctcaaagtatcaagttcaagatttaatctacaggttcgggagtttggagttatcaaccaatcagctcagttt

SEQ ID NO: 19773 - DNA, 1304 bp, Oryza sativa
  Clone ID: PAT_MRT4530_25200C.1
aacctatccgctgatcaccaccacctctctctctcgatcgccatggctgccaccaccaagctcgtggctctgggcctcgccgtcctcctcagcatcgggttcgctggtgccgcgagggtggccaggtacacgaactcgtactccggcggcgggggaggcggcggcggaggaggcggcggcggcgggacgaacggcgggtggggctccggctcgggcgccggcgccggcgccggatacggcgagagcggcggcgactccggcaacacgtggaactacgggaggggtggcggcgctggcggaggcggcggcggcggcggcgggaccaacggcgggtacggctccggctccggctccggctacggcatgggcagtggctcgagcggcggctccggctctggcgagggcggcggcggcggcggtggcggcggctccaacggcggcagcgggtacggcgctggcgccggagttggccagggcgccggcgagagcgccggtggcggcggcggcggcggcggcgggcacggcggaggcccagcagcatctccgagctacggcgttggcgcaggcgctggctccggcgctggcgacgccggcagcgatggctcctccggcggaggctacgcgtcaggaatgggcggcggcaagggcggcggcggcggcggcggcgagaacggcggctacggcagcggcagcggcaagggatccggatccggtagcggtggaggtggcggtggaggtggaggtggctcgtcagggggtggttccggctggggatctggctctggttctggatatgggcaggcaggtgggtctggtggagcgtatgctagcggcggcggcggtggaggaggtagtggcggcggggcgaatggtggatctggctatgggtctggttctgggtctggatatggtcaagccgggagttacgggccttatggtggaggatatgcccagggtgggggaggtggtggtggaagcggtggtggacaaaatggtggatcaggatcaggatctggttctggttctggatcaggtcaggcaggaggatacggaccttacgggggcggatatgctcaggcaggaggacaaggtggtggtggaggtggtggacaaagtggtccagggggcagcggatctggcagtggctcgggaagtggatctggaagtgcaggatatccatagaatttacgccctacctggatgacatatggatgaagcctatatagaatgctagttttgtatgttgttatatatggatgataataagaactaaataaagggcttctccgggtgtttgtttttcc

SEQ ID NO: 19774 - DNA, 1744 bp, Oryza sativa
  Clone ID: PAT_MRT4530_25201C.1
gcggcggcggcggcgggcacggcggaggcccagcagcatctccgagctacggcgttggcgcaggcgctggctccggcgctggcgacgccggcagcgatggctcctccggcggaggctacgcgtcaggaatgggcggcggcaagggcggcggcggcggcggcggcgagaacggcgggggaggtggaggtggcggtggaggtggaggtggctcgtcagggggtggttccggctggggatctggctctggttctggatatgggcaggcaggtgggtctggtggagcgtatgctagcggcggcggcggtggaggaggtagtggcggcggggcgaatggtggatctggtggaggaggcggcggtggtggaggaggtggtggtgggtcaaacggtggttctggctggggatctggctctggctcagggtatggccaggcaagtggtgatggatcgtatgctagtggagacggaggtggtggtggtggtggaggtgggcagaatggtggatccggatatggttctggttctggatctgggtatggacaagccggtgggtatggaccttatggtggaggatatgctcaaggagggggtggtggccaaggtggcggcggcggtgggggtggcggtagcggcgagggaggaggtggtgggtcggacggtggttccggctggggatctggctctggctcaggatatggccaggcgggcggtgatggatcatatgctagtggaggtggagaaggaggcggtggaggcggtggagagaatggtggttccggatatggttccggttctgggtctgggtatgggcaagctggtgggtctggaccatatggtggtgggtatgctcagggaggaggtggtggccagggtggcggtggtggaggcggtggcggcggtggagggggaggtggcggtgggtcaaacggtggatctggatggggatccggttctggctctgggtatggccaggcaagtggcggtggagcatatgctagtggaggcggaggaggaggaggtggtggaggtggacagaatggcggatccggatacggttccggttctgggtctggttatggacaagctggtgggtatggaccatatggtggaggatatgctcaaggagggggtggcggacaaggtggcggtggtggacaaaatggtggatccggatctgggtatggctctggctctgggtatggtcaagctggagggtatgggccgtacggtggtggatatgctcaggccggtggccaaggtggcggtggcggtggtggtggaggaggcggtgggggaggcggaggtggtggtgggtcagggaatggttctgggtggggatctggctctggctcagggtatggccaagctggaggctctggtggagcatatgctagtggaggtggtggcggtggaggtggtggaggtggacaaaacggtggatctgggtatggttctggatctggttcaggttatggtcaggctggtggatatgggtcccatggtggtgcgtacgctcaaggaggcggtcaaggtggtggtggaggtggtggggcaaatgggggtggcggacaaggtggtggtggtggcggtggatacaatggtggatcaggttatggttctggttctggatctggttacggccaagctggttcatacgggccctacggtggtggctatgctcatgcaggtggtcaaggtggcggcggcggcggagggcagagtggcccaggtggccatggatatgg

SEQ ID NO: 19775 - DNA, 706 bp, Oryza sativa
  Clone ID: PAT_MRT4530_25202C.1
atggctagaagcaagtttgttgctcttagcttcgtcgtcctccttggcattggactgaccaatgctacaagggtagctaggtatgtgagcgctggaggaggcggtgggggaggcggaggtggtggtgggtcagggaatggttctgggtggggatctggctctggctcagggtatggccaagctggaggctctggtggagcatatgctagtggaggtggtggcggtggaggtggtggaggtggacaaaacggtggatctgggtatggttctggatctggttcaggttatggtcaggctggtggatatgggtcccatggtggtgcgtacgctcaaggaggcggtcaaggtggtggtggaggtggtggggcaaatggtgggtctggatatggttccggatctggctctggctatggtcaggctggtggctacggtcctcatggtggagcatatgctcagggtggcggacaaggtggtggtggtggcggtggatacaatggtggatcaggttatggttctggttctggatctggttacggccaagctggttcatacgggccctacggtggtggctatgctcatgcaggtggtcaaggtggcggcggcggcggagggcagagtggcccaggtggccatggatatggaagtggctctggaagcggttctggatctgcctatagtggtgggcacccataggactgttatctaa

SEQ ID NO: 19776 - DNA, 540 bp, Oryza sativa
  Clone ID: PAT_MRT4530_25203C.1
cagcaaaaggagaaggtactgtttgtctgaatgcatgagctgatctggttctgcatgagaagagccaaaaaagccaaagctttccttgagcaccgtcatcagtgcctgctcttccaattaactgtatgcgtgtgtctcctccgtggtttacatcctggcatgtccaaacaaattacttcagtgctttccgtcctggccaccaaagcaaatgtcaagacttggacaatctagagagagaataacatttcgccgtctgcaactatctttatttattttaagagataattataccttggcttgggcgtatatttttatctacttgcttcgttccaaaatataaaggattttgcttggatataacacattctatgtccagatccgtagtactagaatgtgtcccatccaaaaaaaaatatgttatattttgggatggagcatgtcagaatttggatggagagaagatcttctgtagtattacatatgcagtactgctcactaatatgtgggtcccatagaccctcgggtctacatgtccagtgc

SEQ ID NO: 19777 - DNA, 565 bp, Oryza sativa
  Clone ID: PAT_MRT4530_25204C.1
acttacaatggctggctctaaggtagtactacttaccttcctcgtcctcctagtcataggagtagcctatgctagaccgaaaaaatacgctagtgcgggaggtggaggtggcggtggaggtggaggtggctcgtcagggggtggttccggctggggatctggctctggttctggatatgggcaggcaggtgggtctggtggagcgtatgctagcggcggcggcggtggaggaggtagtggcggcggggcgaatggtggatctggctatgggtctggttctgggtctggatatggtcaagccgggagttacgggccttatggtggaggatatgcccagggtgggggaggtggtggtggaagcggtggtggacaaaatggtggatcaggatcaggatctggttctggttctggatcaggtcaggcaggaggatacggaccttacgggggcggatatgctcaggcaggaggacaaggtggtggtggaggtggtggacaaagtggtccagggggcagcggatctggcagtggctcgggaagtggatctggaagtgcaggatatccatag

SEQ ID NO: 19778 - DNA, 1847 bp, Oryza sativa
  Clone ID: PAT_MRT4530_25205C.1
cccccacgcgtcgaaaaatcttcgtcttcatcatgcgccattttgagctcctcctcttcctcctcctctgctcgccgtgcctcttctcagtctccgatgggaggacggtgcggcccgcgaaacggggcgccccgtcgccccccattcgggcggtgaaccttggaggttggctcgtcacggagggctggatccttccctccctcttcgacgacattccaaacaaagacctcctggatggaacccagctgcaattcaagtcggtgacgcagaacatgtacctgtgcgccgagcagggcggcggcaccatcctggtggcgaaccggacgagcgcctcggggtgggagaccttcaagctgtggaggatcgacgaggacacgttcgacctcagggtgttcgacaacctgttcgtcaccgtcgccggcgacggggtcaccgtcgtggcgacggtggcgtcgccggggcccggggaggcgttccagatcgtgcgcaacggcgacaagactcgcgcgcgcatcagggcacccaatggcatgttcctgcaggcgaagacaagcgactcagttacagcagattatgatggggagacaaattggggcgacgatgacccctctgtgtttgtggtcactagggtaggcggtctacaaggggagtaccaaatatgcaatggatatggtaaagcaaaggccacacaagtgctcagggaacactggcgcacatacatagttgagagcgacttcaagttcatatcaacaagtgggctaaacgcagtgagaattccagttggatggtggattgctagcgaccccaatcctcctgctcctttcgttggaggatccctccaagccttggataatgcattcaaatgggcagagaagtataatttgggagtcattgtggacctgcacgctgcacctgggtcgcagaacccgtttgagcacagtgcctccagagatggttcacaggactggggcaccacggatgccaacatcgcccaaactgtccaagtcatcgatttcctcacacacagatacgcgagtagccccagcctcctggccgtggagctcctgaacgagccactggcacccggggtgactctcccggctctcatgagatactacaaggacggctacaacgccgtccgcaagtacacctcgacggcgtacgtggtcatgtccaaccgcctctccgccagcaacacggagctcctcggcttcgccgccggcttccccggcgccgtcctcgacgtccactactacaacctcttcaccagcagcttcaacggcctcaccgtcgaccagaacatcgactacgtcaggaccaaccgctccgacgaactcagcaccgtcacaaggccgaatgggccgctgacgttcgtgggagagtgggtggctgagtggaatgtgcagggagcatctaaccaggattatcagaggtttgcacaagcccagctagatgtttatggacgagctaccttcggatgggcctattggacttacaagaacgtcaacaaccactggagcatgcagtggaatatccagaatgggatcatctctctcaaaagctagaaataatgactaataattaaatatgtctctagttatcaccaattagaacacgtaaataagcctaaccaaggccaattagtgagtaattactgttgcctaataattggaaatgtgtatgtacttgcagtcatatgtaatccgtgagcaaataagacgttgcggaagcgcagataaaacgtcaggtactcaggttgagtgtaactttctcttgtgaagctgaattaaagaaataaagattcttcttcctagatgcttaaaaaaaaaaaaaaaaaaaaaaaaaaa

SEQ ID NO: 19779 - DNA, 377 bp, Oryza sativa
  Clone ID: PAT_MRT4530_25206C.1
gtataaatatatatagccggagcaaacatatatagccggcgcttacatatattccatcaacatatgcctgacccaacaacatatattacgtagcgtataccagtgttacatgaagtcagagagagatccggtgcaccaaaaacaaaagcagagcacggccggcaaactgaaaacacgctgaacaagctgggagccctcgaaacatggggggtgacctcatcgactcggatatgtacgactaaaccgggctatatatgaccatgccggtttaattgccaccagacttctgggaggcagggggctagctggccatgaacctcatgagctgaacctgcctgacggtctcaaagccgatgatacggactaatgcatcaggg

SEQ ID NO: 19780 - DNA, 813 bp, Oryza sativa
  Clone ID: PAT_MRT4530_25207C.1
atggctgccaccaccaagctcgtggctctgggcctcgccgtcctcctcagcatcgggttcgctggtgccgcgagggtggccaggtacacgaactcgtactccggcggcgggggaggcggcggcggaggaggcggcggcggcgggacgaacggcgggtggggctccggctcgggcgccggcgccggcgccggatacggcgagagcggcggcgactccggcaacacgtggaactacgggaggggtggcggcgctggcggaggcggcggcggcggcggcgggaccaacggcgggtacggctccggctccggctccggctacggcatgggcagtggctcgagcggcggctccggctcgtcggcgtcggccccggttgctctcagcagcggcggtaattacgccaccggtgatggcgagggcggcggcggcggcggtggcggcggctccaacggcggcagcgggtacggcgctggcgccggagttggccagggcgccggcgagagcggctcgtcgatagcgatggcgccgtctccatccagcggcggcgactacaacggcggctacgccgacgcagccggtggcggcggcggcggcggcggcgggcacggcggaggcccagcagcatctccgagctacggcgttggcgcaggcgctggctccggcgctggcgacgccggcagcgatggctcctccggcggaggctacgcgtcaggaatgggcggcggcaagggcggcggcggcggcggcggcgagaacggcggctacggcagcggcagcggcaagggatccggatccggtagcggcggataccattga

SEQ ID NO: 19781 - DNA, 920 bp, Oryza sativa
  Clone ID: PAT_MRT4530_25208C.1
ttttgatatttattttgtctttcaaggataacagttcttctcagggcatatatggcatcctttcagaattgatctggttcattaatgtccagttatatttctcaatggtctactctgaagtgactggcttgaagcatatgagactcttctggcttggtgtttatagattactgcaaacaaaagcgatcggcgacaccgccctcccgcttccctgcggcggcgactccggcgacttcgttcccagcggcggcgactccggtgtcttcgttccccgcggcggcgactccggcgtcttcgttccccgcggcggcgactccggcgtcttcgtgattccggcgtcttcgtcgggctgccttccgtctctgttggcttcccccgtcgtcacccgccgctcccacacacgagcacgaaggcccaagagcgacggcaccaactcccccttgcccgacggtgatgacaccctggccgacgacgccatctccaccctgcccgacaccgaggccacaagctccgcaccggccacgccgcagattccagacagcaacgccgccgcctctaccctgtttgagcgatttgtgtacatttctacaggtggatcatccatgtcgggcacgggcacatccactttgttcctgtttctccatgttgtatctgcacttcttatcacagctgtgaagaatcccagcatccggaagaaggttgccgatcaagttgggcaccgagtccgattatctccatctgttctttctgtttttgttttctcctctgccgccattgcattcacgtatgatgccattaagtccggcaaggagctcgaaggtcttggttcttatcttcttaagattaccaagacggggaagtacagtggctgccaccagaacatcgacaagaagcaggaacttaacaaagagaccccgtga

SEQ ID NO: 19782 - DNA, 288 bp, Oryza sativa
  Clone ID: PAT_MRT4530_25209C.1
gccacacacacggccagactgtctcggcgatgcgatcgagttagcatgtgcttatatgtcaatcaatgagcattctgctacatatttaccaatatcacagatacatcactaactacagtttagacttccttttttttttactcctattacaacaaggggcgaacgctttatgatgatccctgcagacgaacaacatatggctgatccaggagtcattctaagggtgacctgggatgcaccagatggcctgatgtgtaaaactgctggatagtgaaacccctgcatgta

SEQ ID NO: 19783 - DNA, 1452 bp, Oryza sativa
  Clone ID: PAT_MRT4530_2520C.1
atggctagatgtagcgcttgggtcgtttggtggctgggaagacggcatgcgacttgtcggctttggctcgtgactagattgatggcgttcaatcggaagtcggagtgggtggatcctacaggctgttttggaggtgttaacgacaaggtactgcatgggggattgctacttagtagcgtacatgcaatggatggcagaacagagaagcgtttgatctggaaccaggacgttgctagggggcatatcactaacagcttggaggtcaggatcacggcggactcgactcggagaggctgtggtagaaaaggagtcgagcacaggttcggcttcaatacacacgacaaagaagagatcgagaaggataccgcgtcggacatgaagagatcgagaaggataccgcgtcggacacggaagggggacgaggaggattcgatttggactcaaaatcggatgattaatctcccaaaattacagcaaagggactccacgggattgcaacatgcaatcgagcaaatcacaaggcaagggcgaaatcaatttcgtgggcagcgtggtttgttggcgacgaacttgggcggcggtgtatggcttcggcgagcagcagtacatgtcatggaggagctcgacgcgggccggctccaggaggaggcggcagacaccggcgtcaggggcggtgaaggtcccgagcaacagcgggtgaaaacgttgagggcgtcaacgggctgtttggcagtacagggccatgggtttgatcaagtcaaatttaagacggtagatggaggtgaacatgctcttcgggaagcctatgacatgacagctagaaaagaatccaatttcgcttggcaagacgactgtggtgatatgagagaaggtggagcactgttgcaggtggagtcaagtggaagaagttgcagggatagcggtgtctcttgtttacgttgtcgacgtttgatgtcgcgattccggtatttgcatagtatggggatcgttggtactagggtttacgcgagactgagaggtaatgggagaatcgctacacctctggtcaagaaccagtcgtggtgcgaggaccgttgtgttattgctgtagttgtacctcgaccatctgaggttgcggtgcgggagattgctacatattggttcgaggaccagcgaacgagtagaatcatctctcgcacaccaatggaggttgcggtgcgggagattgctacgtactggtttgagaaccagcgagcgagtagaatcatctctcgaacaccaatggaggttgcggtgcgggagattgctacgtactggttcgagaatcagcgagcgagtagaatcatctctcgaacaccaatgggggttgtggtgtgggagattgctacgtactggttcgagaaccagcgagcgagtagaatcatctctcggacaccaatggaggttatggtgtgggagattgctacgtactag

SEQ ID NO: 19784 - DNA, 704 bp, Oryza sativa
  Clone ID: PAT_MRT4530_25210C.1
gaagggtgactactaccgttacttggctgaatttagcactggaactgaaaagaaggctgctactgatcagtcccttatggcctatcaggcttggccttgcgctcaacttttcagtcttcttgagataatgaactctcctgagagagctagccaagtggcaaaacaagcacttgatgaggctactgctgagattaactctgctggtgtggagggttacaaggacagcatgcttatgatgcagctcctgaaggagaacctggcattgtggacatcagaactaactggaggtgaaacatctaaggacgatgatgttgttatggagggctaactgtctgaaatgttctaaaggccccagcatgtgagcaaaacaatcagtaacattgtaacaatactgctactgaacttgcgacatttatcatgggagccgtggaaatcacctttatttttccctttcttctgtagtttctttttttttggccctcgcttgggtcttggtgtgacccccaaagtattttcagagtttggatttgataaccatgcaccagctttggttatattttgagatcttggagtggtcaccaacccagctttaatattagtttgagagtacttttttttccaatgcttgttaagcatctttgtataccaacgggatgatgaactatatatctcttaatgatgacgaaataaacgtctcttttgtt

SEQ ID NO: 19785 - DNA, 401 bp, Oryza sativa
  Clone ID: PAT_MRT4530_25211C.1
actaaattttttgtataaagaaaaaaaaaaaaaaaaatggggaaatgttaaaaaagaaaaaataaaaaaactgtatttttaagattttaaattgttcagaaaaaaagactttatgttggacgtttatgaaaacttaaggggggggggggggattaaggggaccaggtttttgtgctgaaaagaggggctcggatctttttttgtgtgggcccgagaataaattgggcggggggcggtactagctcaaggggggggggaaaaagtgggggagcgcaaaagtaatcatcttggagcgcaaaagtcttgttgggggggggtaagaaaagagaagggccaaggggaggcccctttccagaaggaggggggcatttgagagggggatgggccccttgcttttgagg

SEQ ID NO: 19786 - DNA, 739 bp, Oryza sativa
  unsure (1)..(739): unsure at all n locations
  Clone ID: PAT_MRT4530_25212C.1
ccggccgggaccacggcgccactccgagagcgaactccaaaatcttctcgaaaccgccatctcccaatctcccatccccgtcgccgtcgccgaggcagcggcctcgcggccggcgagccggcgccgcggcggcgctccgtcctcatccagacctaccccgctttccatgccgcccacaacctcctcccttcccgctacccgccaccttcccttcaatctctcccgcctcccttgcgccctaacgccgcctcgttcacctcatccctcgcctcgatctcctcgtcttcctccccccctcctcagcggtgccgctccgcggcgtgtccgcgtccctcctcgacgacggctccatctcttccctcctccggtccatgccgtcatccgtcgtgcccggccccatgtatgcgccctctcctcgagcttgctttatcctctctgtcccgttctcagcctcgtgccttatcatccttaactcgtggttccgatcccgctctcctgactccgcccaccagctgttcgacgaaattcctgtcgtctgttggctattgggaccgcgtctgctactcctctgccatcgttggcctcacgcaaaatgggcgattctaggaatctctcagtattcgtcgactctctaatgttgtatgcgtaatcgagtccattgtggnggctgcagggcttgccgcactggagcacgctgtcggattcatgcgtgcacacatagtcgtggttcggcttgatc

SEQ ID NO: 19787 - DNA, 1452 bp, Oryza sativa
  Clone ID: PAT_MRT4530_25213C.1
ttatggtggcgaagcggcacggggttcgagctcatcgcggcggaggagatggtgaggacggcgggagcggccgccgcgggagtggccgccgcgggagcggcggaggacggagaggacgtagcagccggagccctcgcgtgcgacggcggcggcgaagtcagtcccctcctcgagggggacgcagcgcacacggcaggggcccacccgattggaacaaaagtgagttcggatggtgtcccacggatggcggtggtcgacatgcacggcggctcgtggggaggaggggatggggaagggggagtggaggtggaaggggaagggaggaaatggaggtggaaggggaggtcggtgcacacggcggcggccggaggtgggggccacctcgtctacccctcctccgatctcccttccattctccttcattcccgcctccatctcctcccatcccccttccccccctttgtcgttgttgcatggatgacacttgctgttgtggcgttggtggccgctgcgggcgaggaggtagccacatgaacgggaccatgctggtgctcggtcggcctccgcctccgccaccggccgcccgggcgagctcttcctcggccgctcagcgagctccgcctctgcctccaccgccgtctcggcctgcagctcatgtcgtcggtgcccgccgaccgtgacaccaagcatctgctctctgctacccccttcctgcatcatcaccagcatcagcagtatgtcccgcaccaccaccatcagccccatcacccgcgtgactgcggcaccaatgccaatgccaatggcaatggcaatggtgttggctatgggatgatccccggtacgcataccctgcggatgttgcagcaccaaccagagcctcaaccgcaactgcaacacccaccatcacctccacacccaaaagaggaatgcatttccccgccattgatcgaggaaaatgtacctgttattgatgagccaccacctcccaagaagcggcagcagggccgccaacccaaggtaccaagggctaagaagcccaagaagtctgctgctcctcgtgaggatggcgcaccacccaatgcaccagcaccacggagaaggggtcccaggaagaatatagggatggtaattaatggtattgatttggacctctcaaggataccaacgcccatttgttcttgcacgggcgcaccacagcagtgctatcggtggggtgcaggtggttggcaatctgcgtgctgcacaaccaccatctcaacgtacccactgccaatgagtacgaagcgccgtggtgcacgaatcgcaggcaggaagatgagccatggtgcgttcaagaaagtacttgagaagcttgctggtgaaggttataatcttaataatccgattgacctgaagaccttctgggcgaagcatggaacaaacaagtttgttaccataagctgtttggtctga

SEQ ID NO: 19788 - DNA, 332 bp, Oryza sativa
  unsure (1)..(332): unsure at all n locations
  Clone ID: PAT_MRT4530_25214C.1
ttggttactaaataatttgtgtttcctgggatctgggaacatgtatgatgaataaatgatgaactcaaaaaaaaaaaaaaaaaaaaaaaaaaaaaaaaaaaaaaaaaacaaaaaaaaaaaaacaaaaaaaaaacaacacaaacaaatctactaaaaaaaccaccaaaataacaacacccaggggtgatagtaaagggcgtcntaacacaacaaaacccactcnntaaaacaacttaatagcctaacatcacatcctaccttcacatccccctttaacacactanagtcctaaacaaatctcccttaccaacancccttcccaacaaatccca

SEQ ID NO: 19789 - DNA, 192 bp, Oryza sativa
  Clone ID: PAT_MRT4530_25215C.1
atggagataaaggacaaattcaacagcgacaagagaacgaagcggacaggagggagctgcaagcctgcgtcgtgcggcaacagtggagaatccgggcgtgtcgtgccaatccggtttggcagcggctgcgctgcagggagatgtgcacactgtagcagcgtcgtgcagcggtggacggcgaaggaatcctga

SEQ ID NO: 19790 - DNA, 353 bp, Oryza sativa
  Clone ID: PAT_MRT4530_25216C.1
tttatttacatgcctacgtataaattctctgaaatgcggtgacatttttatgtagacttgggctgtaatataaattctctgaaatttgtatgtcttgattcttaaattgctgtgataagctcttcttttctaggaagtacagtactgaattgtgggttgtacaatacttaaattataaaatcatccctagtatatttttgaattaatccatgagttgtttcgaagagctgtagctgtacaatctgacctatatagtaaaaaaatgttctactcttgatttagaccatatgctctgatatggatgacctaatatactgcctatatatgcatataagttcagaaacttctgtaga

SEQ ID NO: 19791 - DNA, 1004 bp, Oryza sativa
  Clone ID: PAT_MRT4530_25217C.1
agcatcatcaccaagtaaaaagagaaaaagaacccataaatttgaagaattttagcttcattcaagaactcgatcgaggagggccaagaaaggtgtgagaccttgatttggtcgccatgtcgagccccatgcatgttcgcaaggcgatccacttcgtctccatgaaggccaagctccagagcttcggcggcctccgcctcctcctcgtcggctgcctcgccgcgctgctgctgctgttcgccgtcaggacgctgtcgttcacgacgtcgtcggcgacggcgacggcggcgagggaggcggcggaggcgggctgcgggaagctcccggcggcggtggcgcaggcgatggtgcactacgcgacggcgaacgtgacgccgcagcagacggcggcggagatcggggtgtcgctgcgggtgctgcagctgcgggcgccgtgcaacttcctggtgttcggcctgggcctcgacagcgccatgtgggcggcgctcaaccacggcggccgcaccgtgtccctcgaggaggacgcgtcctggatcgcctccgtcaaggcgggccacccggggctcgagtcctaccacgtcgcctacgacacccgcgtcaccgacgccgatgagctcatcgccctccgccacgagccggcctgcacgtcccagccggacctcgccgccgccgccgccgcgtcgtgccgcctcgccctccgcgggctcccgccggtgttccacgaggtggagtgggacctcatcatggtggacgcgccgacggggtggacgccggagtcgccggggaggatgggggcgatctacaccgcgggcatggcggcgcgcgccaggacgcccggggcgggcgccaccgaggtgttcgtccacgacgtcgaccgccacgtcgaggacaccttctccaaggcgttcctctgcgacggctacctcgtcgagcaggtggggcgcatccgccgcttcgtcatccccagccaccgcgacaaggacggcacgccgttctgcccttga

SEQ ID NO: 19792 - DNA, 1113 bp, Oryza sativa
  Clone ID: PAT_MRT4530_25218C.1
atgacgtacactacacctacgagtttcccctctaccgggctgtacttgaacactccgaaaaagaagcctctgcctggaaagatcgaagaagtccgcgccgctggatggcttgatctcatgctggcctcctcgccacctcgcaagaggcagactaaggactttgccaatgatgttcaagctgacgagcttgatttgctataccgtaattgggtggtgaaccatccatctgctttaacatcatttgaggatattgttaatcttgccagaggtaaaagattggcactgttccttgattatgatggaactctttcaccgattgtggacaatcctgaaaatgcagtaatgtctgacgagatgcgctctgctgtgaagcatgtggcatcactttttcccactgcgatcattagtggaagatctcgtgataaggtttttgactttgtgaaactaactgaactgtattacgctggaagtcatggaatggatatcatggggcctgttaggaagtctgattcgagtggtcagcatgtggaatgtatcaggtccactgattcagagggtaaagaggtcaacctcttccaacctgcaagtgagtttttacctatgattagcgaggtgtacaaaaagctcagtgaaagtattaaggacattgatggtgcaaggatggaagataacaaattctgtgtgtccgttcattaccgcaatgtagcaccacatgactacggagaagttcatcaacgtgtgactgccgtcctgaagaattacccttgtctaaggcttacccatgggagaaaggttcttgaggttcgacctgtgatagactggaacaaggggaaagctgtggaatttttgctggagtcacttggactatgtgggaaagaagatgttcttcctatctatgttggagatgacaagactgatgaggatgcattcaaggttctgaaggcaaacagcattggctttggaattttggtgtcatctgtgcccaaggatactgatgctttctattccgtacgggacccagctgaggtgatggaattcctgaagaaactggcatcttggaaggaggaatccacttaagcagaaaggaggaacataacagaatcgttttttgag

SEQ ID NO: 19793 - DNA, 665 bp, Oryza sativa
  Clone ID: PAT_MRT4530_25219C.1
ggatgctgctttctccgtgaatgtgatgataataataatcagaagaaataaataagaagagttggattcaaaaaaaaaaaaaaaaaaaaaaaaaaaaaaaaaaaaaaaaaaaaaaaaaaaaaaaaaaaaaaaaaaaaaaaatttaaaaaaaaaaaaaaaagggggggccgttttaaaggaaccaaatttaactacccgggcatgcaaagtaaaaatttttttattggggcacctaaaataaaatcactggccggggtttaaaaaagtcgggaatggaaaaaacctggggttacccaaattaaatgccttggaaaaaaacccccttttcccaggtggggtaaaaacaaaaaagcccccaccaatcgccctttccaaaaattgcccaaccttaaagggaaaaggaaacccccctttaacgggacaaaaaaaccggggggggggggggttacccccaaggggacccgtaaaattgccaaggccctaagccccggtcctttgggttttttccctttcttttttaccaaatttgccgggtttccccggaaaagttaaaaaggggggcctcctttaaggttccaaataaagggtttacgggaccttgaccccaaaaaaattaaatagggggaaggttaaactaaggggcccttcccctaaaaaaagggttt

SEQ ID NO: 19794 - DNA, 516 bp, Oryza sativa
  Clone ID: PAT_MRT4530_2521C.1
atggaagggattgggcaaagttttaggagtacactaggaattttctcaacgtttaagcagtgtgttatatgcaattatgcatcatataccactccaatagagttaggcatagagcagattttggaagctaggatgctaggcatagagcactgtttatcctggatgggatcacatttcccatccccacaagagattgggatagggctgacaggctttggagtattcttctcatttctggggatcattttcttctttgacaaggggctacttgcaatgggcaatattctcttcctgtcaggcttaggtttgactattggattgaaatcgactctgcaattcttcactaagcccaagaactataagggtactatctcatttggtgctggccttttgcttgttctaattggatggcccttttttggcatgctattagaggcatatggttttattgtacttttcagtaccttggaagctatcgaggaaaaagagttccagtgtaggtcttaccccaagtag

SEQ ID NO: 19795 - DNA, 339 bp, Oryza sativa
  Clone ID: PAT_MRT4530_25220C.1
ctattaactacaatcacatattctactacacaaacaaatactctacccattcacccattctgaaaaccaacatcatatcatattatcaacaacctacttactcccaactacttttcaatacataaacaaccaattcatcaactatcatactacccaacaattcatattgttaacacaacaatcccactactacacctatattaatttacacacgactactcataatatactcaatcttaaactcaaactcttttacccttctcatactcatccacatgctcaatctaccctaacctcaaactttctatccatatcctttatacttcctaactactacat

SEQ ID NO: 19796 - DNA, 335 bp, Oryza sativa
  unsure (1)..(335): unsure at all n locations
  Clone ID: PAT_MRT4530_25221C.1
ctgccgcgtcgtccacggcgaggccgatcaggagaccgcccccgcctacgccaaccgtgaagcctacgtggagcacagtggtggtgacgccgncggcacgttcntctccatcttcccgtcctacctcgacgacggagaaggggctataaagcagaagagaagaagaccaaaaaggggagaggactttagatttcgtgaagcactgctgaaggctgatttctggcttttatttgcagtgtattttattggggttggaacttggattactgttcttaataatttatcacaagttgggattgcttcatgtgattgttgatacaacgatttgacttatt

SEQ ID NO: 19797 - DNA, 702 bp, Oryza sativa
  Clone ID: PAT_MRT4530_25222C.1
atggaggacgacgacgacgacttcacgttccccgcgccggcggcgacggcgacggcgacggcggtggcggcggcggcgacgtcgtcgctggcaccgagcagccagggcggcctcctctggccattctcatccacgatggctacggcggacgacgacgacgcggcgtcgggcggccaggcggtggcggcgacggcgccggtagcagcagcacggcgcgtcgacgaggaggaggaggaggagcggatggaccagctgtgggagcgcgaccgcgacgcgcgcgccggcgacgaggagaggatggacctgctgtgggaggacttcaacgacgagctcctgcttcagctccggcgccgccagcagcagcgcgcggcggccgggacgccgccgtcaccgtcaccgtcacccgcggcggcggccgacgacgacgacgacgaggagacgccgtcgtcgtccccaccgggaggaggaggagggctgtacgggtgcgcgccgacgatgctgagggcgtcgtcgcgggcgggcgccgtgggccagttctacggcggccgccgtggcggcggcggcgggagcagggcgacgacggggtgggagctgctgctgaggctcttccggaagctgttcgccgtcgacaagtcgtcgccgtcgccggcgccgccgtgccgccaccaccatcgccgccacgggagcatctacgtgccatga

SEQ ID NO: 19798 - DNA, 241 bp, Oryza sativa
  unsure (1)..(241): unsure at all n locations
  Clone ID: PAT_MRT4530_25223C.1
cacacctcaccaccatcacctcctcctcctcctcctcttcctccgcgcgcgcgagatccagggagagggagagggagagagcatggcggngactgtgacggtgccgtctgttttnatttatttttctacgattttccaagccgagctaagtattctttccctgacaactttatgatcgaacacacagattctatgtgaaaggcgacaccactaaaccttgatcgcaggattaatggaatgc

SEQ ID NO: 19799 - DNA, 3123 bp, Oryza sativa
  Clone ID: PAT_MRT4530_25224C.1
atgccgcgccgctccgcctcccggtacgccgcctactgggccgccgacgcgctcgccggcgacgacgccctcgacttctccctcaccaaggcgctgatgggcgtctcgccggattccctcacgggcgcccccgaggccgtgcgggagcgcgtcgcgcagcggtgcctccaggaggtcgtctccctcgcctcctaggatggcgactacgaggccacgccgaccgcccggggaggggctgcttagtgtggacgcctcccgctcctgcgaggactcgctgcttcaactcatccgagagattggtagctcaggaagcttggagaaggttatgcttctgccctttagtcaaaatgtccataagtttataggtataaagagacctaccttacctgaaacttctttcggactgctcggagaagtagacccagagatcacacctgtggtcctaccatcgccagtggagcagaatggccatgatcaacatgacaatgtcagccatgatcttgaaaatacagagaagactgggttcaatacagatggcgctcagcttcagcaagatgatctggcaaatttagtcaacgaaagtaacacaggaaatcttcagaaggatgcaatggcaactcctgattttcaccaaccatgtacatcagaaaataggtgttttgatcagccacaagaagattcaattaatgcagttggtgtcaacatcaggtctccaaaagacagtccaactaatgtagatagacacatacaagttgcagctgagccttctttagctacttctgcagatttgctgggaagtaatacaggaacaatttctgagcaggacatgatagatgatacaaccatggttcaatcgcaatctcaaggggtcaaaaatcctaatacacttcattataataatggagatgaaccacttgttgccagcattcagtcaccaaaggattccatccatgaaggactgaccatacaggcaactgtttctccagcttttgacagaagcaatgatgctttaccagcaagtacatctgaaataagccagttgcctgagtttattactgcaagggatacagtaatgaattcagagccacgtatcaacaaatctcatccaaattccccgaaacatgacactgttgataaagcaaatcaagatgtggattatggcagtgttggtattcagaaagctgctgctttcctatctgaagatcgcaatggggctactcaaggagagaaatctgaaattaaagatccaccagaaaatactgcagaacatacaaaaatgtttgaacaagaaaatagtgtcgaggctcagttggaagtcggttgttccgacaaagttaatcaagatatacaggatgatggcaacatcatgacaaagaatatggtctgtgatgggctgaatgtgcagactgctccggaacctcatagctgcagaatggccttgcataacaaaaatttggtggccaaccatttgtccgagcagaatattggaaggaacacaactgctgttgagaaagattgctgcagtattccaacctctcctcaggttgttaatgacacaagagtgaagcaaccttcaaacaagagaaccatggggaatactgtggtagaaacatcgcatgtgcattcttcagatgatagtctcagtggcttcgcagccaccggtcttctgtcaatggctgacaaaataccattctgtactcaggatcaagatgccaacggtcctgttgagggcttgtcagaacaagatttgtgcataaagtgtggtaaagatggccagttgttgaaatgcagcagctgcttgttagcggctcatgatacatgttttggttcattagcgacattggatgattctggccagttgtattgtcctgtatgcttctatactaaagcaactgaagcatatcaaaaggcaaagaaaacgtattctgaagcaaggaaaaacctatcagctttccttggtagaaagcaattagctgagcaacatcagcaagctgcagtggggcaaagagctgccaacaacgaggatcatttgaatgggtgtaacgatgcatctaaaaggaaagataatcatcaatctgaaggaaataacctttctcatagggatgaagaccctacccggaagaggaagaagcagaagacaaatgctactagtgatgcttgcgctcaggaagtagtcactgaaaagaataacagaaaacaagctcaggttgcagagcacgagcagccagaggaaaatgcagaagctagtggagagtctggtaatgccaattcatcgcacaaaacagcacattcatctcagaccaagtgcagtcctgctgcaagtcagaatgttgacgctgacaaagaagatggccttgcaagttctcaacagtcagaagattctgatgaaatcgaagctacatcttctagtgaccctaccaagcaaccatcgcctccttggcgcaagttgagacaccgcaaagcaagatatcaggataaggatacagcaatgccaagtaattctaagaaaacactggggcaccatgatcaacatatggcttcaccatcaaggaaaaggaactatgcatatccacccaagcgttactctaaccctgtcggaccagctggaaggcgcacaaagctctgctggacagaacaagaggaggcaactttgagggaagcaatggcaaaattcaccccaagtgacaacgggccaattccgtgggtccagatactggattacggcagggatgtgttccacaggacacgcctcgcatccgacctgagggtgaaatggaggaacatgaagaagaaagcaggctcatgaccgccaaagcaatcttagcttacctatcagtgcaggctgtgcagcaattctttttttagataatggattaaataacctggccattgtgccatgcgcattctaatatcttagttttagagcacattgtgtgtcaccatcttgtaagattgtagattttccttggtgtgtagaacactttaagttttatcgttctttcttggtacggagaacgtggctgatgtgtaggctattttcgatgttacagaggaaggtgtaaatttgtgattgaatcgaaatatcaaacttcattttctcttcaaaaaaaaaaaaaaaaaaaa

SEQ ID NO: 19800 - DNA, 1161 bp, Oryza sativa
  Clone ID: PAT_MRT4530_25225C.1
atgcggtgctgggagcgcgttgcgctgcggtgcctccaggaggtcgtctccctcgcctcctccgatggcgagcgcggcgccacggcctcggccatagcggcgccgggggaggggatgcttggggtggaggacgcatcccgcacctgcgaggatttgctgcttcaactcatccgggagctcagaaaagtttacccagagattacacctgtggttccaccatccccagtggagcagaatggaaatgaccaacacgacaatatcagccatgatcttgtgaatacagagaagaccggattcactacagatggtgctcaacttcagcaggatgatctagcaaatttagtcgatgaaagaaacacagaaaatcttcagaaggatgcaatggcaacttctgattttcaacaaccatgtacatcagacaataggtgttttgatcagcgacaagaagattctattaatactgttggtgtcaacatcaggtctccagaagacagtccaactaatgtaaatagacacatgtcagttgcagctgagccttctttagctagttctgcagatttgctgggaagtaatacaggaagaatgtctgagcaggacacgatagatcatacaaccatagttcaatcacaatcttgtggggtcagatatcctaataaacatcacagtaataatggagacatgccacttgttgccagcattcagtcaccaaaggattccatccatgaaggatcaaccatgcagacaactgtttctccagctgttgacagaagcaatgatgctttaccggcatccaacatgacccacttgcctgagtttattgctgtagaggataaaataatgacttcagaaccacacttcagcaaaactcatccaaattcagggcaacatgatactggtgataaagcaaatcaagatgtgggttgtggcagtactggtattcagacagctgctgctttaccatctgaaggctttaatggggatgttcaaggagacaaatctgaaattaaagatccagcagggaatactacacagcatactgaaacttttgaacaagaaaatagtgacaaggctcatttggaagttggttgttccgacaaagttaatcaagctctatatgatgatggcaacatcatcaagataaaatggtctgtggtgggctga

SEQ ID NO: 19801 - DNA, 129 bp, Oryza sativa
  Clone ID: PAT_MRT4530_25226C.1
atggctggtggagttggagttggtgctgacggtgaagatctagaggccgcagtggctggtcgagatcgagctggtgccggcatggctggtggagttggagttggtgctgacggtgaaggtgggagatag

SEQ ID NO: 19802 - DNA, 2664 bp, Oryza sativa
  Clone ID: PAT_MRT4530_25227C.1
ctaacgcttgggtggatatgcatagttccttttccttgatggtgaagccatatgttgatcatggtgccccagtgttttcttagaattaattggaattgctgtattattatcctgatatcttgctttgcggtgtctcaacttgcgccaatgaggcgatggttgcttgctagggtcactagaagatgtagcttcgatttcatcagaatcttctgactgttgagaacttgcaaggacatcttctttgtcagcatcaatattctgacttgcagcaggactgcacttgttctgagatgaatgtgctgttttgtgcgatgaatttgtattaccagactctccactagcttctgcattttcctctggctgctcctgctctgcaacctgagcttgttttctgttattctggagtacagaattctttttcatggatacaacatcagagttatgaacagtgggtgcctttttagtgactacttcctgagtgcaagcatccctagcatttgtcttctgcttcttcctctgtcgggcaggctcttcatccctatgagaaaggttatttccttcagattgatgattaccttgccttttgattgcgttgttacacccattgaaatgatcctcactgttggcagctctttgccgcactgcagcttgttgatattgctcagccaattgctttctaccaaggaaagctgataggttcttccttgcttcagaatatgttttctttgccttttgatatgcttcagttgctttagtatagaagcatacaggacagtagaactgaccagaatcatcaaatgtcactgatgagccaaaacatgtatcatgaacggctaaaaaacagccactgcatttcagcaactgaccatctttgccacattttatgcacaactcttgttctgacaagccctcaacagtaccattagcatattgatcctgagtacagaacggtagtttttcagccattgacagaagaccaccagctgcgaagccactgaaactaccatctgaagaatgcacatgcaatgtttctgccacagtattcgccatggtttccttgtttgaagcttgctttgctcgcttgtcattaacatcattaggagaggttggaatactgcagcaatcattctgaacttcagttctgttccttccaatattctgctcagagaaatggttggcctctgaatttctgttatgcaaggtcatgctgcagccatgagactctagagcagtttgcttattcagcccaccaaagaccatattattttttatgatgttgccatcatcatatagagcttgattaactttgtcggaacaaccaacttccaaatgagccttgtcactattttcttgttcaaaagtttcagtatgctgtgtagtattccctgctggatctttaatttcagatttgtctccttgaacatccccattaaagccttcagatggtaaagcagcagctgtctgaataccagtactgccacaacccacatcttgatttgctttatcaccagtatcatgttgccctgaatttggatgagttttgctgaagtgtggttctgaagtcattattttatcctctacagcaataaactcaggcaagtgggtcatgttggatgccggtaaagcatcattgcttctgtcaacagctggagaaacagttgtctgcatggttgatccttcatggatggaatcctttggtgactgaatgctggcaacaagtggcatgtctccattattactgtgatgtttattaggatatctgaccccacaagattgtgattgaactatggttgtatgatctatcgtgtcctgctcagacattcttcctgtattacttcccagcaaatctgcagaactagctaaagaaggctcagctgcaactgacatgtgtctatttacattagttggactgtcttctggagacctgatgttgacaccaacagtattaatagaatcttcttgtcgctgatcaaaacacctattgtctgatgtacatggttgttgaaaatcagaagttgccattgcatccttctgaagattttctgtgtttctttcatcgactaaatttgctagatcatcctgctgaagttgagcaccatctgtagtgaatccggtcttctctgtattcacaagatcatggctgatattgtcgtgttggtcatttccattctgctccactggggatggtggaaccacaggtgtaatctctgggtaaacttttctgagcaactcaaaagaagtttctggtaatgtaggtctctttatgcatataaacttctggatatcttgtctaaagggcggaagcatatccttctccaagctccctgagctaccaacctcccggatgagttgaagcagcaaatcctcgcaggtgcgggatgcgtcctccaccccaagcatcccctcccccggcgccgctatggccgaggccgtggcgccgcgctcgccatcggaggaggcgagggagacgacctcctggaggcaccgcagcgccacgcgctcccgcaccgcctcaggggcggccctgacggaatccggggagacgcccaccatcgccttggtgacggcgaagtcgagggcgtcgtcgccggcgagcgcgtcggcggcccaaaaggcggcgaagcgggaggcggtggcggaggcggaggtggaggggcgcggcat

SEQ ID NO: 19803 - DNA, 525 bp, Oryza sativa
  Clone ID: PAT_MRT4530_25228C.1
atggctgacggcgagggtgggggcatggaagactacgcggcgtgggtggcggcgacgatattctgccggaacaacagcgactacgcgccagagaaccccgacggcccgcccccgccaacgaggacgctgcggtgcacctaccgtcgtggtggcggtgaggatcgggactcgttgtgcgtgctacatcagctggatgactgtgacgatgttggtgcgcttggtgatgaggggtgggtgtggccgcggaaagcgatgggttcggtcgttgaggtcgtcgtgccgagcatgcgggagcacggagtaggggcatacctgggaaactcattgaaatctcatatggcttctactttcgagcctcatcaaaacctcgaaattttggaggggcatctcggaattgtgaatcctggtggtcgtgccaagccggcgggcgtacggagtaggagcgtatctagggtatgtgaggtggtggcatacgcgatcatgatgtacatgcgtttcttcgtggagcagtactacggcgaataa

SEQ ID NO: 19804 - DNA, 156 bp, Oryza sativa
  Clone ID: PAT_MRT4530_25229C.1
acaatgtaaatcattctagcatggaccccaaagcatatacggtgaaacacaatctagacatattttagtggaacggtggattgactactaaaggaaaaagtactccaagggcccctgaaattgttttaggaaaacaaaaacgtcttaaaacctcgg

SEQ ID NO: 19805 - DNA, 805 bp, Oryza sativa
  Clone ID: PAT_MRT4530_2522C.1
tcaccctccatcttctactttccacctcttcttctcttctctcctcgtctccatgccggcgagtaccacctgctggtagtgagctccggcgctatggcccaagcctctgagcccgctgacgcagccgacgatgacgtctaggttggccggtgatgtacttggtggtgggtggcggtgtggaggatgatgccgcggcgctgagggtgagagacttgtgtggttgatgggcgacgccagcgtgctgtcaatgcacaccagcgcgcctctccggtgacacagctcggcgacgcgcggggcacgtcgatgacctttaggctgatcatggtgaggcttcgtcgtcgagtcggcgcagaacacatcgtcacttcgccgtggcctgaccccctcgggggggtcgggcccgagggtgatgtggccgcccctccctctgtctccccaaggggtcgggccgctcccgtttcggccccgagggctggggcgccccgaccccgcctcgccccgtcccgtcggaatgatgagagcctctaggcactcgtccctagccggagccggcgtgctgactcctggagttagcacgtcagtcccggctagattcataccagacaagaatgaccggtttgtgactggtctgacgccggtcacgtcatcggcagacaaccgtgctcccacgttgcgcctgcttccggcggagtggaggttatggtccatctacaacctaccaaaggtcttgtacatagaaattgtttctgtggtagtggctgttgatgttcctattgtcgcgaacgtccaccaccgagcagaggtg

SEQ ID NO: 19806 - DNA, 402 bp, Oryza sativa
  Clone ID: PAT_MRT4530_25230C.1
atggtggcgatcgcgctgttcctcctcctcgtcgtcgccggcgccggcgccggcgcgcagggaggagatgcagggtctttgccgccggcgccggcggcgaccggcgagtgggtcccgatcggcggcgacgtgatcaggggcgacgggttgtaccggcaggtggcgaggttcgcgctggtggtgcggatgctggcgttcggggcagcggagggggagctgacgctggtggaggtggtcgccgggagcgtgcaggccgccggcgccggcaacaactaccggctcctgctgcgcgcggcgggcggcgtggggacgtacgaggcggtggtgtggggcgtgcccgggtcgacggggtggacgtggaaggtgctctcgttccggcgcgtcgccggcgaccagaactag

SEQ ID NO: 19807 - DNA, 812 bp, Oryza sativa
  Clone ID: PAT_MRT4530_25231C.1
tatttgagacaatgtcttatgggtcttagcctataaatagagagatggatgcaagggtggaggttgcttctttggcaatccttttgagatgctcgtccgcagaatgatgcagaaagatctggtgcttctgaggaaatgcttcacatgcataacttggcgcatgatcttgctagatcagttgctggtgaagatatccttgttattttagatgctgagaatgagcgcaatgccagatattgtgattaccgttatgcacaggtgtctgcttctagtttagagtcaatcgatcgcaaggcatggccttccaaggcaaggtcactaattttcaagaatagtggtgcagactttgagcatgtcagtgaagttctttcagtgaacaaatacttgcgtgttttggatctcagtggatgctgtgttcaagatattccatctcctatctttcagctgaaacaactgagatacctcgacgtttcatctttatctattacagcactccctctgcaaattagtagctttcataagttacaaatgttggatctttcagaaactgaacttacagagttgccaccctttataagcaacttaaaagggctgaattatttgaatctccaaggttgccagaaacttcaacgattgaatagccttcatttgttgcatgatctacattacctaaacttgtcatgctgccctgaagttactagttttcctgaatctcttgaaaatctgaccaaactccgtttcttgaatctttctggatgttctaagctttcagcattacctatcagatttttggaatcatttgctagcctctg

SEQ ID NO: 19808 - DNA, 2524 bp, Oryza sativa
  Clone ID: PAT_MRT4530_25232C.1
aaggaaggaattttatttaggggccaattctatgaattatgtagtatctgcacagtatagcagacaaatggaatagctgcacacaacggggtgcaaccaaaaatatggaagagattaagtgcagtgcattccaaatacagccgagctgggataaaaccttgttttacttcagggaaaaagatatctgcctatgaagcttgcattaataaatcgtaacatctcaaaaggttaatgaaatctaaaaaaaacataaacactaaaaaataggggacgtgagctggagcctttaaaactgaaaacaaatgtcaggttagtccactcacaacactacagtctacagggggggaccacaacaaaaatcaatatggatacttggcacaaagatgctctaatcatcagggggtagtaactggtatttaactgattaactactggaaagccctggtttcaagagaatatgtatgatcttgtaaaaatcttataaatactaacaattgactccccatttttgctgcaattgaatgtatcaatgaattagaatgaaccacaaggttaaagggcaactcgatttcatttacacaaatcttattgtttttctcttctcatttcacattcagaatgtctaccagctcaaagcttccgagtttatggaaacagagatgtttaaggccatgtgtgaatgtaagttttcagattacagggaaggagctgctgccaaatttcccagcagttaggcgttcaccttgtggagagtatactgcgaaacttcaagaatcaaagtatctgtgattgcgcatggatcatggtctacatctccgctccgaggtgaatccctttccttccaagaggggcacaaagtctcatctctgagttcactgctcagatgcaggtgcaacttgaatgctttgatgcctaggaacactgtgagctgcctcagtagtttctcgagacatgagtaaaggcaactctcagggtccttcatgttcgggttcgttgacaggacagctgcattcactgcatccgctacaaattcccgctgtggagagtctagcagatatccaatgcacgattcggcaggcttttcatatgcaagcagggccacgctctcctttagcaacccatcaaaagctttatgtgtcaagaagttggccaggttagagcgagcatattttacagcatcctccagttgtccagccccgataaattcaatgaatctttgggaatggagtaagaagcaaataattgatgtttcatcctttatcacctgtggataccattctccaagttttttgaatgcagaatcaatatctccactcatgataagctgacgcagcaattttctgtggctaagaccatacatttcaggaggttccccataaccattttgatgattggatggaggatcagtttcacttgccatatcaaaagaatttaatgtatcttggtagccgtaatgtaggagatatgaacgaacaatccaatgactgatgtctggttgcaaatccaatttgtcgctgacagattgttgcttcattttctcttcaaaaatatagccctcaatgtcaaaacagaatggttcttttccaaagtttactgtcacctcttcatcttgactatggactgcaatggtaggatatagtgggcctttaatttctttttgaaaggatccaactagagatccatttttcgtgaagaaaaattcttgtgagaaatagttgatgccagcaccaattgtgtcaccagaagtgaatttgggaccaaatgactcacttttcccaggaccacggtaaagatagccatcatcgccatgatatccacagctgttagactcccagccgggctggcggcgcatcttgaaattctcggtggtgaagccgatggaggtctgccccttctggccggcgttcttgacgcccatctcgaagtagtagacggcgcggcgcgtgggggcggggcggttggcctgcacgacgccgacgtcgtggccgtgctggttgacgccgaggtacctgacggacatccggtcggtagagacgacggcgaagaggcccgagctgttggtggtgttgagctcggacggcgccggctccgcctccatctcggccgccgcggccccccactccgccggcgaccgccaccgcgacgccagcctcatcgggtcaaccgcccccgccgacgcgggcgccggttcttccaccaccgccgccgccgcaaccacctcgttcgccaccattcgccaattccaaaacccccccgagtgcgggggatcgagctgccggcggtggcggtggcggtggcggcggatcgggcggcgctgcggttgcgggaggtcggagtcggaggagaggatggatgggggaagggaagcgtgaggagttgggcgtcgcgtcgcctcgtgtcgtgtcgtgtggcgtcgcggcgagagagagggggaggggggtaacgtactcgtgtactttccggcgttttcgcgacggctgtgcttgcgttgcagtgttgttcagcgggtgaacagtttgggctc

SEQ ID NO: 19809 - DNA, 255 bp, Oryza sativa
  Clone ID: PAT_MRT4530_25233C.1
atggagatgagaggcacggtggggccagagctcggtgttgatgggggcgttctgagagtggtggtgatggtggctaatcagctcagtgacaaactaggggcgaagccgagcgccattggcagcaccaagggtggtggtagagtaagcttggtggagatcatggtttgcggcaaggatggtgtggtggtggcaattcttcgagagataagctatggcggcttagcggaggcggtgctttgcaacgatgatgggtga

SEQ ID NO: 19810 - DNA, 488 bp, Oryza sativa
  Clone ID: PAT_MRT4530_25234C.1
gcacagcacacgtcacgaagatgcgtacgatgtacctggctggggcgtgcaccgactactaggcttaatgtgggctcggaggctacagtagagtgactccttgcttggcttcttgacagtacgtaatggctgtcgccaggcgataaactgtccgacccgttgggtctggcggaggaccagcagaacctggggaggctcgcgcaggcagagctgctgaacgggcgcaggaccatgctgagagtggccgcatatgctactgactgatgtgctgacgaagatcgggttgatcgacgcgacctattgatgactacgcctgaagcggtcacctactccagggttgtcagatgacgctggtcgcatcgatgcatcctggaccactacgttgagatcctgcggaggaaagacataaagaaccctggctgtgtccaccagaaccccatgtaaaatagctacagactgccgccgcacgagtgcggctacaccggcag

SEQ ID NO: 19811 - DNA, 1692 bp, Oryza sativa
  Clone ID: PAT_MRT4530_25235C.1
atggatcttggcaagtcgacttccaccagcgcgaccctgaagaagctccaggaggagggcgccctccctggccgcgacaaggcggagagggaagcaggaggtactaatccacagcccctcttaggtcgcatggttgtgatcgaagattacattgtctgcggatttcttcctccctcctctgaattccttctgctagtcttgaatttctatgggctttcacttttgcatttgaagcccaactccattgctttccttagcgtttttgtgcatctttgtgaggcctacattggggtagagccctttctcgatctgtttcgcttctattatgagttgcgctggatggaatccaataaggtgtctggctgtgtcggattccgacttcgagatggtatgaagccgcgttatgtccccttccagtgtccctcttctcgcagcaaatggcggaacagatggttttatcttgaaatcaaggattcaaatccggtcctcgtcgtccctgaggagcaaccggacaagattccagtttggaccgccaagccccctttgaccccttctctccaatcgtttaccgatatcatcgatgatctccgagaacggggcttatcgggatatgaagtcgttgcagacttcgttggtctgagcagtgaagtcgtggagcggcgcactggtcaagtgataatcagcggcccgtcagcgatgagcaacattccaaaacccctctgcgataaggatgcggcggagcgcgatgaagcgatcaatgcccttcccttgactgacgttgccaccggtagcggtggcaaggctccgaccaagccgaggaagttctcgtctgtgctcggacatcgccgcaaagcagagacttcctcggtttccgacgcgtctcctccgcctgcgcgtcgtcaacgtattgtgacgatctgtgagaaggaggcgcggtcgaaaactgctcgggccaagtctggggggacctctagcgcatcccccgtgacggcatctactgacgtcgttcccgtgatcgggagtcgggaggcgacgccgagcggccccaccagcgatcccgccgggggccgcggtgcgccagagtccatcctcacctgggaggagctccaagccgagatggggcgtcttgtcgaagccggtgctcgcggcattggccgcgaggtctcggaggcgagggcggagacggcggcggccaacacgcgtgctgaccgtttggtgcgggagctggccgaagctcgcgaggacctcacaaaaatgagggagctggtggccggcaacgagcaccaacgcaaagggctcgaggaccgcatgtcggaactcggggataacctctccgagatccgtggttctctgcgggtcacgtataccggtctccaccagcttgccgcggagtgtggcgtcaagtcgacaattcaggagaaccctgacgagttctcactaacttccttcctggcggagctggcgacggcgatgggagagatccccaccaagcaggcagccaggatcgcggaggagacgtccaacggtatctataccggggcgtgtcacgtcctcgcctgcatgaggttgttgcgtcctgaactcgatcttcgcgagatcttggatcagggggcagcaagcgacacgcgcaaggaggtgatggaggaagtcggtgatctaggggagtctgtcctccccctttttgaagagtag

SEQ ID NO: 19812 - DNA, 108 bp, Oryza sativa
  Clone ID: PAT_MRT4530_25236C.1
cgtgttcggtttggaggatcagaggagcttgtcttactaggaccatcagcaggtccaaacccgagccagatggtgttgtccaaggcggcaatatatggggcgtatcac

SEQ ID NO: 19813 - DNA, 1347 bp, Oryza sativa
  Clone ID: PAT_MRT4530_25237C.1
atgtggaggggtggagggagggagggggaggggatcgatcgctacctcatccccatagcgatcgatcgcccatcagcattcccggcctgttacgctagggaggcccagagttgtgccctcgtcgtcttcacgccgcgccagcgtgataggagggagaggaggagagggactggcaacgctggtgaggagaggggaagggggagcaggagcggcagagagggggcggcgctgccggtcgggagagggaagggggaggaggtgctcgcgatgtttacccattgcaacgcacaggcagtgatgctccccgactattactgctgcatggtcgagaagctcatcgagaagctgacccgaaacgggcggaacgcggtggccatcaacgagcacatcttctccacggtggacggcatcatcggcacgttcgcgctcggggagacgtacgcggcggaggagttcaaggacatcagcgagaccatggacctgctgagcagctcctccgccgaggacttcttccccggcagcgtggccggccgcctcgtcgaccgcctcaccggcctcgccgcgcgccgcgaggccatattcaggaagctcgaccgcttcttcgagcggatcgtcgatcagcacgccgctgccgacgacgacggccccgccgcggctcgcagaaaggcggacgacaagggctcagcagggtcagacctcgtgcacgagctcatcgacctctggaagatggaaggaaacaccaagcagggcttcactaaggaccatgtcaaggccatgctcttggacacattcgtcggtggcatcaccactacctcagtgaccttgcactgggcaatgtccgagctcatccgcaatccgagggtgatgaagaaggcacaagacgagattagagccgtcgtaggcgagaaggagcgggtgcagcaccacgacatgccaaagctaaagtacctgaagatggtggtgaaggagaccttccgcttgcatccccccgcgacgctactcgttcccagggagaccacacggcacttcaaggttggcggggacccgaacatctggaaagatccagaggagtttatcccagagaggtttgaggagatggacattgacttcaacggggcacatttcgagctggtgccatttggctctggccgtcggatttgcccggggctggccatgggagtggccaacatcgagttcatcttggcaagcatgcttttttgcttcgattgggagcttccccatggggtgaggaaggaggatatcgacatggaagaggcagggaagctgacgttccacaagaagataccactcttactagtcccaactcccaacaaggcaccaaactag

SEQ ID NO: 19814 - DNA, 537 bp, Oryza sativa
  Clone ID: PAT_MRT4530_25238C.1
atgacgggcgacctggccgatagaaccatcggcgtcgaggtcagagacgggcggatctgggagggatcaaacctcccatgtgatgaaacagacaagcaactcttcagggcctccactatcatcatcttaggaaatggaggcaaggtcaaattcttgcatgacaggtggctcgagggcaaagcaccaaaagatacagccccatctttattccagattgcatccaggaaaaatagaatggtcgctaaagaactcgccgacaaccgctggcttcgtcagatgcggagaatgaacactacggtccaagacagcagatcaaacttcttctggaaagccaagacagaaaacaaatgcaaattcttcggatggctcatgattcacatgaaaatcctcacggctgataaactacagctacgggggtgggataacagtgagatttgccccctttgcggcattgaaccagagacggcatttatgcttgctcctgcttgttgctgttctcacttcgtaaagattgggtgctcttccttcgggctgtga

SEQ ID NO: 19815 - DNA, 761 bp, Oryza sativa
  Clone ID: PAT_MRT4530_25239C.1
ccttgtgattagcatagccactgcagatatcgaatattgcattaagctagctagcttaattggcatcataagcagcagaagaagaagagaagagaagagaggaagctagaagatataggagaggaagaggggatgggagggaagtcgtcgttcctgtgcccgatcttcagcttcctgtcgtgcaagtcgaggaggtacgaggacgacgacgacgacggcgagctgagcggcgagtggccggcgaggtacgggagcaaggtgaggtcgagcgacgaggactacggcgcgtggtgggtcggcgagcgcgacgtcgaccgcaaggcctccgactacatcaacagcttccaccagaggaagcaggtcgccgccgcctagctagctcgatctacacatctcgatctccaaccacacccacagctcaacgataccaatctttcattggatcgagggggactagcgtacgcgcgacggcgacggcggacgacggccgccggcgcggccatatatatgtactgcatctgttgtctcaaccggccatttgtgtaccgcaccgcatgtacgtacgtaggtctccgtttacataattaaattcttctcatatatgtatatgttaaattgttatgtatgtttgttgtggattattatgttatatatgtttatttagaccacgaataattgtaatgccggttcacagatcgagatcttgccatgtgtatatgtatgtggagcatgtgaactcttttaaaaaaaaaaaaaaaaaa

SEQ ID NO: 19816 - DNA, 315 bp, Oryza sativa
  Clone ID: PAT_MRT4530_2523C.1
atggtgccagcaatcacgctcgcgccgtcgctccaccgctacacaggccgccgtagccagccacctcccctcccaccggatccggcggaggggagggcgctgctgccacccgtcgcctcctcttgcgccgccacctaccgcctaccgcctaccgtcccaccagatctagcgggaggggagggcgctgccgccacccgctcgccggcttgctcgctcattcgctccttgctactactgcacgaaaaggagaggataagggagagggaagagagagagaggagagaggaggaacaaatgaggaggaggagaggataa

SEQ ID NO: 19817 - DNA, 916 bp, Oryza sativa
  Clone ID: PAT_MRT4530_25240C.1
ctacaggcccttctccacgtccaactcgggatagaaactgtggtcagaccggccctctagcgcgtcccctgtgacggcatctaccgacatcattcccgcgatcgggagtcgggaggcgacgcccagcggccctgccagcgatcccgctggaggccgtggtctgccagaggctatcctcacctgggaggagctccaagctgagatggggcgtcttctcgaggccggtgctcgcggcattggccgcgaggtctcagatgccgatgatgaggatgtccagcagcgcgggcagcctgagtcgctggcaataattccggtactcgagtttgaaccgcacgcatcgcataacgtcgaggaccaaactcttgacgcggaggtcgaagtgacagcaactggcccgaatctcgaggattcccttgcgacccaagatcgtcgtatccaatattggaagacaaaatttgaagtggtggaactcgagagggcaatgctggccgtgaagaaagatcaagctgtggaaacgctccgaggccgcgaggtgtggttctcatcttacttgaagagttgttgcacctcgatggagagggtgtgtcgggatcttcgggtagcccgcggtgatcctgaaaaatcggcggccgggtacatctcgtggctcaacgaggcctgcgcccaactcgatggcattggtaagcgtatcgacgaggccttgaagcaagagtgttgtcgagcgagccgatatgccggaggacatgtgctggcttgcatacgagatcactgcccacgcatggatcttgaatttctccgcgaaggttttggtcgttctcggagggatccggcggagatagaccatctcgcgagatcgatgtcgccgttggccgagaagattttccaatcaatggactggcgttggccttcttggtag

SEQ ID NO: 19818 - DNA, 2097 bp, Oryza sativa
  Clone ID: PAT_MRT4530_25241C.1
atggatctcggcaagtcgacctccaccaccgcgaccctgaagaggctccaggaggagggcgccctccccggccgcgacaaggcggagtgggaagcaggaggtactactccacagcccctcctaggtcgcatggttgcgatcgaggattacattgtctgcggatttcttcctcccccttctgaattccttttgctagtcttaaacttctatgggctttatagcgtttttgtgcatctttgtgaggcctacattggggtagagccttttctagatctgtttcgcttttattatgagttgcgttggatggaatccaacaaggtgtctggctgcgttgggttccgacttcgtgacggaatgaagtcgcgatatgtccccttccagtgcccctcttctcgcagcaaatggcggaacaggtggttttaccttgagatcaaggacttgaatcctgccctcgttgttcctgaggagcaaccggacaagattccggtggcggcttctctgaaggagaaggtggtcaaggaggcgtccgacatcgccaccggcagcggtggcaaggctccgaccaagctgaggaagttttcgtctgcgctcggaaatcgtcgcaaagcggagacttcctcggtttctgacgcatctcctcctcctgcgcgtcgtcaacgccttgtgataatcggcgagaaggaagcgcggtcgaaggctggtcgggccaaatctggaggaacttctagcacatcccccgtgacagcatctactgacgttgttcccgtgagtcgggaagcaacacccagcggccctgccagcgatctcgctggaggccgtggtccgccggaggccatcctcacctgggaggagctccaagctgagatggggcgtcttctcgaggccggtgctcgtggtattggacgcgaggtctcggaggcgagggcggagatggcggcggccaacgcgcgcgctgagcgcttggtgcgagaactggccgaagcccgcgaggacctcacaaagatgagggagctggtggctggcaacgagcgccagcgcaaagggctcgaggaccgcatgtcggaactcggggataacctctccgagatccgaggttcactgcgggtcacctacaccggtctccaccaacttgccgaagagtgcggcgtcaagtccacgattccggcgaatcccgacgagttctcgttgacctcttctcttgcggagctggcgacggcgatgggggaaattccctccaagcacgcagccaggattgcggaggagatgtctaacggcatctacaccggggcctaccacgtcctcgcttgcgtgaagttgtcacgtcctgaactcgacttgcgcgaggtcttggatcagggagcggcaagggacgcgcggaaggaggtgatggaggaagtcggtgatctgggggagtctgtccttcctctctttgaagaagatgccgatgatgaggatgtccagcagcgcgggcagcctgagtcactggcggtaatcccggtactcgagtttgaaccgcaggcagtgcataacgtcgaggaccaagctgttgatgcggaggtcgaagtgacgacaactgaccaaaatctcaagaatgcccttgcgacccaagatcgtcgtatccaatactggaagatgaaatttgaagtggcggagctcgagagggcaatgttagccgtgaaaaaagatcaagctgtggaaacactccgaggccgagaggtgtggttctcatcttacttgaagagttgttgcacctcgatggcgagggtgtgccgggatcttcgggtggcccgcggtcctgaggaatcggcggccgggtacatctcgtggctcaacggggcctgcgctcaactcgatggcatcggtaagcgtatcgacgaggccttgaagcaagagtgttgtcgatcgagccgatatgccggaggacatgtgttggcctgcatacgagatcactgcccacgcctggacctcgaattcctccgcgaaggttttggtcgttctcggaggaatccggcggagatagaccatctcgcgagatcgatgtcgccgttggccgagaagattttccaatcgatggactggcgttggccttcttggtag

SEQ ID NO: 19819 - DNA, 581 bp, Oryza sativa
  Clone ID: PAT_MRT4530_25242C.1
gcacgaggatcgcatagacagcgcgggggcggcggcggcggccgagaaagcggggtggccgacggcggatgagggtggcgggcggagggagctcgctgcctcgagccggagcccgcatggcgctccgattcaatcagatgatttcggtgccttgcctccgactccgaaggcaggggcaatggtgcacgagggacacaggtaaggtgatgttacagtcatgcaactccctgctgcccaacggggagtgggagaggagagctatatatggagatcgggcattatccgagcgagcggctacctgctgctcagttcagggactagggacatcctcagtttgccatggaacagaagagatcagcatggtcaggatcagaagatgacgagtcagtactgcaaactcccgtgcagctaaccgtgagaacgattacagtgatcgacggtgatagcagcggagatggtgatcaaaatgcaggacaagtttatatagatacagagtttggatgattcaatgttgagatggaacataaagctgattcaatgtcgagaaggagcttaaactatgatttgctgtttggaatatc

SEQ ID NO: 19820 - DNA, 946 bp, Oryza sativa
  Clone ID: PAT_MRT4530_25243C.1
tttttttttttttttttttttttttttttttttttttttaatataaaaaaacgtactgcattgacgttgttaatcatttcccatcgcaggacaagacatgataaacttataaagaaatttacaactgcacttaacactgatgatgtggtgaaaggtaaatcttaacagtacaacccctctacaaaggaagtagagtagaaaggaacagggaagactgcaaatccatctccatgtagtcgtatttttaagatggaactacaaccagccttattaacaccaaaggaaaaacagagactaaaatctagctgactgaagtcacaagacctatacgcctataggcaacatcacaagtcgcaacggaagctctcagctggtcagctcatggatcaactgaagagctcagatggattccctcaggaccaggttgatgccgaacgaagccgtgcagatgatcaacccaaagatcgccaagaagttcagccccccaatcttgaggcggttgtccgggatgccggtggcgtagcccttgaagtagaagaacctcgcgacggcgtagaacaccccgagccccgcggcgacgagcgggtgctgcagcccgccgaccagcagcgtgacgaagaacagcggcatcatctccagcgagttctggtgcccccgctgcacgcagttgaagagcttggcgtccttgttctccgactcgaccgcgtacatggtggggtagaacaccttgtactttctgcgggccttgccgacctggaagctcatccagaagttgaggaacgcgtaggcgaccagcgccagcaccacgtacccgtattccttggtcagctcgatcgacaccgccatggccgtcaaattgttgcgatttcttcttcttctcgagagggaatggagattggagaggaggaggggattgtttgtttatggattataatgggttttaacg

SEQ ID NO: 19821 - DNA, 966 bp, Oryza sativa
  Clone ID: PAT_MRT4530_25244C.1
atggatcttggcaagtcaacttccaccaccgcgaccctgaagaagctccaggaggagggcgccctccctggccgcgacaaggcggagagggaagcaggaggtactaatccacagcccctcttaggtcgcatggttgcgatcgaagattacattgtctgcggatttcttcctcccccctctgaattccttgtactagtcttgaatttctatgggctttcacttttgcacttgaatcccaactccattgctttccttagcgtttttgtgcatctttgtgaggcctacattggggtagagccctttctcgatctgtttcgcttctattatgagttgcgctggatgaaatccaataaggtgtctggctgtgtcgggttccgacttcgagatggtatgaagttgcgctatgtccccttccagtgtccctcttctcgcagcaaatggcggaacagatggttctatcttgaaatcaaagatttgaatcctgtcctcgttgttcctgaggagcaaccggacaagattccggtttggaccgccaagccccctttgaccccctctctgcaatcgtttatcgacatcatcgatgatctccgagaacggggcttatcgggatatgaagttgttgcagacttcgtcggtctgagcagtgaagtcatggagcggtgcgctggtcaagtgatgatcagcgacccatcagcgacgagcaacattccaaaacccctctgcgataaggatgcggcggaacgcgatgaagcaatcaatccccttcccttgactgacgtcgtcggaccactcgcggatcatcaagtggcggcttccctgaaggagaaggtcgtcgaggaggcgtccgacattgccaccggtagtggtggcaaggctccgaccaagccgaggaaattctcgtctgtgctcggacatcgccgcaaagcggagacttcctcggtaactttcaccttgtcattatgctaa

SEQ ID NO: 19822 - DNA, 1746 bp, Oryza sativa
  Clone ID: PAT_MRT4530_25245C.1
atggagctcacatggcttctactcctcgctactctcctcctctccaccactctcctcgtcttcctcttccatggcggtagcagcgccaccggcggcgagaagcgccgccgcctgccgccggggccggccaccgtgccggtgctcggcaacctgctgtgggcgaccaactccgggatggacatcatgcgcgccgtgcgccgcctccacgcgcgccatggcccgatgctcggcctccgcatgggctcccggctcgaggtcatcgtggcggaccggcggctcgcccacgccgcgctcgtcgagagcggcgccgccatggccgaccgcccggagttcgcgtcgcgcgcgctcctcggcctcgacaccgccaccatctccaactccagctacggcccgctctggcgcctcttccgccgcaacttcgtcgccgaggtcgcgcacccggctcgcctccggcagttcgcgccggcgagggcggcggtgctcgaagagctcacggacaagctgcgtcgccggcaggaggacgccggcgcgggcaccatcctggagacgttccagtacgcgatgttcttcctcctcgtggccatgtgcttcggcgagctgctcgacgagcgcgccgtgcgcgacatcgccgccgcgcagcgcgacctgctgctccactcctccaagaagctcagggtcttcgccttcctcccggccatcacgacgcgcctcttcgccggccggatgaaggccatgatcgccatgcgccagcggctgaaggggatgttcatgccgctgatcgacgcgcgcagggcgcgcaagaacctggtcgacgaccatggcgacgccacggcgccaccaccgccggcggcgagcgccacgacgttgccgcactcgtacgtcgacacgctgctcaacctcaggatcaacgacaacggcggcgagcgcgcgctcaccgacgacgagatggtggcgctctgctccgagttcctcaacggcggcacggacaccacctcgacggcgctggagtggatcatggcggagctggtcaagaacccaaccatccaggacaagctccacggcgagatcaagggcgccatcacctccaactccggcaaggtgtcggaggaggacgtgcagaagatgccgtacctgaaggcggtggtcatggagggtctacggcgacacccgccggggcacttcgtgctcccgcacgcgccggcggaggacatggagctcggcgggtacacgatccccaagggcacactggtgaacttcacggtggccgacatgggcatggacggggcggcgtgggacaggccgagggagttcctgccggagaggttcatggccggcggcgacggcgagggggtggacatcaccgggacgagggagatcaggatgatgccgttcggcgccgggcggaggatctgcccggggctgggcgtggcgacgctgcacctggagtacttcgtggcgaacatggtggcggcgttcgagtggcgggcggcggagggggaggcggtggacgtcgacggcgagaagctcgagttcaccgtcgtcatggagaagcctctccgggcgcgcctcctgccaagagccgtcactgtttgactctgggtgaactttgacatttgggggggtttattagacatttgacactctctcgctaatgtagtttcatgctttgtaataatggtattattattaatttccttttgatgaataaaagaattccatctattttgtcataaaaaaaaaaaaaaa

SEQ ID NO: 19823 - DNA, 546 bp, Oryza sativa
  Clone ID: PAT_MRT4530_25246C.1
atggcggtgtcgatcgagctgaccaaggaatacgggtacgtggtgctggcgctggtcgcctacgcgttcctcaacttctggatgagcttccaggtcggcaaggcccgcagaaagtacaaggtgttctaccccaccatgtacgcggtcgagtcggagaacaaggacgccaagctcttcaactgcgtgcagcgggggcaccagaactcgctggagatgatgccgctgttcttcgtcacgctgctggtcggcgggctgcagcacccgctcgtcgccgcggggctcggggtgttctacgccgtcgcgaggttcttctacttcaagggctacgccaccggcatcccggacaaccgcctcaagattggatcgcagctacttgttggcacgacgttgatgaaacttccaaagtttacatatttagtatttcattactcatttcaagagggggctgaacttcttggcgatctttgggttgatcatctgcacggcttcgttcggcatcaacctggtcctgagggaatccatctgagctcttcagttgatccatga

SEQ ID NO: 19824 - DNA, 276 bp, Oryza sativa
  Clone ID: PAT_MRT4530_25247C.1
ctagggcatagcccggcgccccctatccaagtcgttatctctgtccgtcgccgtcgctcttgtcaccgtcgcgtcgccatcgagcatcgaacacttgcgaccgtcgccgaccgccgtctgcccctgtttcgaccgcaccgcgccactcgccgtcgaacttcgccgttccgccacttcgtggtaagccctcgcgcctgtagtcccgccctcgggcccgacgtccccgaaggtgccaggccacgtgggcgattgtgtctgcctcaagcctctggccat

SEQ ID NO: 19825 - DNA, 264 bp, Oryza sativa
  Clone ID: PAT_MRT4530_25248C.1
atggccctcggcgccgccgcgctggccgcccgccgcagccgccgcgccggcttcctgcacgcttcttcactgtgtgagacggccgacgtcccacctgccgccacatgccatgaggagcagaggctgcggagggagctcgtccccggtgagggtgccggggcgaagagctccactgctgaaaatctggcgcccaagatctctagttcatctagatcatggagaaaggaggatggcgagaggaaggagggcttgagaggatcatag

SEQ ID NO: 19826 - DNA, 604 bp, Oryza sativa
  unsure (1)..(604): unsure at all n locations
  Clone ID: PAT_MRT4530_25249C.1
gaattcggccccanaatacntccgaatagccanccagatccatctcggttctttaaaccgggtcaacccctatccttccaccaatcaaatacttcaatcaacagcatgtctaacaaccaagcatcccagaacgccgcggtcgctaccaaggatgatgccgcatccatcatgtcatcctcaactgccgccagcaccaccaagcctcacaaggaccagaaagacttcaccaagagcaaaaaagacagggcagacaacaagaaggtcacggattctgccagcatcttacgtgcccagatgaacatcaacctctagtcagcatggacatgcaacgagaccgcaaggtccaagtcggaaaaccaacttccactctcgtggccgataagttgctcagaagcagctgctatacaccaacatgtcgagtcgtgattgcaacacacgcaaagattggggactttgggcgtcacacagctggtgacatcgttgggatgacaatgatttgtgaatgaattgccagaaggcgtgtttaagtaggactgtctcttccatacatactctgttagataacaattgattgcactttttattcaaaaaaaaaaaaaaaaaa

SEQ ID NO: 19827 - DNA, 526 bp, Oryza sativa
  Clone ID: PAT_MRT4530_2524C.1
ctagccacgtttcacacgttcaactacattttgatctacggcgcttccacgtggcctgaccccctcgggggggtcgggcccgagggtgatgtggccgcccctccctctgtctccccgaggggtcgggccgctcccgtttcggccccgaggggtggggcgccccgaccccccagtcacagaccggtcagatcgcgggttaggtggcaacaggcggcctttcgcacgcctcgccccgtcccgtcggaatgatgagagcctccaggcactcgtccctagccggagccgacgtgctaactcgcgtggtagacaagaatgaccggtttgtgacgggtctgacgccggtcacgtcatcggcagacaaccgtgctcccacgttgcgcctcattcgccatgggccagacgtctcttcagcatcgatctgaaacggatgttgtggcagcgaggcctgaagcagtgccttcgcctcaagcgtcgccggccaccgctcgccggccaccgccacggtgtcgtcgtcctcctcctccat

SEQ ID NO: 19828 - DNA, 396 bp, Oryza sativa
  Clone ID: PAT_MRT4530_25250C.1
gcacgagggcttaaagagggaccaacatggcattgccgatgccaattgcatagaattctacttgacgtatgtcttccatgcataataagaattgtgcagatcataggattggaagcatcaggaataagtggctcaatctaagttggaggagtacataagttgctcgtccgtgtagtaatttctacagtattagggaagcttcgtagtgatgctatgctagttgtttcgccaccatgcaaccaacaaccttgcttcaccaccgaacactacctatatctacagcagacggcagatgtaaggctaaatgatatgagaggtgactgagttgttttggattcactagtcgtcaaacccgttcatccacacaaaagtacttctaataaaaacttaatagaa

SEQ ID NO: 19829 - DNA, 384 bp, Oryza sativa
  Clone ID: PAT_MRT4530_25251C.1
atggcggcggcggcggccgacgaggagagggaggtgcggagggcggtggaggagaagccggttgtggtggtggggcggcgcgggtgctgcatggcgcacgtcgcgcggcgcctgctgctggggcagggcgcgaacccggcggtgctcgaggtcggcgacgacgccgacccggcggcgctcgtcgacgccgcgctgcaggcccgccggcgcaaggacggcggcgacaaggctgcggcgggcgacggaggcggcggagcggcggtggcattcccggcggtgttcatcggcgggaggctggtgggcgggctcgatcggctcatggccatgcacatggccggcgagctcgtgccggtcttgaagcaggcaggagccctgtggctctga

SEQ ID NO: 19830 - DNA, 2700 bp, Oryza sativa
  Clone ID: PAT_MRT4530_25252C.1
ttactctatgaggaaatttgcaataccagcaaggatcataatggctgtgtgtgctaccttacttttcttgtgcttatgcacatcggctgaatcctccattccctcatgcttccttttcttctcatgatgtttctttgaatgatcgccaccagaatcatgatgcccacttttatcctttttcttgtccttatccttgtctttgtctttgtctttactcctatctttatgccgatgtttgtgcttcttatgctccttgtctttgtccctgtctttgtctttgtgctttttatgcttcttctctttgtctttggactcacttttcagtttaccagatatagtcggtatacccttttcagcagagggcaaatctactggagccgtttctcgaagctgaaatgcttgccccagtgtttccatgtcaaacggctggatataagcaggcttgtccctcaagtatgcgttctgaaccagctgatctagctccattccttctcctttacgaatttcagtgtccccaacaacattgtcaagataatgtgtatctgatattgccaatggcaaaggcttcttgcaaaagaaatcatggtgggcaagcaatttatagtggcttattaaatcaacagcaccagtgagctccctagggccttttccaaacttcttgtcatcagaatccatcaggttgaatcttagcctttgcactgctatagagttggcacattcaaagaaccagcacatacacatgagctccgggaggtgaagcagtaaatatcccaccgatataatacttatcttggcgtagaagagctcctgtgaaatggtatccgatcttccatcttgaacaactgcagtgccagtcaggtgacaatcagatagcattaacggtatgtgcagggaaaaatgggtgcaatgaagtttcagaataagcctcacccttagggagtgatttgcatggcgtgatacgatgtctcttgcaatgtcgattgaaataacatagcctggtccattggcatatggaggatacacaaattctggccattcctcgtacgtcacagcccatttaccatgccggagaggtctgtgtaacaggtttaggttacccatataaagaggcatggttctgttgtagacggagatctgtttcaatactacatccagcctcacaaaggtgtcatcatcacatttcatgatatactctgcggttacattttgcaccccaaattcacatattgcgactgttttcagaaccaccagctcatatcggtcaataaatggcagaatgacaacatctccaaaataatctgcttctgtcttaagtgctgcatttatctcttttctatgactcagtgcaacaaagaaccgagcaaccacatttcccagttggatggcagggaactgcatccagctttttcttatagccatgcgctcagcaaaatggtttgtagcagagattatgccaataaaaacctgaattggttcctctggtactgggcgagccttccacctatcagacatttccaagacctgctggagagagaaactaggatggacctttggaagagaggttgcatatatagagtgaacgtctacgccgcctgtcacagctaaacctgtggcatcttcaagagagaatcccatcctatgaggaaatgaggcaacatgacggcctcccacgctaacgtgatatccttcgataccagcttggatggtaagaacaaacatcttcccctctgaaaatgggtatggccatctcatttctggtttctttgctcggccgatgaacctgttcaaccatgagcctgtctttgtttcttttgaatcaacactgtctctccgatcccatttctcacatttaattaatccatccacctggtcgtcatccttggaggggttgccatcgcagcggtgcgcctttccccactgcatgcggaagcaggtgttcatctccagcacggggcggtggctccagtcgccgcgcagccgcgggttgaggtggaggatcctgggcggctcctccccctcgacggcgcggaggccgcggagctcgacggcgaactgcgccaccatcaccgtcccgttccctttcccgcgccgctccagcgcctccacgtactccgcccgcgccgcccgcgccgtccccaccaccgtcaccgcggaacccacggcgagcccgcaggggaggaacgccaccgtctcgccgtcgccgccgccgatgttgatcgacgcggggcacttggtctcgcccccgccgtcgcgggagaggatggagtccacgtcgcccgtgaacgcgcacgcctcctcccacgccttgccgcccagctcccacgcctcgtcggccatcctctcgagctcggagaagttcccgcctcgtccccaccgcctccgccccctccctccagcttcccaccgccgccgaaggatctctccagtgatgcgaccgtaccccgcgacggcgacaccatccccatcaccccgcgcgcggggcgccggatcctcgagccgccgcggcatcaccacctctcccgcgccgccgctcgccgggcgggtgacagccgccgggtcggcgatgccggcgaggccggagagcttgaatgacacgaacaggaggtacacgaaggccaccgcggcgagcagaggcgccacgcggcggcgcgcgcgcccgcggccgcccaggaagacctcggagcttcgcgccctcttcat

SEQ ID NO: 19831 - DNA, 1038 bp, Oryza sativa
  Clone ID: PAT_MRT4530_25253C.1
ccctatcattttttgtcttgatgagcgaagtaaatctgttcaaaatcatctggatgttccggctgcaccttcactgttgttttttcaccacttaaaattgcgcagtgaaagcaacttgacttctaaaagtcttccggaattcatgccgattactttagaagaggatcagcagtctctgccacagcacacatctgatctggttcatctggctgcttctgcttctgaagtttgttctgtttatgttagtccatctaatactggttccttggatatgggtaccgctggttgcatcaatcattctggttctgctagcagcaagctcaatactgctaaaaggactgtaagtctggattgtaatagcagaggtattggtggtgccaacataacaagcaggagttttccagatcaaattatggatggaagcctttctgctgtttgccctcctcagaagtatcaaaagaggtgttcttctatatctattcctggagataatatatcagatccaccagatgataagctacttaacaaagaagaaaaggccatgcagcctacatctgacttggtccaggaactgaatgagtatcctattggtcgtgttacaccaactgcccccaggactccctaccatcggaaccgatttacatccctatcacgcacttttggtgatggttcaaaattatggcaagaagatattatggtgacaggctttgctggtggctctaagaagccaaggactcaggttttgtactcggtttctcctagaagtgatgaacctggctcaaaacacaaaggacatttccgcaagatacagtctcatagcagtgcaaagagactttctgataattcaagaagtgaacagagcagtcctgagtcattggcttgtgttgcaaatgtcctagttacagttggtgatagaggatggagggagtacgatactcagatcacaattgactcttatgggcagaatgaaccgaggatttgtgtgaagcttgcagaaggaactaagtatgcttaacaagttcttcaagtttgcaggct

SEQ ID NO: 19832 - DNA, 880 bp, Oryza sativa
  Clone ID: PAT_MRT4530_25254C.1
tcaagcaaggagcaagcctaaaagagatccagagagaggtgaggcacgagcaacacctagatgatggatgagagccaagctggtcagggcaaggagtagcacaggttcggtggctaaagagacatcacagttatagagcgcctcaaagaggagggaggacaggggagggaagatgttgctgggcaaggtcacatttatagagcatcgtagaccacagccgttgaggccacagcccgccgccggcgccacagagccgaccacgagccgcgggtcggcgcaccgccagccggaaccagctacggtgcacaagccgtcgaggccaaagcctccaccgccagccgcagggggtggggggggagacgaggcccgctgccgggcgccacagccccggccatcgcaacctccgcccccgcggcctccgctgtcagccttcgccactgctacctccgccgccggtcgccactgcgtcttccgcgcgcgccgacctcctgtgccggctgccgccagccgccgagtcgccagacgctgccacctccgcctcccattgacgccgcacaggagtagcttgctccggccagatccggcgtggaggcgccagatccacccgtggggaggctggatccaccgcctccaccccgcgtcatcggactctcctccgcgcgccggcccgtcttccacgcacagagatgggacgccatcgagtgttggcctcgctgccgccatcctggctggccgcacggaactccgacggcgcgctccggcggcggcgagggaagggagaggaggagaaagtggcggcggtggcgctaggtttcccccgagtcgcccgcgcgtgggcgacgcgtggggcaagaatcataaggttctgtacgtttccagg

SEQ ID NO: 19833 - DNA, 579 bp, Oryza sativa
  Clone ID: PAT_MRT4530_25255C.1
atggggtcacttgggcctggagcatgtgatgaccaccacggttatatatctcatcacttggaggagggcctatgggatctatggggttacttgggcccggagcagtgtgatgaccaccacggttatatatctcatcacttggaggagggcctatgggatctatggggttactcgggcccggagcagtgtgatgaccaccatggttatatatctcatcacttggaggagggcctatgggatctatggggtcactcgggcccggagcagtgtgatgaccaccacggttatatatctcatcacttggaggaggatctatggggtcactcgggcccgtatggtggccaccaccatggcgatatatctcatcactcggaggacctaaggggtcactcggacctgggacggtaccaccatgatgatatatctcatcacttggaggacctagggggtcactcgaacctggaacagtacctccatggtggtagatttggtgcaaacctcccgcagataaaacttttcgaccaccaacacccgaggaggaactgctacctacaacttgagcaattggtgttgcaatga

SEQ ID NO: 19834 - DNA, 510 bp, Oryza sativa
  unsure (1)..(510): unsure at all n locations
  Clone ID: PAT_MRT4530_25256C.1
ggctgcaggattcggccgagntcgngccgnatnctgctcgaagatgnantccccgtgaggggactggtntnngagggaggccactcacngagcgatntggactanntggnttccancacctgtntctcgctgcaggacnacnanatnncctacnctgttcncatctctaactgcggctccaaacatnntcctctcccctcgctgcatatgncgaggaaacaggcnnnggngaaaagtgnagccangaactantggacanccccgntttcccncctgtgttnggaaattactgggcccatcctgctnaancccanggattnattttnaggaangcntccaaacctnctgccttgaaaaaccctctnaangntcccnnttcgaagaaacttccaagaaatttaaagcctccttctttganaccncnggnccggtnccnccnaccaagaagaatcaccgaaaataangaaagtccttcccacccgtctcccttgcccnccngctgtggcggaa

SEQ ID NO: 19835 - DNA, 832 bp, Oryza sativa
  Clone ID: PAT_MRT4530_25257C.1
aatggcatcgatgtcctacttcatcgttgctatgctcatatccaattgcttgggtttcattgcaacaccaattgctcaagttgtaggtagcagttcctcctcgggtgttggtggtcgaaaagttttatctgcgggaggtttgcaccaaatctaccaccatggaggtactgttccaggttcgagtgaccccctaggtcctccaagtgatgagatatatcatcatggtggtaccgtcccaggtccgagtgaccccttaggtcctccgagtgatgagatatatcgccatggtggtggccaccatactaccccgggcccgagtgaccccataggtcatcctccgagtgatgagatatatggtcatggtggtggccaccacactgcaccgggcccgagtgaccccatagatcctcctccaagtgatgagatatataaccgtggtggtcatcacactgctccgggcccgagtgaccccatagatcccataggccctcctccaagtgatgagatatataaccatggtggtcatcacactgctccgggcccgagtaaccccatagatcccataggccctcctccaagtgatgagatatataaccgtggtggtcatcacactgctccgggcccaagtaaccccatagatcccataggccctcctccaagtgatgagatatataaccgtggtggtcatcacactactccgggcccgagtgaccccatagatcctataggccctcctccaaatgatgagatatataaccgtggtggtcatcacactgctccgggcccgagtaaccccatagatcccataggccctcctccaagtgatatataa

SEQ ID NO: 19836 - DNA, 714 bp, Oryza sativa
  Clone ID: PAT_MRT4530_25258C.1
atgcggctactcaggactcagactcagcatacccagactccgacctccacgtttcgcacatcttcggaggttgcacggcgtactcctcaaaacgagagtacaagaaagtggagcgcgccaaagatgaagtggtcagagcagaagatcgaattattctcagaggcagaccaccccaagactgctgtcactctaaggcgatatccgatcgtggtcgagcccactattcggaatatcaaggtcgcacgagttctcatcgacagcggcaactccatcaacttactcttcgccagcaccatagacgcaatggggatcccacgaagcgagttgacacccactgaccaacccttccacggaattactccccagtcgtcgtccaagccattgggcaagatcatgctaccagtgactttcgggaggactgcactcgtgaagttcatggccgcatctcactacgcgtatcaagtgctcaagatgcctgggtggaagggaacaatcactattcagggaaacgcgaagctggcgatacagtgtgacaagcggagcctcaacatggtcaagcacactcccaacccgcccgccacagctgagccacccaagaaagtgagcaaaaccaacaagatgccgaagccagatggcgcaaccaagattgttccgctctccagtgccaaccccgacaagactgtcaagatcagggcgtcgctggatgagaaatag

SEQ ID NO: 19837 - DNA, 133 bp, Oryza sativa
  Clone ID: PAT_MRT4530_25259C.1
ggggtcggggcgccccagccctcggggccgaaacgggagcggcccgacccctcggggggacagagggaggggtggccacgtcaccctcgggccctcaggccacgtgggtgaccgcggctacccaagcctctag

SEQ ID NO: 19838 - DNA, 324 bp, Oryza sativa
  Clone ID: PAT_MRT4530_2525C.1
atgggcctcttactgcctaagaaaggaaacatgctttttacaatgagggctagtctacagccggaagtgacctctgacaagcagagcacacgccttctgctccgctcgttcgctctcccggtggacgcccgtttcaaccttcatttaatggccagcgacttccttgctatacttgcgctgaagcctggaatggatctgaccgggactgacataccaactccaggagttagcacgctggctccggctagggacaagagccaggaagctctcatcattccgacgagacggggcgaggcgtgcgacaggccgcctgttgccacctaa

SEQ ID NO: 19839 - DNA, 213 bp, Oryza sativa
  Clone ID: PAT_MRT4530_25260C.1
atgcatcgggagttcgggctggaccaagacctggacacggtggatccctcaccgatcggaaccgatgaacatgaaggtagcagattgctgatcgagctaactggcttttcccaggcggtcacctccaaatgtttgctgaaatcgagatttttgtacgcgggcactggaaccgcatatgaaaataaaactttagcatgttacgagaagcctgtc

SEQ ID NO: 19840 - DNA, 603 bp, Oryza sativa
  Clone ID: PAT_MRT4530_25261C.1
ctatatctcgaaaaaataataaaaagcgtggccccacatgtcagtctccttcccgggcagaggacggcgcgggtgggcggcggagcaggcgagctccgacagcggcggcggccatggtcggcgccggcccccgaccggagcgccgccggtccgcgtgaaggcgagcagcgcggcggcgccctggaagacgccatcgacgccgccatccgtgccgccgccgccgaccacccggacgccctccgcgcgcaccgggacgacatcaccgagcgcctctacaccgcgctcgtcgtcctcccgccgccgctccacaagccgccgacgcctcggcgaggaggggaggaggcggaggggagcgcggtcaacgatgacggatggccccatccattgcgccgcccttgccgccaacgccaccgacggctcgcttgctcgcatgcggggaggaagaggaggcgaaaaggccgacggtgagcacgcggggagagggaggaggcggcgcgggagcacgccggggcttcgagtcgcccaccacccgccactcgccgtcgctccacccgtcaccccctctgcgccggcaacgccgccgctcgcccttctgcttgccat

SEQ ID NO: 19841 - DNA, 150 bp, Oryza sativa
  Clone ID: PAT_MRT4530_25262C.1
cagcaatggtaacattcaccatctgcatgtaggagctggcgctcccacatccagcaatgcctcgttgccgcaattcttggcctcgcagggcccacattcccctcacagtacagtctgtcattcacattctgtcaatccatgtccatcagc

SEQ ID NO: 19842 - DNA, 521 bp, Oryza sativa
  Clone ID: PAT_MRT4530_25263C.1
cttaatggttttttttttgacaaaaaggaaaggcttcttttatttatcaaaagggaccaaaattttacagagcgggaccttgcccccttaatttgcgattttacaccccaacctaatgggtggaaataacccaacacgggggccccttcgggcaaggaacggtttaaaaccatcagagaacggggtggtcccccaaaaagagggactcgaccgaaaggaagggtaaccccaaaaaaggcggccaaatcaccagggggggctttccggtcccaaggaggacttttgcaattcccgggcaccctgctaccacaatgggccagggcccacccccccgggcaaggggcccacccttggaagagaggacccccacattggagggcccccggcaaaaacggaacaacatcccccttgataggagggagagggccaccccttaaaaaactccagcaaacacaaatttccccaaatctgaaaaaacatcctggacaaccaagtttggcctcgtgattttgaacctcaaa

SEQ ID NO: 19843 - DNA, 435 bp, Oryza sativa
  Clone ID: PAT_MRT4530_25264C.1
gccacgcgtacggtttactatgggtatttgaagggctgggatcatatgcttgcccagttgcacactggacacccagaatttggtgataaagatggtggaattcttgctatgcatatagatgacttaagggctctgctccctctatggctttagaagacctaacaagtgaggcaggataagtctcattggtcaactaatattacgggtgatatatatggaatgggctgcatcagagagatgtatgggtactcatactggcgctgcataagtacgcctaccacacaagattaacgatgacatactgatttacccaggctatacttcaagaatcggaattgatcctcttattctgcactatggtttgccattgaaaggagggaactggtctttcactaatttataacaccatgaggatggactagcttatgattgcaa

SEQ ID NO: 19844 - DNA, 2611 bp, Oryza sativa
  Clone ID: PAT_MRT4530_25265C.1
atccatgacccatggtttcgccttaacatcgaggccccgtctatggatgattccgtccgttccaacaacctctccgcctcctcgtccccgtcctcaacctcaccgcctccccgccgcagtagcagagtcgcccgccgccgcgcatccgcatggcagcattatcagggaagatcattcaaaatgcattcttggcacaacatcgcccacaggctagacacagcacaagatatcccagtgacttttgtgccctcgatacccgcagcgtgcattctttccaggaatgtagactaagactggctggtacttcagccaagtggttaaatacaatatcaacagcatggattagctccagcaaacaagcatatattagctgcaatgctgctcaaggtagcagcgttgtcccatcctctgcgaaagttgactttttaaagctccagaatggcagtgatattcgtggtgttgctgttggtggggtcgaaggcgagcccgtaaatctcactgagcctgttactgaagcaatagcttctgcatttgctgcatggttattaaacaagaagaaagcggatggatggagacgtttaagaatttctgttggacatgattctcgaatttctgcacataaattgcaggatgcagttactcttggaattaccactgcagggcatgatgttttacaatttggattggcttcaacaccagcaatgttcaacagtacacttacagaagatgagataaatcattgcccagttgatggagccataatgataacagcaagtcatcttccatacaaccggaatggtctcaaattttttacaagtgccggtggtttgaataaggctgatatcaaagatatcttggagcgcgcttctagaatatatgaggactcttctcatggtagcacacaagaattagagcaagcttcgaagggagaagtgagtaatgtcgattacatgtcaatttatgcatccgatcttgtgaaagcagttcgtaaatgtgggataacaatgttgaaatggttgagaaaacgattgtgaaatggttaaatataaattatgataaagataagaaaactcctggttcttatgtctgttctcatatggtcttagaaaaaccactggagggactgcacatagtcgtggatgcagggaatggagcaggtggcttttttgtggataaggtactcaagccgttaggcgctattactactgggagccaattcctagagcctgatggcatgtttccaaatcacattccaaatcctgaggacaaaactgcaatgaaagccattacacaagctgtggccgataacaaggcagacttgggcatcatatttgatactgatgttgacaggtctgctgctgttgattcaagtggtcgtgagttaaaccgtaacagattgattgctttgatgtctgccatagttcttgaagagaatactattggtgaggagtcacatttagctatggaaacaagtggccatggagcactgaaagagaatcactggctcgatgatggtgcatatcttatggttaaacttttgaataagcttgctgcagctagaatattgaatccaaacgttggtagtaaagttttgactgatttggtcgagggccttgaggaggcttctgtgacagtggagataagattgaagattgatcagaatcatgcagatttgaaaggggggtccttccgtgattacggagaagctgtcttgaaacatttggagaatgcaatcagtaaagatgaatatctgtgcaaagcaccgaagaactatgaaggcgtaagagtttcaggatatggtggctggttcttattgcggttatccctccatgacccagttcttccccttaacatcgaggcgccgagcaaggatgatgccattaagcttgggcttgcagtgcttactgccctacactccgtcggccgctccgcccgcgatgcccagccggacggcgccgcccctcctcgctcagtagccgtacgcgccgcctccctcctcgcccggccacctccgccgacgtcctcgatggtcacatccgggtcggagctgcccttcgtcgcccggccgccgagcgccgcctccctcctcgccggtccgccgcgcgtcgcctctcctagccaggccaccgagcgccgcctccctcctcgccaggccgccgcgcgtcgcctctcctcgcccggccgcctcgcgccgcctctcctagccgggccgccgagcgccgcctctccttgccaggccgccgcgcgccgcctccctcctccccgggccgccaagcatcgcctccctcctcgccgggccaccgaccgccgcctccctcctcgcccggccgccgggccgccgaccgccgcctccctcctcgcccgcccgccgggccgccgagcgctgcctccctcctcgcccggccgccgcgcgtcgcctctcctcgcctggccgccgcgcgccgcctccctcctcgcccggccgccgcgagctgccatccctcacccggacaccgcccgccacctcggggatgggagaagcgcctcgctgtcgacggcttcagctccacctctcctggagctagagttcagccaaacagtttcagctccatcaaaactgggagtggagtag

SEQ ID NO: 19845 - DNA, 1622 bp, Oryza sativa
  Clone ID: PAT_MRT4530_25266C.1
atgtacggcgcgccggtgtccaaggacctgagcctgcagccagccggggtgcggacgccgccgcagatgagctcgccgggcttgctgcggtacaggtcagcgccgagcacgctgctcggggaggtctgcggcgacttcgtcctccccggtggtggtggtggtggtgggcagctgcagctgcagctgcagcagcagcggcctgggagcccggaccacgccgcggacaccgtcctcgcgcgcttcctcgccggccatggcggccacgacaacaagcctccccgccccgccgcccacttcgccccaccggaagactccatggcctcgcatcagcagcagctcatgtaccagtcgcatcagcagcagcagcagatggcttccgccatggagggactctaccgcaccgtcagctccggcggcacggagtccaccgccgccgccgccggcaacagcctcctccggcagagcagctcccccgccggcttcctcaaccatcttaccatggacaacggatacgggaatatgctaagagcgggcatgggcggcggcggcggtggcggcgacccgcggctcaaggggcagctcagcttctcgtcgcggcaggggtcggtgatgtcccagatctcggagatgggcagcgaggacgaggagctcgccggcggcggcggcagcccggaggctggcagcaacggcggtggcgccgcacgcggcggctacggcggcgggtacgcgatggggtcctccgcctgggaggagccctcgccgccggcgacgtcgctcctcccggacagcagcctcccgtccaagcgcccccgcgacgacctgccgcggcagctcagcctcccggcggcgtccaagaacagcagcaagcccccctcctccgcctccgccgccgcgtcgccggagatggccgccatcgagaagttcctccagttccaggacgccgtcccctgcaagatccgcgccaagcgcggctgcgccacccacccccgcagcatcgccgagcgggtgaggaggacgcggatcagcgagcggatacggaagctgcaggagctcgtccccaacatggaaaagcaaaccaacactgctgacatgttggatcttgccgtggactacatcaaggagctccagaagcaggtcaaggtgttaaacgacagccgttccagctgcacctgctcggcgagcaagcagaagcacttcgccggctaaatcaatcaagtcaatcaatcgccatgaccggtgcagcagtgcgcaacacacgaacggccgcaaaaggcatgcagcagaagcatctgcaccggcagtttttctaagcttcgtttccttctttgctgatgaattcgctggtctatctggtaaattgaacatgagggcattggattttggagcagtggcatgcattcttcagagttcacaaagatgatgggttggggttccacatggtagtggtagactactgtagctgcaaagcttgattaattaattagcctgttcttttgataatgaaggagaggagagtaactcacaagtgtatagatggttgtctcatctctgtttgtcatagtacacaccaagtgcaagttgcagctgtgtctgcttgcaagaaaaaaaaaaaaaaaaaaaga

SEQ ID NO: 19846 - DNA, 969 bp, Oryza sativa
  Clone ID: PAT_MRT4530_25267C.1
gcaaaatcgaattccttgcatcctcctcattccatttttgcggttttcgatggattccatcatcgccgacttggagtcgccggcggacgccgattgacggagttccaccaccggcagccggctgcactatgcacggcgccggctgagcaccgcacctagcgcgcagcgctccgcatagccgccgcactacgccggccaagccgtgcccgcgagcctacccgtgcacgacggccggcgcccatggccgccactcgaacgcgccattcacgggagaaaagaaagaacaagaaaagggagaaccggtagccacgcggccgtgctcgcagtgccggcagcctcgccgccgtaccagcagcacggccgctccccgacagccggtggcctggccgcaccatgcgcagccgcgccccgccgccgactatggcgacgatgtgtcaagccgggtttttcgagccgccacctcgcgtcccgctcttgtacaagtaccgcgtgctgcaccgcctggccgccgacccgccgtcggccgtcgcgccgccgccgcatggccgcaccgctatcggctgccgcgccgcgactgtcgcgtcgcggtcgccgtcccaaccgtcgtgccgtgccgacccctggcagctcgcatgccgtgccgtcccgccgccgccgtacggcggctccatgacccgggccgctgcgccggccgcgcctgctccggccgctgagcagccgcgcgccgtctgcgtctgcttcggccgccgagccgccgcgcgtcgtccgcgactgctccggcagccggaccaccgctccgcccgcacctgcccgggccgccgcgagccggccgcgcctgccccggccgacgggccgctggcgccgcacctccccgaacgccgcggagacaccagtcggcgacgacgaaggcaggccaatagtgaagatgtagacgcggcgacgaaggcaggccagtcggtgaagatgtag

SEQ ID NO: 19847 - DNA, 1758 bp, Oryza sativa
  Clone ID: PAT_MRT4530_25268C.1
atgggggtgctcttctcgtgcccggtggacgatgagaccgcggcggtggaggacgccgctccggtggcggagcaggcggtgctgaaggcgtcgctgggctccggggggaggctgcggatcgaggggtcgctgagcttcaagacgagggagcagcagagtctccaggtggagaccaagatccccgccgtcacctcgccgcgcgccgcgccggcgccgatgccgagggagctcctccgcacgcgcttcgctgatgccgccgccgccgccgcgccggagagccccaagcacgaggccgcggcggtgacgctgcagaaggtgtacaagagcttccgcacccgccgccgcctcgccgactgcgccgtcctcgtcgagcagagctggtggaagctgctggatttcgcgctgctgaagaggagctcggtgtccttctttgacatcgagaagcaagaatccgcggtgtccaagtgggcaagggcaagaacacgagcagccaaggttggaaaggggttgtccaaggatgataaggctcagaaactcgcattgcagcactggcttgaagctattgacccgaggcaccggtatggacataatcttcactactactatgactgctggctgcagtgcgaaagcaaggagccattcttctactggcttgatgttggagaaggcaaggagattaatcttgaagaccggtgcccgagatggaagcttctaagccagtgcatcaaataccttggtccccaagaaagagaagactacgaggttgtgattgaggatggcaagttcatgtacaagaacagccgggaaatccttgacacatctggagggccaagagatgacaaatggatctttgttctgagcacatccaagaatctgtatgttggtcagaagaaaaagggcaaatttcagcattccagcttcctcgctggcggcgcaacgtctgctgctggccgactagttgtcgaagatggaacactgaaggcaatctggcctcacagcgggcactaccgcccgacagaggagaacttccaggagttccagggcttcctcaaggacaacaatgtcgacctcactgatgtcaagatgagcccaactgaagaggatgaggagttctggagcaggctgaggagtatcccttctgaccggtgcgccgatgccgctgacaacactgaagaagagatgaactcttctgaacaaactgtcaattgccaaacgcctgaagccactgaaaccccaactgaagagatctcatcacaacacatccaagaaacaatcaacaatcctagcacaactctgccaagggtggcttcatcagaaggccccgcgacatcgaatgccggcgacaacggctcgtctgaagaaggaggagaagatcatcatcgtcaggaagagggcgatgagccatcatcgccgtcgtcgtcgtcgtctgtgccgagggagaagatccttgagaggatcaactccaagaaggaggccaagtcgtaccagctggggaagcagctgtcgttcaagtggaccaccggcgccgggccacggatcgtgtgcgtcagggactacccgtcggagctgcagctccgggcgctggagcaggtgcacctgtcgccgaggagcgccgccgccgccgccggcggcaggccgtcgtcccggttcgcgtcgccgcagaggtcaagcagcccgatggcgagagggtgcagcgagccattgacgccgagagaggcattccgctcgcatctgcagcagggagtgctgatcaggtga

SEQ ID NO: 19848 - DNA, 3235 bp, Oryza sativa
  Clone ID: PAT_MRT4530_25269C.1
aaaccaaagccaaatgaaatctgtaagctcaagcaacagtgtaatggttgcggaaacattgcaaatcacgctaatacataccgcatgttacatatacattgcactgttcttagttcttactaccaacgtgatcaaaacgacacagctcaagtgccaatcggccacacttaatttacacctgaagagggcaatccatcatccacggccacacttaatttacaccggagaaggggcaatctatcatccatggaggctaagcagtcgcaacgacatttggcctggtcatggcttcctttctccttcctgccagaatccttttcagcaagttggtgttccccttctgcttgctcggcataagtgctactaccttgagagcagcctcatccttgcaagttccattcacatcgtagggcctcattggtggtgccaccggcattgggtgggaactgcatgttactgaatcatcgcctccgttgtcgacagagcaacttctttcatgccgcgatcttagttccgcgcatatgatctccttggttttgggggagctgaggtaatcgaatcctccatcatccatggctagcatctcgtttagcgactgagaccggggttttcgctcagactgaatttttgtatgaaccactttgtcgaaaaggatcgcatcctttggagatgcaagtgctttcagttgctttcccaggtttaggattgtctcctgacactcgataagcttctctgatgctgttgagatctccagccgcatctgtacatgctgatcttcattcctagaaacacattttggaccttctttagcagggaaacgttctagctgaagcttggattcaagagaagacactccgtgttgattgcccttgtttatgtcagagttggatggtttcccaagttcattgattgtggattcaccatcgacaccatgtgccatcatttttcctgtttctttcaatgcattaagctctgctcgcaggcttgaagcttttccttctgattcctcacatttagagactggtattttattcctgaaaatttctgagtcatcatcagctttatatccaatatccattaagcttgatacggatactatcgccatctgcatcttgttaggcgtcctgggttcacacatgccatctgttgtttggattccggtgtgcttaattactggaacaacttctagtccggaactgctatttatctccaagttctttatgatagtctccctcatgtctgatacatcttggagtgaaaagcagtggctgattatccagtctagtgtgatattgatttcaagcacaaatctttcaacatctgtactcccatacaaaagctcgttacacccaaggacgaaattttgtagtacagaagtaagttcagacgttttccacaggaatgcacgtgcaacgtagccagtcaatgtgttagagcggtcgccctcactgccaccagagagcacaacagtgctactataatcttttgatgatctctggacaacaccctcaataagttctatcaacttcaggactgccttctcaatcttgtgctgacggagttggtcagatgtttcaataggaccatcaactgttactagctctttccctgatgattctctagactccctccttgaatcatacgattctgtaggtttcgcatcacatgccaatgctaacttttctatctcttcaaagtcgtccatgaaactcaagtctgatactccggtactcttacaagagggtgtagtcagcttccccttcttgaagtgttccagttcagaaatcaaggcagacgcccatgagcttgaacagctgacattatcttcattgcaaccgtcctcggagattgatgatagagggttctcgaccactgtaggactgcattttactaaatctgttgcaacccgacctcttgataactcctcaagctgagcttcaacttgggaaagtttagaggttgtgcgagcaagcatggtccgcgaatactggagctcaccatccttactagaaagagattccttcatagtcttattttcgtcttccatcgcatgcagccttgcaagcaatgaagaactttcatgtgatgcatcataggagttctgcactagattgcctgagttgaatgatgttgtagaattgaaccttctcgtccttgttattactgcattgttacccagtgtttcaacttcatttctcattttagcaatggcagcagggcctggtagccttttacgtaccattgaacgcaatctctggcattctgcttcaagttttgtaatcttttttacattctcaagatgttgtttatgtgcagcatcagcagatttcaggttaaatttcctttcctcacttcgaatatcaagttgcttctgcagcatgcaaacctcatatctaagagaagaattcaatttgtccgctgactctagttttacctcaaggttcttgaaatttgactctatcacaccctttgcttcagttaactctgagatcattttctctttcattgagagcatttcagaaagtttcctattctcggcatccaagctagcaattatgtttattttctctactacatctccttccagcctctcaactttaacttgctcatgagaaatcagtttagcagtgtcctttatcaataactccctctctaccatggcaacatttagagcctcatcaagatggcaaatcctttgctcaattgcggctttctgatctagagtatcatcaagttgtgtcttaatagctattgcttcaccttcagctttctcccaacctaatattgcttcttccgccacttttgcttgcttagctaaaatagcatccttctccacgcattcagcttgagcaaatgaaatctgttcatttaagcattgcaaggatctctctaaccgtgcaatcttctctttctccagtgacaacaggtggtggctctgctgcagctcaccaagaatgaactgccgctgcctcactgtgagcctgagagtggataggacctgcggcagtggcccataaggagggcgtgcatcagtggcatcgaccaccgtcagcttagaacgtttgtgtggtttacccacttcgagtaaaaggctgagctgaacatccaggtccagtccatgcaggctggcccggtgccaatctgctggaccaccagcccatagccaaaccaagctaagtagacttttgggtccaccggtccatcccgccgcatccgtggagtcacgtgtcctcat

SEQ ID NO: 19849 - DNA, 620 bp, Oryza sativa
  unsure (1)..(620): unsure at all n locations
  Clone ID: PAT_MRT4530_2526C.1
aaaaaaagagaatctggcgtctcgtcgtctcctccgctcctcctctccttgcgccaacaagccgactcgcgatctccatcgggcaagaagagcagagcagagcaggggaggggatcctgcaggcgcacgcatcgcccatggccaccttcgagctctaccggaggtccaccattggcatgtgcctcactgagacgctcgacgagatggtctccagcggcaccctcagcccggagctcgccattcaagttcttgtccagtttgataagtctatgacggaagccttggagaaccaagtcaagagcaaggtttctatcaagggccacctgcacacttacaggttctgtgacaatgtatggacattcatcttgactgaagcatcattcaagaacgaggagactacagaacaagttggcaaggtgaagattgtggcctgtgattccaaactactcagccaataaattgataactgcgagngtcagggtttgccctggtatttgttagtctcttctgctagacctggctcccgnnctgaagtgtactgtaccccccacattggtttgtttcataatcaatgtgtgtncaatacaatcgtatgtgctaccagagtatatcacagcagc

SEQ ID NO: 19850 - DNA, 301 bp, Oryza sativa
  Clone ID: PAT_MRT4530_25270C.1
ccactagaacgaccagaggaggccggcgacgaaaaacatcgaggcggagcagcgccagcgccaagcacgggcagatcctccggccggcgccgaacggcatcatcttgatctacttgatgacggtgaggaacacgtcagcgccctagccgacggagaggaaccgcgcgggacggaacaccaacggagaaggtcagaccttgctgaagaggcccgtctaccccaccgagaagtacaccggcgtgtacgccggaacgcgggacccgtccagcgacgaaccctccatcacggtgcgggggagcag

SEQ ID NO: 19851 - DNA, 1521 bp, Oryza sativa
  Clone ID: PAT_MRT4530_25271C.1
tttcgctttttccatgaggaaacaatatagcagaatttgaaggagttttgctagttatgagaaaggcaaaagcactaggggctcagctcttgataattaaaactgattcaaagttggtagctagtcatttttcgaagacaattgaggcaaaagaagaaacaatggcaaaatacctacaagaagcaaggttgaatgaaaagcactttcttggaataaccgtaaaagccatagcaagagaagaaaacggagaagacaatgagctagcaaaagcagctgctgcaggccaaccattggaatattcattttttgatgttgtaacttactccaagctatgagagaaaagagtttacatgcatacaaaaagtggcaaattggagagaaccaattctgaagtatcttgttagtgaacaacttccagagaaagaagaggaagcaaggagctacaattgatgtccaggaagtacaaagtaatagaaggacagttatacaagagcggagttaccactccactgttaaagtgtgtaacaagagaagaaggcatgagaatagtggtggagatacatgaaggattgtgtggcgctcaccaagcaccatggtcagtagcatcaaaggtgataagacaatgaatatattggctaacaatcatgaaagacacggagaaatacatcaagacatgtaaagcatgccacaaatttggtccaacatcaaaagcactaccgaaagagttgcaacaaattccaccggtttggccattctatagatggtgatttgcttttggtcattatggcaattgagtatatttcaagatagattgaagcagaagctgtagcgaggatcacctctgcggaagtacaaaagtttgtttggaagaacatcatatgccgatttggagttccaagggagatagcatgtgacaatggaaaatagttcgagtcaggaaagttcaaagacatgtgtaaatcactcaatttgcttcagtaggccatccacaaacaaatggaactgaagaaagagcaaatggcaagataatggaagccattaaaaagagggtggaaggatcagctatgggaaaatgggtagaagacctattgtcggtgctttgggcattaagaacgatggtggttcgatcaactggaatgacaactttcattctagtttatggagataaggcaatgaggccaagtgaagttggagcaaattcacctcgagtcatatttcatcagcaagatgaagaagagagattacactagaaatgctagacgagataagagttgaagcattgtacaaaatgacaatgtacacagaaggaaccaaaaactactacaacaaaagggtgaaaacaaggaaaatacaagtaggtgatttggtattgaagttgttgttgggaaacttgagtcaaaatgggaaggaccatttatagtgaagaaaagaatagaaacaagcgcattcaatttgccatatcttgatggagaagaactaaagcacacatggaatgccatttcattgaagaagttatatgtt

SEQ ID NO: 19852 - DNA, 321 bp, Oryza sativa
  Clone ID: PAT_MRT4530_25272C.1
atggccggggacctcgcccggggagtgggcgacgacgatactggcgcagtcctgcccgccggctccgagacgaggcgctccatattcagctgggatgacaagttcgtcaaagcgcaagcattggggatgactggtgctgcagccatccgaggcacaactgaagagaaaattgtaaaatgttcgattgtgtctggtgtgccaggacctctgtttatcttggataaagtaaaggtctttgaagacacttcaggagtggacaacaaatacaccattgtgcaattcacaggtggtttatgtggtttgaacgttaagattctttag

SEQ ID NO: 19853 - DNA, 183 bp, Oryza sativa
  Clone ID: PAT_MRT4530_25273C.1
atggagatgtgcgtggatgaaggaggtttcgaactttcgacgggttatactcacagacagacggagcgcttagagatcatgacgtgctaccctctgcagacggatttgaaccgtattagagacttgacaggcaactggactaggatcttcatgaccatctccttcaacgtctatatcgtctaa

SEQ ID NO: 19854 - DNA, 439 bp, Oryza sativa
  unsure (1)..(439): unsure at all n locations
  Clone ID: PAT_MRT4530_25274C.1
cttgtttttgggtttttttttttttttttttttttttggggttttttttttttttttttttttttttttntaaaacaaagaaaccctttttttctcactttaagggaaaataacagccccttcccaatccaaaacaacccataacccttttttaatgggggagaaggggaaaaacctttttttggggggggggggccaaaaaaaggagggggggggggaaaagggaaaaaataaccacctttttaaataatttaaacagggttcccaaaaaaagttagggggcccaacccaaaaaccttttctaaaaaaaaaaaaatttgggggaccttccaaattaaaattttacaggaaaggtttttttaccccaaacctgggccccttttaaagccccgggggccctttttcccctttttaaaagggttgttgtcccattttgttt

SEQ ID NO: 19855 - DNA, 988 bp, Oryza sativa
  Clone ID: PAT_MRT4530_25275C.1
cgcccgtacccgtcgcgtccacctctccagtccagtccgccacggccgcatctcccgggtcgacccacgcgtccgcaaccctcgaacaatggcgagggctcgccggggacgacaaaacgccgccgcatcgccgccgtcgctggccctgcagctgcaggtggccagcctcgtcatcgtcttcgtcttcgccttctcctccgccatcacgcctacacgagctgatcatgtagaaggacacatgtcgcacgagatgtttggctacgaaaacgacgcgacggggccggcgaagtggggctcgctgcacaaggagtgggccgtctgcggcgacggcaagaagcagtcgccgatcgacatcaccacggtggagccgcagaaagtgaaggagccgctgatgcaagcctacaaggccggcgccaccaccattcagaaccgaggccacgactacatgctgaaatggaaagatgggaatagcaagctgacggtccaagggaaggagtacacgctcaagcaggtgcactggcatgaaccctccgagcacacaatcaacggaaccaggttcgacgcagagatgcacatggttcacgaggaccccagcatggcgagagccgtcgtctctgtgctgttgagcaccaaagcaggccaacccaacgcagtgctcaccgagatggcgccacatttcaagaaccttgctggtaaagagaaggccgaggaggaagtgaaggagcctgttgatccatcgacctgggtagataaaacctcaggctactacagatacgacggctccctcacaacaccgccttgcactgaaggagtgatctggacgatcatgagcaagataggagatgcatcgaaggagcagattgacttgctcaagacagtggctacgactgtggaaccaaatgcacggccagctcagaaactcaacgatcgaattgtgaggtactttgaagtttaatctaaagatgaattagggtgtgtttagttcctg

SEQ ID NO: 19856 - DNA, 337 bp, Oryza sativa
  Clone ID: PAT_MRT4530_25276C.1
tttttatttcttttttttcaaacaaaaaagggtccatatttaaaaggacaaaaggtttccaacatacctaaaagaatccataaaggtcatgggaaacccattaagggcccttcaccctttaaataaaacaacacacaacacacaagaaataaccccggggtttccaaacgggcatatttaagtttttacatgaccagccccacgtggatcaacaaacaaacaaggcacctaaaattgaaggaattgaattgaaaaaaaaaaactggggggggggggggaagctgtttaggagggcatgtctgtctttgaacaaagaaaactaaagggccggggaatt

SEQ ID NO: 19857 - DNA, 553 bp, Oryza sativa
  Clone ID: PAT_MRT4530_25277C.1
tgtttgacttttgaatgtggatattccgatgtaaatatattatccgtacgtgtgtgacacctgtagatcatggatattgcatctctcttctaagctctagtctgttaccatatgtaatgacaaactataggctttagtatttaccgagatgtaatgacaaaatatgggttttcagattatattcatgttgggaatctctactactagttgaccgctaaaaaatgcttcacatgtaaatagatgtagtgaacatttctgcatggaacaagagaagaacaaaattagaaatttgaataagaaaaagccataaaactggtgtacatataaacatttggagaaaatataagatcttccacttgctatgctgttacgaaaactccgactaaatagaaaaactgattggtggtaccatgatgggacgtacttggtactgcgctgctagagataacatatgctttaaagtgaaacttaattagaactaactaaagatagaatcatgccttcgagagcaattacaatcttccaggcatgtgatataccagatgtacgatgt

SEQ ID NO: 19858 - DNA, 348 bp, Oryza sativa
  Clone ID: PAT_MRT4530_25278C.1
atgagcattgggctgataacccagtaatctgacatctgctcagagcaaccatgaaactccatctgtaatatgtctctaagtcagactgtctgttgcactgtccaagacaactgaaatggtccagtgccatttcttgctgcatctgcatttcttatctttgtaccttggagacatctgctcctgattcagtcctggaggtgtacacagagagatgccgctaaggaacagacctgaagttccccgcggattagagagtgtgggccccattccaccgctcctgtgcagatgatcaaccccgaagcagaagagatgacatgtgctccgtgctgtcaagagctcacatttccc

SEQ ID NO: 19859 - DNA, 1399 bp, Oryza sativa
  Clone ID: PAT_MRT4530_25279C.1
accaaactttctgatgacatttttttttttttttttttttttttttttttttttttataatcaacactgcaatttgcctccactttatttcagatcgtagtacagaatacagaccacatctgtagtagttcatgcaaagttaccgctagagtactagctatgacaagcaagttcatgtgtatggagctctgttgttttacaggttgcttgaatcaaaagtaacaaatcctttctctttcaagctctcgatggtctccttgatgctcgtgtgcaggggagtcagttccaggcccaagctttttatcttttcctttgatacctggtagattggcactgatggcttgtcatctgcacacttgtctggcagaggaatattgggatacatctcacgaatgatttggacgagctctgagtagtgcgcaactctttcaaccatgcaatatcttccatttgctgaaggaacttcatatgcaaggatatgtgccagggcaacatccttaacgtttatccagccaaagctgaaattaggatatgtcgaggatgatccattgattagcttcagaattgcttcagcactagtattcagtgaaggctgcagcaggggaccaatgaccattgctgggttcaccgtaactatttcaaatccattatcttttgaaaacttccaagcagcctcctctgctagggtcttggacagaacataccattgctgatgcttttcacaaatctctggaactgaaaaccatgtctcatcaacaactacatcaggagttcttggtttcccattgtaggcaacagcagccatggatgatgtcacgataactcttctaatggaagctttcttgcaggagcctagaacattaagggttcctttgactgcagggtcaagtaactcagccttaggatctttaacattgtggtaaaagggagaagccgtatggaaaacacaatcacaaccattgaccgcagcatcgaaagagccctcttccagcagatttgcttcgaacaaatggagtctttcgttggctccatccagggcacgcaggtgtagtgttttctttgggtcagaggtgtcccggatggtggcgcggaccgtgtagccgcgggcgaggagcagcctgacgagccacgacgcgatgtaccccgacgcgccggtgacgcacaccagcttcccggtcccgggcgccgcctcagactcggagctcatcttcctcccttccttttcgtgtgaagcgaaggacgggggtggggtgccggactcgacgatctcgtctcgcaccgccgccgccgccgccgccgccgcctcctcgccttggctccggagagagcgcgagagagatggcgtggagtgggtgaacaggccggccggtccggatcgggccgggcgaggcggccagct

SEQ ID NO: 19860 - DNA, 1000 bp, Oryza sativa
  Clone ID: PAT_MRT4530_2527C.1
gcggcaggaaagagaaatctagcctcgcgtcgcgtcgtcccctccgctcctcctctccttgcgccaacaagccgactcgcgatctccatcgggcaagaagagcagagcagagcaggggaggggatcctgcagatctggaagaagctcttaatttcagagccttaacctctcttaatactacaagtaacaacagttttgttgtttgttccccccaccccaaaaagtttaggcgcacgcatcgcccatggccaccttcgagctctaccggaggtccaccattggcatgtgcctcactgagacgctcgacgagatggtctccagcggcaccctcagcccggagctcgccattcaagttcttgtccagtttgataagtctatgacggaagccttggagaaccaagtcaagagcaaggtttctatcaagggccacctgcacacttacaggttctgtgacaatgtatggacattcatcttgactgaagcatcattcaagaacgaggagactacagaacaagttggcaaggtgaagattgtggcctgtgattccaaactactcagccaataaattgataactgcgaggtcagggtttgcctggtatttgttagtctcttctgctagacctggctccgcctgaagtgtactgtaccaccacattgtttgtttcataatcaatgtgtgtcaatacaatcgtatgtgctaccagagtatatcacagcagcaactgttttaatttgtatgcttatgtaattgttatgctactgctgtgttgataatgtgatataaatgactaaacgatgagtagtagaaattgtgcggagtcaccctcccccttcctcatttctgaaccctttggttctgtgtgactctttgtatgtaacatgaacaaatacctcctttcccgtcttttttttggatcctatgttaatggtacctttacattaaaaaaaaaaaaaaaaaaaaaaaaaaaaaaaaaaaaaaaaaaaaaaaaaaaaaaaaaaa

SEQ ID NO: 19861 - DNA, 278 bp, Oryza sativa
  Clone ID: PAT_MRT4530_25280C.1
ttggcacatgctgctctagcttgctacaggctttagtggtgagtatagtgatcagatgcgactagctagcttggttgattatatcgtcagagactgctccggcctgcgtctccgaccagcaccccgtggtggtgtccgcggagatgctgagggacgtggtcatggacgccgtcagtgtgtccatggcctagtccggctggttcgtcaaggctgccggcggagcccacgccaatgcgggctccatctacaccatgaagcttaacccttccgccggtgtg

SEQ ID NO: 19862 - DNA, 1097 bp, Oryza sativa
  Clone ID: PAT_MRT4530_25281C.1
ccccgggctgcaggaattcggcacggcgcgcggctgagagctctgagctcacctcacccaagctccaaatccttcctctcctctcgccgacacgcacgcccacccagcttcatcggatccggcacgcggcgacaatggcggcgacgacgacgatccccgcgcggccgctgctggccgccgtgctggcggcgctcctcctctccgccgcctcggccgccgacagcaaaaataaccctgccgaccagcttgtggcattgatcaacagcaaccgcactgccagcaaggcatctactcttgatgataaccaaggcctaggatgcattgctctgcagtacattaaagcatacgagggtcagtgcaaccaagtcggtgaaagcaagaagcctccggagaccagcttcgctgaaacatttgccccaaattgtggcgtccaagctgcaacactcaccaagatcaccgggaggcttctggcttgccagtctaactatgcgaccccagaccaggcgttcaacttcctggttaatgatgcgaagagcattcaggtactgcacagcaagaaccacacggaggtgggagcagctgtcagtggcacttctggccgcgggccgtacttctggtgtgtcttgttcagcagcgggaagccaaccaccagcttcaaggtagatggtggagtgcccaagtctgtccgtccaggatgcttcagtggcaacaacgacgattgcatgggtgccaatgctgcagtttcgatcggtgcaggtacatgggagactggtggctgcactacttttctccgcggcttgttttttcgctttgtgagtttgagtagaaatgtgttgttgcaccattcttttgctcgtcttggacctggtttggaattttgcttctgaaaaccagtagaacactcttgttgctgccgcactgttcttttcctttcttagcagctgaactctgtcaggattaaagagcattgttttctgcacttatagatgatgaattacctgtgcaggctgttcatctgttgtatttatagtatttatctattcaaatgtactctttggaaaataattgtgattgtaagatccttttgatcaaaaaaa

SEQ ID NO: 19863 - DNA, 578 bp, Oryza sativa
  unsure (1)..(578): unsure at all n locations
  Clone ID: PAT_MRT4530_25282C.1
ccggccggggatcccggcagtgatgtgccaccccaccccgccgccagtcgtcgaggctgcgccccgctcttgctcggccgcccttcagcgccacgctccgctnccgcctactcctccccacccccatcccaccctatcgcctccaccgctgccgccatccccctcctcagatccagagcggaggagggcgaacgagatgagggagctggccggcaacccttggacgtggagcggcttctcactgcaggtggaccagcgcagcccgtcttcgccgctgcgtccatgtgcatgacggcctcccccctaggcttcgccgcctacactagtgcgtgccatatgggtttgcaaatatttgcaaatcgattggggattctctggtgacggtgttttgcgtgctttggcagagtgatttagtgctgatcataagcatcatagtatcatacacgcttgaaaaatcatgatacagtcgaccaaattgctgatcgatagcttagtaaatttggtcagcatggtatgccacccggcaattttctgattgatactattgttggggtaaaaaaaaaaaaaaaaaagcggcc

SEQ ID NO: 19864 - DNA, 246 bp, Oryza sativa
  unsure (1)..(246): unsure at all n locations
  Clone ID: PAT_MRT4530_25283C.1
ccgcgacgcgccgccggcgagaagggacggccnccacgccnncccgaccccgcgcgagcanccagnnncgaggnncnnncnggannncnagganggcgacncngaggaaccngaagancaagacgncgaccngcaagaggancgncaaggagcgccgcccccacgcgaaggaggaccgaaaggaagcgggcaaggcaacagaccggaaggagaaaggcgccgacccccacaancccaagcaacaag

SEQ ID NO: 19865 - DNA, 280 bp, Oryza sativa
  Clone ID: PAT_MRT4530_25284C.1
agcacatgcaggccggggcgccgccctgccgcccggtcctgtcgctgggggcggtgctgcgcgccggcgtgtccggcgagggcggcgtcagggctctttaccgcggcctccccgcgatggcgctcggcgccggtcccgcccacgccgtttacttctccgtctacgagttcgccaagtcgcggttcttcgaacgcctgggccccaacaacttcgccgtgcacgccttatctggggtgctttgccactattgtcagcgactccgtgttcaccctgatggaca

SEQ ID NO: 19866 - DNA, 573 bp, Oryza sativa
  Clone ID: PAT_MRT4530_25285C.1
atggtctctactcggcagcttcggcatatgacatgttctttgtttcccgcacgcgctcaagcagcgccgagctgatttggcaaacgagagctccttcccgtgtaaagttcttcatgtggctggcaatgaaagggcgatgcctaacagcagacaaccttcagaaaagagggtggccgcacggtgacagctgcgctttgtgcaacaatgaggaagagagctgtcaacacttgttagtggactgtcaattcacaaacagagtgtggagaatgttaaggagctggctcggagtctccttttccttgccgggggatgaaggggaacacttgacggaatggtggcgacaagtgcggcaactgtttcagccaagctacaggccggcctttgacaccctatgtatgttggtctgctggatgttatggaaagagcgcaacttgagaatctttgaacacaaagattgcactgcagcgcaagtttacagagccattagagatgaagtgctgatttggagggaagctggtgaacagcctctggtccagctcaaaattcgcagcactggagggatcacccttaagc

SEQ ID NO: 19867 - DNA, 504 bp, Oryza sativa
  Clone ID: PAT_MRT4530_25286C.1
atgcagaggcggcggcggcggcagggcgggatgcggacccactccctccggcggagccacctgttccaagcagccgcagcacatggacgagcaccaccaccaccagccgatggcgccgcatggtggcctggtggggaggcgctcgagggcgacctgaaatggcccaatgggctgtcgttcttcaccgcgctcaccgcccggaccgaggatgtgaagctcctgtttggcgacggcggcggcggcgcggatgacgggagcaagatggcggcagcggcagcggcggcgcaggacgtggggcacggcggcgtggagaatgtggaggagtacctgagcctggagagcaccaagttcaagaggagcttcacgttgccagcgaggatgagctcgtccaccacgtcgacgccccgtcggtgtgtcaacggcaccggcgccaccgccgcagcagcagcagcaaagggatggagtacaggtgcccacacgagggccgcgtctactcggacctaa

SEQ ID NO: 19868 - DNA, 1233 bp, Oryza sativa
  unsure (1)..(1233): unsure at all n locations
  Clone ID: PAT_MRT4530_25287C.1
acggccacgggaatttngccgggaactctccatttcgaacccgatncttaggccgccgaagtgtgccctacgaggatcagcctctcacccgcaggagccacagccattgtgtcgaggaacggtcgcgactagtcctcgaaagagtgcacctcgtcgatgcgtgccgggtgcacgccggacgcagcgaggtcgagtgccgtaacacggtgcccctcagagcggagcatggtgaccaccttgtaccagcaccatgctccatggcaaaggccatggacagggatgaaatgcttgctactgccaccgccgctgccttccatttcctgctcccgtggactgagtccatctcttctaggttcggtcatttgcatacactggagatggcctaagctagatgtgctgctctctcggatgctcgggatcactcactcttggcaggtcctatattatgaggcatcaaatggcttacaagagcatgaaatatttgcaaaattcatatgaaactcaattgttccaagcagagcctgcattagctctggacaggatttattcatcattttttttcttgcccaatttctaaccaatcaattagtcatacttgctacctatcttagcaagaagatcagagagctccctcggcctggagcacatgacggcgtggtcggccccggcaatctcttcgacttccacgcccgggctcaacgtaatcatgtaacggtgcacctccttcaagtcatcctccatggccatcaggcacaccctctttaccgaaccgtagttggcactggtaagcagcctgtcatccttcatcgttggatcatccacgaactggctggtaggtctcaccaataatttcgccagtgtcaagtcctcggggatgatgcgcttgccgacgcacggcacggccgcggcgacgaacacggccacagcaatcttctccgggaacctttccatggcgagggcgatgctgaggccaccgaagctgtgcccgacgaggatcagcctctcgccggccggagcctcagccactgcatcgaggagcggctgcgagtactcctcgaaggagtgcacctcgtcaacccgtgctgggtggacgccggacgcggcgaggtcgagcgccgtcacgcggtgcccctcggagcggagcatggtgaccaccttgtaccagcaccatgctccgtggcagaggccatggacaaggatgaaatgcttgctgctactgctgctgccctccat

SEQ ID NO: 19869 - DNA, 248 bp, Oryza sativa
  Clone ID: PAT_MRT4530_25288C.1
gtttcccccatccttctcttttcttcttttctcattctctgtccatcccccgcaagggtgcagcatcgctccgtatagcggacggtgggtggcctccccatggtggcacacagtggccagggaggcctcccctccaaggcaggtggtttcccttccacagtgggcggcttcccaatggcggggcatggcaggcgccctccatggcgacacagcagacggcttcctctcaagactacccagtcgcctag

SEQ ID NO: 19870 - DNA, 328 bp, Oryza sativa
  Clone ID: PAT_MRT4530_25289C.1
cttttatcccctcttcgcctcgcggggcgggggccggaggaggaggaggagggcggcctgacgctacggcgtacgggcggaggaggacggagagggaggggccgacggctcgccgccgtcatggagaaggttagtcatctgatgaacggtggctgcggcggcgtggggaagaggaggggcctttcggcggcgggggtggggctagggctgtagaagcagaattcgtggtcgtcggacatggagagggacgaggcgttggagtggcagcgcggtatgaacaagggatcgttgtcgttgtcggttctgtcgcaggtgaggagcgttacgg

SEQ ID NO: 19871 - DNA, 195 bp, Oryza sativa
  Clone ID: PAT_MRT4530_2528C.1
atggcttgcgaccacgagttgtggtggcggccggcggggaaaccacgcaggcagtacaacgtgtggtggcggccggcgcagtcgccggatctcgctggcctcccctctcctgggggacctccccctccttcagtgcagcgtatgggcaaggtggcagccagcggaagtataggtgccattgttaaccggcactaa

SEQ ID NO: 19872 - DNA, 300 bp, Oryza sativa
  Clone ID: PAT_MRT4530_25290C.1
atggcaattacagaaaaatgtgtgatacagatgatggagaaggagctgatgagtgaaatcaaggtcatggatatggtatggaactgcaagttttttggaacaccgttgttgttcatggacataatggtcatagatgactgctcaagattccgcattgggtgcttgccagggaatttgattttgacatgcttttctcaaggtgcatttgttgatccaaggaaacaccgtgagattcagaaggtcaaatttgaaaggacagaatcgtatggagcatatgaacatcagactttggtctcatga

SEQ ID NO: 19873 - DNA, 608 bp, Oryza sativa
  Clone ID: PAT_MRT4530_25291C.1
acaggtcaacaaatcatgcacatttcataacagcgattattcagccgatgctacagccaaggaaaattttcatatctgtaagatctatgtttacatattttgatcaaccatagcgattcaaatactaatcaactggcagacaatcccagttacatgaactacaatcaccgcatacctcacggtgtttccttggatcaacaaatgcaccttgagaaaagcatgtcaaaatcaaattccctggcaagcacccaatgcggaatcctaaccaggcgggggaacaaaaaccaaggtcttgatcaattacttgagcagtcatctatgaccattatgtccatgaacaacaacggtgttccaaaaaacttgcagttccataccatctccatgaccttgatttcactcatcagctccttctccatcatctgtatcacacatttttcttttcaagaaaaaacacgagcagatgtaaataaacattgttagctgtttcacgaagtactatatcataaagtttttgttatctgattagtccaaagaggtgcaaatatgatgatcccattctgcctgcaaatagtccacagagaaactggtctctaccacccacgcgtccg

SEQ ID NO: 19874 - DNA, 302 bp, Oryza sativa
  Clone ID: PAT_MRT4530_25292C.1
ggatccccgggctgcaggctggaacatacagatggatggcaccagaggtacaactctgttgctggagcaaagtaattcagtttcaggggtgcctaatattgttactgtttttgaagtctcgaaaacaaaacttggatgcttatcacaatataatatattgtactgctaaagtgaatagttcagaatagtttgttgtttcatggaaatttccctataggcataccacccccttaagcttttaatggaagtccaccgagcacctcgaattttacaggttagtttgtaaccccccaaactttgca

SEQ ID NO: 19875 - DNA, 1400 bp, Oryza sativa
  Clone ID: PAT_MRT4530_25293C.1
gcccaggctaataaccagcaatgtcgctccacctcctcctcgccgtctcgctctgcgtcgccttggcctcgtcgttgccatgggcagcagctagtgccaatggcaatggcaatggcaagccgcttgtcgcggccatcaccaaggacgcggcgacctcgctctacaccgtccccatcaaggacggccgcccgctcgtcctcgacctcgccggcgcgctcgtctggatgtcgtgcgccgccgcgcaccgacgctggagtgccaccaccacttctgcatgcacgcgcacagctaccacccgccgggatgcccccacaatggctatggccgcgccgacgtcgaggacccgttccgtcggcgacggccgacctgacgcggacggcgctcgccgcggacgccaccaacggcagcaacccgctctacccggtcaccttcccggccgtcgcctcctgcgcgccgggctccctcctcgcctcgctccccgccggcgccgtcggcgtcgccggtctcgggcgatccgacctcgcgctgcacgcgcaggtcgcggcgacgcagaacgtcgccaagaagttcgcgctctgcctcccgagcgtcgccgtcttcggcggcggcccgttcgtcctcatcttcccctactcgcggccggacatcatgcagaagctgtcctacaccgcgctccgccgcagcccggagctcgccggcggcaatggcggcgggtactacatcacggccaagagcatcgaggtgaaccaccaccaggtgccactacccaaccacggggcgccactcgtcgtccagctgagctccatggttccgtacaccgagctccgccccgacgtgtacggcccgttcgtcaaggcgtgggacgagatcctgcaatggccgaagaaggtggcgccgccggtggcgccgttcgagctgtgctacgagagccggacgatcggctcgaaccggctcggctacgccgtgccggacatcaacatcaacctcgaggacggcgcggcgtggtacatcttcggcggcaactcgctggtgcaggtggacgacgccacggcgtgcttcgcgttcgtcgagatgaggccggagaaggtcgggtacggcccggcggtggtgatcggcgggcaccagatggagcacaacctggtggtgttcgacgaggagaagcagcagctcggcttcagtggcctcctctttgggctccagaccacctgcagcaacttcaacttcactgtcgctgcctaaatcgagtcgattcctcgagctcatagcttgcatttgcatcggagatgtgcatgcatttttttttggcattattattattatgagttgtgatttgtaacaagtacatttcgatgaataatggagaataccacagatttgttactgaaaaaaaaaaaaaaaaa

SEQ ID NO: 19876 - DNA, 147 bp, Oryza sativa
  Clone ID: PAT_MRT4530_25294C.1
gaagattgtccccattaagctgaactgcatcatgaaggacaaccatgcctagcactgcatgttcgagctgatgtacaatccgcaccttaagcaccccaaggagatggacgcctatgccgtctgcatgtattagctacattcaaccaa

SEQ ID NO: 19877 - DNA, 129 bp, Oryza sativa
  Clone ID: PAT_MRT4530_25295C.1
atgatggtgttctaccggcgcaaggctagctgcatgatgtcacactccaacacagctctccgatctccactgctaacctaccgcggccctgacctcctcgagaatcacttacacttccacaactcttga

SEQ ID NO: 19878 - DNA, 429 bp, Oryza sativa
  Clone ID: PAT_MRT4530_25296C.1
atgagtcgccgatgttacagaagtatagaaatcgagaacggtgaagggattgccgagggtgcaacagtgcaaagtccccatcgatccactcggcggcagtccaggggacgtgggggaggtttcaacgtaggggcgctgcagaatggtggcctcgagcgagtaaggcccgacctcgccgccgccggagttgtgagaggacagaggaagggcggatcggtggatggagccgcctccggcgattggggtaaaaaaagaaaaacaaaggaaaggggagcaacggagaagtgcgtacccgaccgtcgaagagtcactgcgtctgcgtggtggaccggccgccgggtggctgctgctcgccggaacgaggcggcaaggctaaggcgaggcggcggcggcggcggatgctcgtgctgtgtgcctgtgaatcgtagg

SEQ ID NO: 19879 - DNA, 1509 bp, Oryza sativa
  unsure (1)..(1509): unsure at all n locations
  Clone ID: PAT_MRT4530_25297C.1
tcaacaacacacgatcaatcgatcgattaatcctctcgagtaatcnccttgaaatcatcggttgatttcttgcagagattaagtagcagcaggtgttcgtcgagccgagcggcgatgtctccctcccctgatctcgcccggatcctcccccgcgtgctcatcgtctcccgccgcaccgtccgcaagaacaagttcgtcgacttcgtcggggagtaccacctcgacctcatcgtgggatacggcgcagtgccggtgatcgtgccgcgggtcgccggcgtgcacacgctgctcgactcgttcgagcccatccatggcgtgctgctgtgcgagggcgaggacgtcgacccgtcgctgtacggcggcggcggtgcggggtcgggggggctctcggcggagcagctcgacgctgtgcggagcctccacccgagcgacgccgccatcgaccacgagaaggactccatcgagctccgcctcgcgcgccgctgcctcgagcgcaacatccccttcctcggcatctgccgcggctcgcaggtgctcaacgtcgcctgcggcggcacgctctaccaggacgtcgaccacgagctccccgccgccgccgccgccgttcgccacatcaactacgacaactacgacgggcaccgccacccggtgcgcgtcctccccggcacgccgctgcacgagtggttcgcggagtcgctcgacggcgaggacagccggctgacggtgaacagctaccaccaccagggcgtgcggcggctggcggagcggttcgtgcccatggcgttcgcgccggacggcctcgtcgaggggttctacgaccccgacgcgtacaaccccggcgagggcaagttcatcatggggctccagttccacccggagcgcatgcggaaggccggctccgacgagttcgactacccgggctgccccatggcctaccaggcgttcgtccgcgccgtcgtcgcgtaccaggagaagctggccgccgccgccgccgccatgcccgcctcgccgaagctgaaccaggagatggagaagcagcgcaaggtgctcgtccggagcttctcgctcgccaagaacctgtacgtctccggcgccgaagctggcacgccgcggccggccgagcagcgcgacctcgacgccggcgccgagttcctcgaggtaaaaacccagcccaaccaccgcacctccaccggcgcgcacggatgccagccgccggacttcaaagctaaccgccgtggcgtggtgtgtgtggtgcagcagtcgaacacggcggcgctgagcgtgcagcaggagaagcggctgaagcagatgggcgcgacggtgaggaacgcgtcggggtacatcaaccggctgaagctgaacgaggagcgggaggcggcggcgagggcgctcatggcgaagatgtccatcgaccagctctccgacctcgcctccttctaccacatcatggggaccatctgctccgaggtgctcgacaggaagctgcactccgctgctcccgctccatga

SEQ ID NO: 19880 - DNA, 2472 bp, Oryza sativa
  Clone ID: PAT_MRT4530_25298C.1
ctacatttggccgccgcggcatcgtttggtggagggtcggagaccggcttggcgcagagaggcgcagccgatggcagcggaggtcagctcggcgcgagaggcgcggacggcggagatggaggccggcttggccaagaggcgcgacagatggagggaggctggattggcgcgagaggcacgtccggtggagaaggccggcttggcacgagaggcgcggccggcgatggaggaggcgactgtcggcgtgcgcgccgcgtgccgcctcccgtcctctccggaaaactccggcgcggctttctttcttcctccgccttcttcaaggctccagtccagctgctcgctcccaccacccttcgcctccccaagcttcgtcttcgcccgcactccctcccagcaaccgccgccccggagagtcccggatttcgtggccatctccgtcgcacgatcgagtggcgaggatgactgaacaattatacactgtggcatctgacagtgaaaccactggggaagataagtcgcagatgtcgtttcctgatgttgctattggaatcgacattgggacctcaaattgtagtgttgccgtttggactggccatcaggttgaactcctcaaaaacactcgcaaccagaaagggatgaggtcatatgtgatgttcaaagatgacagcctttcagcaggagttacaggaggagcaacccgggaacatggacatgaggaaagagatattttgtcaggaagtgccatatttaacatgaaacgtttgattgggagaatggacacagatgaagtggttcaagctagcaagagccttccttttcttgtgcagacattgggtattggggtgagaccattcattgcagcactggtgaacaatatgtggcggtctaccactcctgaagaagttcttgccatctttctccttgaattgaaggccttggtagagatgcatctcaaacatccggtgaggaatgctgttcttaccattccagttgcattcagtcggtttcaacagaccaggattgagagagcatgtgcgatggctgggctgcatgtgttacggctcatgccagagccgaccgctatcgcacttttgtatgcccaacagcagcagcaattgctacatgacaatatgggaagtggcattgagaaaattgctctgatatttaacatgggtgctggctactgtgatgctgctgtggctgccactgctggaggtgtttctcagataagagcactttcaggaagcactgttggtggagaggatatccttcagaatgtcatgcgccatctcatgcctgattttgatagtctatatgctggtcaaacaatggacagaatcaagtcaattggcttactccggatggcaactcaggatgcaattcacaaactggctacgcaggagcatgtggagatcaatgtagatttgggggctggccacaaagtgtcaaagatcttggaccgtggagaatttgaaaaggtgaatcagtctatttttgagaaatgtgaagggatcatcaagcaatgcctggctgatgcaaagttaacaccagaggacatcaatgatgtgatattggttggaggatgttccagaattcctaaaatcagaagcgttgtccttggcttatgcaagaaggacgactcttacagtggtatagacccacttgaagctgcagtttcaggggctgctttggaaggagccattgcctcaggagtatctgacccttcagggagcctggatctgttgacaattcaggcaactccaatgaaccttggaattcgtgctgacggcggtaacttcgccgcaatcattccaaggaacactgctgttcctgcgagaagggacatgctctttaccacaacccacgacaatcagaccgaagctctcattgccgtctatgaaggcgaagggaatcaggctgaagacaaccatctattgggatacttcaagatcaccggtattccagcagcagcaaagggcaccgtcgaaatcaatgtctgcatggacatcgacgctggcaatgtcctcagggtattcgccggcgtcgtcaagcctcagggccaggctgttccaccgttcattgaggtgaggatgccaacgctagacgatggccatggctggtgcggacaggctctcgccaagatgtatggcagtacgcttgacctggctactatcccgaagaagctgcatccttgagaaattgcatatcgtcgcatgtagttgtatgactccattatctaaaaaaaatgtagttgtatgactcgtatcatccggtgccgtagttcgtgcatatgtggttcgaccgtgtcatgatggttacttggttcagtagcttgtttgccggactttttacatgtaaacataaagagtgccaatgtcatctctgtacaaaaaatgtgtgtcgcgtgtatagaataaatcaatgttaccggctgttaaaaaaaaaaaaaaaaaaaaaaaaaaaaaaaaaaaa

SEQ ID NO: 19881 - DNA, 2745 bp, Oryza sativa
  Clone ID: PAT_MRT4530_25299C.1
atggagacaggaaaggggatgagcccgcagtatgcggtggcgcccgaatctggatgcggcgacactgcgccgccggatgaggtgagcagcccggaacagaaggcggcggcggcgtcgaccagcaacaccgaggggagggtatgcccccacttcgaccctttccaggacggcgtgctcaagttcatctcggagctcaggtcctactcctacgattgcgccccgaggtgtgaccattacctgtgcgagaacaaggtggaaaagagcagtatcctggtttgcatcgactgcgacttgcatttctgcattggggacgggaccatgaacaagccgcagggacatgcccggtggcatgccgatctggaggagcattgtgttggtgctttgctcggtgagccggaaactctgtacttcttcatctgtgaacgtcttctggacttggatgtcagcaacatgcagcgtggagacttctcatgtggcaaggaagaaattgataggatcgagtcagatgtcagctcctccaagaatgctgtcgtgtgccatcatcattcgtttgacacggagaacattgttatcatcaaggatttcgttgaatctgaaaagggtgacccaatgtgtgataatgaaacgtgcctaaccaccggggagcaccacatgatggtgtgctcagaatgcaaagggtatttctgcattgagccagccaccaaggctaagccgcaagggcacatccgggagcatgcattgcttcaggagcattgggttgcagtgtggcacaatgatctgtatgttggttactgctttgaatgtgaagattccttggtcataggtggtgaggagggcaaggagggattggcagtcaacgcagaggcaggttctcatgcatctgggtcttctgacgggcatggctgtgttatcagagggatatcgaatcaaggaaacacttgcttgaatgcattgttgcggtgcctccttgttcttggaaagctgcgggcaaggatgtttggaccgaatgctccattggggatccttggtacaatactgcgtggtctctttgttgatgcaaacagcgtgaggcatgcaccaggcccgctgaaccgggcgttgctcttggcttgtgtacgaaggttcgactcatggttgataggcacttcaattcatgacagccatgaattactttgctgtttgcgcaatagattgaatgaggaggataagataataaggcctccaaacaagcaacagggtgctcctagttctgtggctcctaccgtcattgattccatatttggtagtgagctgtctgttaccacctcttgcaaacgttgctcgtttaagtcttattcctgtgatgtattctatgatctctcagtgccattgccaccaaagggtgctccatccaatagtgttgcatcaccaccacagaatgaaagacctatatctcaatgtaagatttgtgtactttctgaaggcggtgattctcagattcctgcttcagaattggaagatacagtcatggtgaaaacatcagatcctttggaagttgattctaataaattggaacagatcgtgcaaagcaaggacgctgtacattgtcctttgcagtccccaacaatgaaagagaatacatggatagcatcagtcagtgatgtagagaaaactgacactgctgttcttgataatgcgttcagtgggctaaaagttagtacagaagccaagatggtcatttcctcagcagaaattaattcagaaaacaaggggaaagctcgaagtcttgatattatttatgatgaggcagaggatatcaactctcttgtgtcaattgaggagtgcttgaagttgcatattgaatcagagatgatagagtggacctgtgagaactgttccaaggttgcccagaaggcaagcactataagtggtaaagacggtgaacagatgatggcaagtaccaatgtgaataggacggtttatggagaccaggctgaacagtcagacaggaaaacatgccaaagggagctatctagcgatttgatcagactttctgtagaatgcagttcttcaagtagccagccacatggttctggtgtacaaaatcatgatatgcctgcagtggacataaaaacttgtggagagacttcagggatgagctctgttgaaaaagactcgtcctcttgcagcatagccaataaaaaacctgaatgccttggaggtgctcaagaagatgcatctagctgccgtctgactgagaagcaggccaacctgttgagtgtccagtgtcaaaatatcagcatagaagatcaggaaagggggaatcaagtaaatctgggtcataatgcacaccaactggaagaaaaccaatatgatcagcaagataggaatgaaggtgcgattctaacatgtcttattagcaagctgccacccgtattagtcattcaactcaacagatctttggggcctcttaaagtgagtggacatgtgagctttaaggagatccttgatgtggagccattcatggaccccagttctgaggacaaattcagttcccgctatcgtttagttggtgtcattgagaaccgtggcctcagcattcatattgggcagtgcgttgcttatgtgagagcaaacaatcagcagcagggcagtggctcttcctcatggtattgtgcaaccgatgacgacatcaaagaaatctctttagaagaagttctcaagtgcgaggcttaccttcttttctatgagagaatgggctgctaa

SEQ ID NO: 19882 - DNA, 448 bp, Oryza sativa
  Clone ID: PAT_MRT4530_2529C.1
gacatgctgaaaccttactttgccagttttatgaagtaaaaacagccggggttgctaaagtgccgggggggatacttttaatgaaacatcaggcactcgattgaacaacaaccatgtctcaagttataaacagtaggctgttgtacaagactgtacccaaggtaaatttaattggggagcgcatactcgcccactcattggagaaccacgctccatccacaggaaactttctgcttcaatgatcactaaaaaatcctggacttttgaattacatatccatgcgagcgccaacagccagagggaatgttactacacgccggtgcacacatgaattattggccaaatcctagcagattaaacagtttgactattgcacatcaacttaaagcttggcggtaaaatagggctagacttgagctccttgaaagaggatttcactgacaattct

SEQ ID NO: 19883 - DNA, 2392 bp, Oryza sativa
  Clone ID: PAT_MRT4530_252C.1
tccactgccaaccggtgtcatttcatcgtagaccgctttcgtcttccaccgctgttgcagatggcgacatcattttcaccaccggccgcctacgtcgccgtcgacgggtgtcctcgcctatacggttggttggtcacaccaccgttcataggcgtccatgtcttcaccgaccggcttgccttcgccgccgctgaccggtgtctctgcctacacgactggcctattatgctgccgttgttgggcatctatcgttttcaccgaccggccgcctcgtccaccgccaactggtgttttcgcctgcacggctggcctattacaccgccgttgttgggcgtctacgtctttaccgaccggccgtttcgtctgctgccgactagtgtctctgcctgcatggctagctattatgtggtcgttgatgggcgtctacatcttcactgaccggccgcctcatctgccgccgactggtgtctccgcctacacggctagcctattatgccaccgttgttgggcgtctatgacttcaccgccggcttgcctccgtcgccgccgactggtgtctccgcctacacggctggccgattatgctaccattgttgggcgtctacgacttcactgccggcttgcctccgtcgctgccgactggtgtctccgcctacacggctggcctcccgttgttgggcgtctacgactttaccgccggcttgcctccgtcgccgccgactggtgacctcgcctatacggttggttggtcacaccaccgttgttgggcatctacaccttcacggaccggcttgccttcgccgccgccgactggtgtctccgcctacacggctggtctattatgccgccattgttgggcatttatttacctacaccgtcggtcgccatccagatatgcacaatagggattcatggctttaagcttatctcctacgctttaggaatggatcagtcagaacatcaccgccggcttgccttcgccgtcgccgactggtgtctccgccaacatggctggcctattatgccgctgttgttaggtgtccacgccttcactgaccggttgcctcgtccgtcgccggctggtgttttcgcctatacggttggttggtcacaccaccgttgttgggcgtctacgtcttcaccgactggcttgcctttgccaccatcgactggtgtctccgcctgcatggctggcctatcatgccgctgttgttgggcgtctacaccttcaccgaccggccgcctcgtccgccgccgactggtgttttcgatatacggttggttggtcacaccaccgttgttaggcgtctatgtcttcaccgccggtttgccttcgccgccgccgactggtgtctccgcctacacagttggcctattatgccgccgttgatgggcatctacatcttcaccgccggctcgcctctgtcgtcgccgactcgtgtttccaccaacacagttggttggtcacaccaccgttgttgggcgtctacgtcttcaccgaccggcttgccttcgccgccgttgattggtgtctccgcctgcacagctggcctattatgccgccgttgttggacgtctacatcttcctcgaccagccgtctcgtatgacgccaactggtgctatcgtcttcacggctggccacgtcgccgcaaccgctaataggcgtcatcatcttcaacgcaagctgtctacgtctgctgccgactgctgcatgtcttcgtcatcattgactggcgtcaacgtaatcaccggcttgcctttgtcgccgctcatggtgtcttcactttcacggctggcctattttgccgccgttcaaggacgtcttcgttttcgtcatcattctacttcttccagcgacttcatcttcattgtcttcggtaccggcaaactctattgcccctactttgcaaactttgctacttcaccaaccacaacgcttacaagagcctcgacatctcggcattcactaccaaatttgacgtcatgctaatctactacaagtggttcttcaattttcaagacttctactcggacatcttcaacacatattttcactcaagcaatggctactcgacgacaagaagctacagttctcgactctatgttcagttgtttcccaactaaccaaagagtcgggggctatacaaatacaatactctcaaaattcaacaagcagaagcaatcaattatcagccaacgagtcaactccaagagtcattatcttcgtctttacttcggagcagaagttctacttcagcaacttcaattatttcaccggcaattttggcttttccatgccgccacaatctactccaaatttctcaagtatcaagtttgagatttaatctacatgtccaggagtttagagttatcaaccaatcagcttagttt

SEQ ID NO: 19884 - DNA, 1158 bp, Oryza sativa
  Clone ID: PAT_MRT4530_25300C.1
tttttttttttttttttttttttttttttttgtgtcgttcgtaaagtaaccaattgctaaataacaaattccagagaaagaatgtgaatggcgtacgctaccatggcggaatcaaccaacgtcgcctcaacaacattaaataaaaacaatcagaatatacaaaacaaaaattgatcgatcatggtgagaggtggtacaggttggacggctggagcccggcggtgacgttgaagtacctgaacgccgccgcccaccggcggttgtccttgagcatgtgcacgaggacggtgtccggccggaagttgtccatgtcccagttgaggtcgtacatccgcggcctgaggctgtaccggttcttgccccggcggccgatgttgagccatttcccgacgaggaggtcctcggggccgtgcgtgtcgttgtaccccaggatgtcctcgttggtcgacacccacgtcgcgacgtcccaggacacgacgtagcccatcccgtgcatgaacggcatcggctggccgcccatggcgtagccgtagccgaggtagacgtcgtcgcggggcttgtgccggagctcgtcgacgagcgcggccacgcggaggtacgtgtcgtcgtcggtcttcatgacgtagtcgtagggggacgacgcgaacaggcgcggcacggaggagaggtacgcgtgcgtcttgccgtggttcatgttctcctcgcagccgccgagcaccacgacgtcgccgtggcgcgcggcctccagcgccaccagctgcgcgtccaccgggtcggccacgcggcagaacacgaagcggacgtccacccgcgcccgcgccgccgccggctgcagcgcgtacgccagccgcacgatgtcgcggcgctcgtaccgcttcggcatcgtcaggacgccgacgagcaggctcagctcgggcttctcctcctccttcggcgccgccggcgccgcgacggtgtagtcctcggcgccagcgctgcggcgggcgcagaggacgccgaggccgccatcggagccgacgcgggcgccgttgagagaagggagcaggaagacgacggcggcgaggaggagcagcgcgagcggggcgaggaggaggtaggagttggacgacgccggcgccttcatcgccatggccgcatgcaaatgcaacgggagtaaac

SEQ ID NO: 19885 - DNA, 1240 bp, Oryza sativa
  Clone ID: PAT_MRT4530_25301C.1
tgcacgaatcgttttaatttttttttttaatgggtcgaacgattagttaattagaattaatcaaacggggaagaaattaacaaacaacaattatggatcatcgaagaggtgatcgatcgatcgatcgatcatgggaagtggtacaggttggacggctggagcccggcggtgacgttgaagtacctgaacgccgccgcccaccggcggttgtccttgagcatgtgcacgaggacggtgtccggccggaagttgtccatgtcccagttgaggtcgtacatccgcggcctgaggctgtaccggttcttgccccggcggccgatgttgagccatttcccgacgaggaggtcctcggggccgtgcgtgtcgttgtaccgcaggatgtcctcgttggtcgacacccacgtcgcgacgtcccaggacacgacgtagcccatcccgtgcatgaactgcatcgggtcgtcgccgacggcgaagccgtagccgaggtagacgtcgtcgcggggcttgtgccggagctcgtcgaccagcgcggccacgcggaggtacgtgtcgtcgtcggtcttcatcacgtagtcgtagggcgacgacgcgaacatccgcggcacggaggagaggtactcgtgcgtcttgccgtcgttcatgttctccgtgcagttgagcaccaggatgtcgccgtgccgcgcggcctccagcaccaccagctgcgcgtccaccgggtcggccacgcggcagaacacgaagcggacgtccacctgcgcgacgccggggggcaccgccggctgcagcgcgtacgccaggcgcacgatgttgcgacgctcgtaccgcttcggcgtcgtcagcacccccaccagcagacggagctccggccgcacgacggccttcgtctcagcagcagcagcagcagcggaagctgcatctccacccggcgtgacgaggtagccgtcggcggtggatgggccggcgtggcagaggacgccgaggccgtcggagcggacgtgggaggagccgaggctggggacgacgagcaccacggcgaggaggccgagcggcaccagcaggagatacggggtgcagagcgaggcggtggccgggaacccgtgcgacgacgacgacgacgacgatgcggtcttcatcgtaaaaatctcgcggggaaatgcaagtgcccctcgcacgatcgcggcccgcgcgttactcgagctatagccgtactcgacttataaccaggcacgaacgcgcgaaa

SEQ ID NO: 19886 - DNA, 514 bp, Oryza sativa
  Clone ID: PAT_MRT4530_25302C.1
atcctaattaccacaaaagcttaaaaatctacaacctgcatacagagaaatagagagactagaaggcgacttgatactgtgcgaagagacactatagtcgctatctgctaagcaaatggcaccagcagctgctgccaagccgactcctaccgcacatgctaacagagcttcggctggtgctagccatgatgtgccagccttgccggctcggctacaaccgcgggtgctctgaagcactgcgaatcacatttgtcacagcgcgccctcttatagccaatattgcaaattattcatccagtcccctcctctcgcgtcgccctcccccggacgactcgggaggcgacgctgccgccgtcctcctcctcctcacgtctcctcccccgcctgagcgggcgccggcaaagccgtgcgtccgcaaggacgatggcggcagggcctcgtttcacctccacgcgctcgacggctgggggatgccctgagtggcggtggtggtgcccaaatccgcacctggccc

SEQ ID NO: 19887 - DNA, 686 bp, Oryza sativa
  Clone ID: PAT_MRT4530_25303C.1
atggcgattaaggaccggttcgcgggaaaccctggaagaatttatcgtgcttaccacaagccagccgtacccaggctagggtgggcgtgatggagttgggtcggcctgggtgtccggttgatcggcttccggattcaccgtggcacgagaggggattgcccactaccttacgaggagtgggggtgaaacctgaggtgtggtgcgattggttagagggggttatgcgaaggatcctgtcacggcctctttccggtatgacgtgttcaggtggttggttgggcctgttgcaatgtggtgtagcgttggacagtggttggttaatattgattaattactacaactgttttactgctttcaactactgcttttaaatgcctgctttattgcaaatgaacctctagcctcctttggttatatcttgcatcataccttctcttccggtatgacttgctgagtacagtgggtagtactcagtcttgctctctctccccccccccccacaccagagttgaaattcttctcagttggagctgtctcgaagaagttggtttcgtcgcttccgttcaccttagaaattctggttcgtgaatttctgggtgtgacagaccgccactgcctacccctcattctgcacctcctgtcctttctataagtaatactccctccgtttcacaatgtaagtcatt

SEQ ID NO: 19888 - DNA, 1132 bp, Oryza sativa
  Clone ID: PAT_MRT4530_25304C.1
gcacgaggcaaaacctctcaaaccccacaggcaccggaccaccaccaccattggcaccacctcgcatcacactctctcgctcgccatgagctcccgcgacgccgccgccacgttccatgtctaccagcccgtgcagatcccgacggccacggtggcgcccgctgcggcagtgtcggcggcgccggcagaggccgtcgcccagctggtcccggcgccgagcaagaaggcggccggcgcggcgggtgggaaggaccggcacagcaaggtgaacgggcgcgggcggcgcgtgcggatgccgatcgtgtgcgcggcgcgggtgttccagctcacgcgggagctggggctcaagtccgacggccagaccatcgagtggctgctccgccaggccgagccgtccatcctcgccgccacggggaccggcaccaccccggccgccttcgtctcctcctccgcgccgtccacctcctcctcgcaccagcacaccctcctcggcaagcgccagcgccaggagtccgccgccgccgacgccgtctccgtcgccggcgccgcgtccgcgttctgggcggcgctgcccgcaccaggccggcccgacgcctggggcttctccccgctggacgcgcagccgacgtacgtgccgatggcgcaggcgcaccaccaccacctcaacctcctcgccgcgctctccggcgccgccaggcgcgccgaggaggagtcccggtgaatcacgcacagcagcatgcatcttccgagctctgacacgtctttcgctcaattcaccgacgcgtactgcactggcgtccgtacgccttgttcttgggacagttcttgattggagtgtgcttcttctctctaccccgtggatcgatcgttttgccttcttcctgtgcggttcatcaattgctcaagatgaaattaattgttgctgtggtgtttaagctcaaaactgtaaatacgagtccttagatctcatcttactcctacaaattccagcgccgcatgtgtttgtgtgtttgccacttgtttccagctcttgtgctatgattccatggaacttgtttcagtttagcttcatctacatcgttgtcagaccaaatcatttgacagttacagaaacatgttgcattgagctgct

SEQ ID NO: 19889 - DNA, 268 bp, Oryza sativa
  unsure (1)..(268): unsure at all n locations
  Clone ID: PAT_MRT4530_25305C.1
gacctcgcaagctgcctccaagattaatccaggagcgttacttcacacgggagtgacccccanataactccctcacccttccctctgctactatacttcgtacattttcactactcctcctacatattgtcccatttttcaagctttctttccattttattaattaaacaagtaccaacaattttcatggttttttttccttacctctaaccctacttattggtcgcctaaataactcccaattctctaaacttttcctgttttatcc

SEQ ID NO: 19890 - DNA, 353 bp, Oryza sativa
  unsure (1)..(353): unsure at all n locations
  Clone ID: PAT_MRT4530_25306C.1
ggcgatcaacgccgcccgcgcggttgcgcgccgccgcctattaataggtcgggatcgaaggcggcaacgcaangctcccncaccacgcgaggttngattccccaccgactccgaagcgaataacggaataaccgtctcgacccctcgccgccgcggatggcgaggccgaggacgaggtcggtggccaggatggaggccanggcggcggctgtngcggcggcggaggaggaggaggcggggaatcccgacggcgcggagggcgcggccgtcgtcgccgttnctcccgaagccgccgncgaagtccgaacgagaaggagtacaagtttnacgttaacattgtcttcaacgctagt

SEQ ID NO: 19891 - DNA, 696 bp, Oryza sativa
  unsure (1)..(696): unsure at all n locations
  Clone ID: PAT_MRT4530_25307C.1
ctctcgctctggcgttgtctctctcctacactccatcgcgatggcagctgcggcggtgacatgagacgcgctgccggagtaaccgctgaaaacgcggacacgtgacgagcgtgcacggcgcactgngaagacaacgcgcgtcgcccagaagaacaaggccgcgcagagccgatggctcatcttcgcctgctcgctgcaatagcacccaccagtactacttgcaggaggaaggagctgcgtctacttcaaccgtctagctccaatgatcactgcccctacgtcaaccctgagccctatttttgttggtgcccaccatccaggccatcaatgccgtgccccccaagaccaccaggatcttgcacattctgctggtgtacaccatcttgcttggtgtgttgctgcttgctaacaaggaggcccattaacatgctgggcaagcttatgtcctatgttgcctataagaacatcaacctcaacagtgtcaccgaactgctctacgactaggtactccatactgctcaacatgcataggattgctgttgagacttcatatgtattgaggtaggcttgtatacttatgacgtcttctgcatagatgatgttgtccaccagatcatgactgtagtaccacactgcatggatgccatgcatcttcctgtggcccttcaagttgatgcaccactcggtggcctcaag

SEQ ID NO: 19892 - DNA, 315 bp, Oryza sativa
  Clone ID: PAT_MRT4530_25308C.1
atggccatcctcagtcaaggtagcgctggatccagatgccccaaccctagcagggcacgaagggcatggaaggcgaaggaggatcaccatcctcgtggaggcatcgccggaattgatgatcgaattcagtacttaagaaccatcaacaacaacaaccaggtgtgcattgaggtcatcgttgacaacctccaaaccaaagttatgcggctccctggatttcctcccatgcgagtgttcaccaagtacggttccgaacttagagtttcattagaagccacagcagatcatgtccctattaagccacatgatcgttag

SEQ ID NO: 19893 - DNA, 416 bp, Oryza sativa
  Clone ID: PAT_MRT4530_25309C.1
tattagaacaaattgttgaaaacctattacgggggtaccagaaacattagaaaccgcgccggttgattattacatttcctgcagctatctggaatctggagttgtctgaaagagttgccagtgttgcatgagatgaagaccctgctctatttgagtgctgagcattgaacagtacagacgcacattgaatcattttttcaccttggaatgagtactgtgcttccagccaagggattgatatcttccatcatctgtttctttgttcaaatggcacatgttcctgctgcttctgctatccgggcagatatcaaccatctagattaggacatagtatcaaaagttgagaggtacatcatgttgtaacactagtggtacagacaggccttttgaattagaaggcgatcattcagagcctc

SEQ ID NO: 19894 - DNA, 811 bp, Oryza sativa
  unsure (1)..(811): unsure at all n locations
  Clone ID: PAT_MRT4530_2530C.1
ctcctcttccctgtgcggctgcgcccccagcctcctactcctaggacgggcgcggcgctgacgacggcgaccacgacggcgggaggggcgcggcgcggatgtgcacggcgacgacggcaactggcgacggtgacgacggtgagcacgacggaagcggcgacgacggcgaccatgaaggaagctgcgacgacggcaaccacgaaggaagcggtgacgacggcgaccacgaccatcctgtgcgtgctgtccttcactgactcgctatcgtacctcgggttccatgtcaggagcgtcgacaagaggcagatcagccgtaactacctctactggggcgccgcgccctcccatcccatcctctcccctctcccagatttgtctgtggggaggaggatgggcaatgggaggacggatccgccccggcggtggcgcgggtagcacggccgcggggcctcgggaggtggagcgcgaccgtcggccttgacctcgtcacgaccgacgccgccgggccgtgggcggtggtgctcagatttcaatggatttctgtggatttgtgtgcatttgtgtagatttatgtggcttgtgaatggaaaatatgtgttgatttgtgtggatttgttttgattgtgaatggaaaattttgactgtttttattgtaaattgttggtgtaaatttatgtgaatttgtgaatcaaggagtggatttaggaataatttgaattggtgttgacaaaggtgaatggaccggtgttgcnccgttattttttttttttttataaaaaaaaaaaaaaaaaaaaaaaaaaaaaaaaaaaaa

SEQ ID NO: 19895 - DNA, 331 bp, Oryza sativa
  Clone ID: PAT_MRT4530_25310C.1
tcggtttggaggaacaaaccctactcactcccggatacctgctgttgccactaggccactatcatggaatcgggcaagcatcacgcatgcagctcatgcgacacgaagactacgaccacgaacgcgggagctcctgtgtggaacgacaaccaggcgctgacagcggggcccagggggcacaggctccttgaggactatcagctgatccagaaggtgatgcacttggtccggtagcgcattcggagagcgcgtggtccacacctctggggccttcgccaagggctattgagagagcacccacaacgtaacagacaatacctgtaccggctaa

SEQ ID NO: 19896 - DNA, 554 bp, Oryza sativa
  Clone ID: PAT_MRT4530_25311C.1
ccggccgggagcaacacagcgagagagtgcaataatttcttcagacctaccgacagaaaaaaaaaagagaaagatgatgaggaagcaaagcagcagctccacctctcgtgctactgctgctgtagtgtcgctttgtaaggtccttctgatggtcatagggctcatctgcgccctgcacactgccaccgtagaaggaggaagagcgctagcggcagcggcagttggtggtactggtgtggacttgccaccaactgcaccaagctactccagcaagtgcagatatccctacaaatgcccccctgcaggctcaccatgacaacctgcatatgcctctgctctagcgcgctaggccgcccatggccatgcggtacactttcatgcatggcttgtctacatatatattatagtgtacgatcgatgtatgatatatatacttgtcgtcgtaaataaagggaggccaaatatgtatttgtaagcttaattttttgaacgaatataccatgctattccaaaaaaaaaaaaaaaaaacccgcggccatagctatacatttatc

SEQ ID NO: 19897 - DNA, 4323 bp, Oryza sativa
  Clone ID: PAT_MRT4530_25312C.1
atggcgtacggcggcgacgggattggctgctgctcgctgctccactacgcggagagccccatgaccatggccaggcgatggctgcgctgctggattggggattctctgttggcgttttcacttgggggaggcaaggatttgcctccctcgtctactgctcgcaaagatgaaccatcctcatcctgtgcttgtgctgaacgcccaatgttcataggtggttcatcattctcaatagaggctatcccgtattcaccgtcagtgaggttctcatattctatactaaaggactacatggagattcttaaagctacgtacccagaacgttcttactatggtggtcctgattatcaatgcaatcattgtggtgcgcttttttggtaccaagaaagagtcgttagccagagttcgcatagggctaagaggattgcatacaatttgtgttgccgtggtgggaagatctccttacctgtgcataggcctttccctcctatcctacaatcattgattcgttttgatggcggcgcctgttccagctctttcatgcgactcatcaggcagtataattcattatttgcattcacatcacttggagctaacattgacaggagcataaacactggtcatggcccttatgtctttcgtatcaatggtgtcgtgcatcatagaataggttctttgcttccttctcctggacggcgcccggagtacgcacagctatacatatatgacaccaccaataagctgcaaaacagacttaatatttttgaccatgctgacagtgctgtagatgtccctgaccctgctattgtacaagagcttatctctatgcttaaccaatgcaatcctcttgtgcaacagttccggcttgctcgagacaagctgctctctccaagtgctcctgaaattgctatcaaactcattgggtcaggtcattctcagggtgatcgttactgccttcccactgcttctgagttggctgcactcattgttcctggtacatcttctgagatatcgaagtttgatgtcgttgtgcagaagcattcaagtgaattgagtcagctttctcccattcatccagctcttatgtcactgcagtacccacttctgttcccatatggtgatgttggttttcgtactggcattaagcttagagaggtagatgatcacccgcctgggagtcgtgatgaggtgtccatacttgaatattatcgactttctgatcagctcgctgttaatgctttctcatgtatcgagacatctcgcctcaacttccatactctgagccagaagaagcttcgctctgaaacacatcaaggtatatctgatgctgttgctaggggagacactaatggaaaagatgttggtataaaggcgattcgttttgagctaggccagaaaccaaatgatagaagtgatatggtcacacgtgtttaccatatgaagctagatgagtacattacatatattaagattggacaggcattcggtccaatacaagctgatccttcacctgcattcattgatagccttataagtgctgagataccagatataggcattgataaatttgggtttggtcttgttgatgaattcatgatacatggcccatgtggtgagcacaatccacattctccttgcatgaaagatggtaggtgctcaaaggggtatccaaaacaattctgtgatgtgacttccatagatgatgatggctatcctatctatcgacgacgcaacaatggtcgctatgtggtaaagaatggagttaagctggataatcggtgggtcgtcccttataatctagctcttctcaagaaatttcaaggtcatatcaatgtggaatggtgcaataaaacgtaccttatcaagtacctttttaagtatgtaaataaaggaagtgattgtactgcgtttgctttcaagcagaaggattcagaggaggcaaacactagcagcgccaacaatggtgggatagatgaggttatgcagtacatcaagtccagatatctatcaacttgtgaatcatactggagattatatgggtttgagatacatggaagaactccttctgttgagcggcttgttgtgcaccttcccaatatgcagtttgtgacataccatgaagaggctgaccttgaagaggttatagaagaccctgattcttccagaactatgcttactgaatggtttgttgctaatcaacggcacatctttgccagggatctcacatactgtgagtttccctccaagtttaactgggactccgacaaaaaagtctggacaaaacgtaaaagaggaaccaaaatagggaggttaagacatattcatccaagtgctggggagccattctaccttagaatgttgctgatggtagctcgaggttgcatgacttttgaagatgtcaggacataccaaggtgtgacatacagcacctatcgtgaagcttgccaggcacgtggtcttattggtgatgatgctgaatgggatcatctctttgaagaggcagttatctgggctactgcatatcaactcaggaacctattcatgactgttctagcacattgtgatgtaggtgatgttagggttttgtttgataaatactggaagtatatggcagatgattttgcttacaagctaaccaaagctcttggggtacagcgtagagctattccggatgttatgttgcagaacaccttgctcaaagaattggatggcattttctcaaataatggcttatcaatctcatcattcgatctcccgacaccagctgaatgttcggataccagtgcaggaaatatgcttattttagaagagctcagtttcaaccaaggcagcctccatgaagagtctatgtccatgtatgctagcttgaatgatgaccagaagaagatatatgacaaggtctttgacaggctagctcataaggaaaaatgtattttctttatatctggacatggtggaacaggaaagacattcttgtggaatgctattatggcaaggctgaggtcaagaggcgaggtcgttcttgcagttgcttcttctggagtcgcagctctgctcatgcctggtggaaggacaactcattcacgctttcggatacctatagatatacatgatcagtccatgtgtggtgttcgtagaggtacaatacttgaagatcttattaagaaggcatcattgattatatgggatgaggcgcctatgacaaacaagctatgcttcgaggcactggatagaactcttcgggatattcagtccgctgatgatgcaagtaatgtgcataagccttttggaggtaaagcaattttgcttggtggtgattttaggcaggtcttgccagtgattcagcaaggtacaagagctgatgtggtggctgcttccttggttgcattgtggaaccatgttgaagtcttacacctcaccattaacatgaggctacataatccatcgctctcgcaacaagccaaggatgagctagcagagttcgctaaatgggttcttgacattggtgagggacgtgttccaatggatagacgacagggtgaggttgaaaagacatggatacagatacctgaggaattgttgcttactccacatggtgacaagattacagctataattgatgctgtctacccatattttcagaccaactatgactgcatcccgtatcttgctcagcgcgcaatagtttgtccagtaaatgcagttgttgatgaggttaatgatatgatgcttgccaaagtacctggagaagcaaaggactatcttagcagcgacactattgcaaatacacttgagaaagctgcggattttgatctgttgtatcccatagaatttctaaactcgatatccataaacaacttcccggaacatcacatatccctgaaaattggttcagcagttgtcctacttcgcaacatcaaccaatcacttggcctttgcaatgggacaagattgctggttactcgacttggtgattttatttttgagggcaaaatcatgactgggacaaatattggccagctggtctgtattccacggattgtcctaagtggaaatagtccgaagtggcctttcacgctccagcgcaggcaatttccaatcagactatgttatgcaatgacaataaacaaatgccaagggcagacattaggaaatgttggtgtatacctcaagaaccctgtcttcacacatggacagctatatgttgctgtttcgcgagctacatcaaaggaaggactcaagttattgatagaagatgatgatggaaatccttgttccaccaccaagaacatcgtctacaacgaaatattatcgttgctgtag

SEQ ID NO: 19898 - DNA, 2247 bp, Oryza sativa
  Clone ID: PAT_MRT4530_25313C.1
atggcgtacagcggtgacgggattggctgctgctcactgctccactacgcggagagccccatgaccatggccaggcgatggctgcactgctggattggggattctctgttggcgttttcacttgggggagggagttgcctccctcgtctactgctcgcaaaggatgttttttgctcacttatgttgccccgtggttctttggttttgcggccatggtcttcttcctctgtcagaccttatgccatggtgtatctatgtttgaacctgcctcctggatttgttcttcatggtttcccaccctgtgtccatgggatatatcgtgctctatgccactgccgcatggagtggtcgagatccctatgcatctgcccgcggaagcgtgcatatgatgaaccatcctcatcctgtgcttgtgatgaacgcccaatgttcacaggtggttcatcgttctcaatagaggctatcatgtattcaccgtcagtgaggttctcatattctataccaaaggactacatggagattcttaaagctaacattgacatgagcataaacactggtcatggcccttatgtcttccgtatcaatggtgtcgtgcatcatagaataggttctttgcttcctgctcctggacggcgcccggagtacgcacagctatacatatatgacaccaccaatgagctgcaaaacagacttaatatttttgaccatgctgacagtgctgcagatgtccctgaccctgctattgtacaagagcttatctctatgcttgaccaatgcaatcctcttgtgcaacagttccggattgctcgagacaagctgctctctccaagtgctcctgaaattgctatcaaactcattgggtcaggtcattctcagggtgatcgttactgccttcccactgcttctaagttggctgcgctcattgttcctggtacatcttctgagatatcgaagtttgatgtcgttgtgcagaagcattcaggtgaattgagtcagctttctcccattcatccagctcttatgtcactgcagtacccacttctcttcccatatggtgatgttggttttcgtgctggcattaagcttagagaggtagatgatcagccgcctgcgagtcgtgatgaggcgtccatgcttgaatattatcggggagacactaatggaaaagatgttggtataaaggtaattctgccatcaagtttcattggaggaaggcgatacatggtgcaaaattaccatgattcaatggcgttgtgcggtgcctacggtcctcctcacatattttcaactttcacatgtaatcctaaatggccagaaattgctcaggcgattcgttttgagctaggccagaaaccaaatgatagaagtgatatggtcacacgtgtttaccatatgaagctagatgagtacattacatatattaagaatggacaggcattcggtccaatacaagctgttgtatacactgtcgagttccaaaaaaggggattgccgcattctcatacattaacatggctcatgggtcaatctggagatccttcacctgcattcattgatagccttataagtgctgagataccagatataggcactgataaatttgggtttggtcttgttgatgaattcatgatacatggcccatgtggtgagcacaatccacattctccttgcatgaaagatgctcttctcaagaaatttcaaggtcatatcaatgtggaatggtgcaataaaacgtaccttatcaagtacctttttaagtatgtaaataaaggaagtgattgtactgcgtttgctttcaagcagaaggatttagaggaggcagacactagcagcgccaacaatggtgggatagatgaggttatgcagtacatcaagtctagatatctatcaacttgtgaatcatactggagattatatgggtttgagatacatggaagaactccttctgttgagcggcttgttgtgcacatgcccaatatgcagtttgtgatataccatgaagaggttgaccttgaagaggttatagaagaccctgattcttccagaactatgcttactgaatggtttgttgctaatcaacgacacatctttgccagggatctcacatactgtgagtttccctccaagtttaactgggactccgacaaaaaagtctggacaaaacgtaaaagaggaaccaaaatagggaggttaaggcatattcatccaagtgctggggagccattctaccttagaatgttgctgatg

SEQ ID NO: 19899 - DNA, 1746 bp, Oryza sativa
  Clone ID: PAT_MRT4530_25314C.1
atggggtttcggtgggattccggcgacgcaaagcggcggccgggaaagatacctgaggaattgttgcttactccacatggtgacaagattacagctataattgatgctgtctacccagattttcagaccaactatgactgcatcccatatcttgctcagcgcgcaatagtctgtctagtaaatgcagttgttgatgaggttaatgatatgatgcttgccaaagtacctggagaagcaaaggactatcttagcagcgacactattgcaaatacacttgagaaagctgcggattttgatctgttgtatcccatagaatttctaaactcgatatccataaacaacttcccggaacatcacatatccctgaaaattggttcagcagttgtcctacttcgcaacatcaaccaatcacttggcctttgcaatgggacaagattactggttactcgacttggtgattttatttttgagggcaaaatcatgactgggacaaatattggccagctgggcgacatgatggatgcgcaaatcccaggacgccgcgttgttcaattcaagcctttgctaaaggaaggcgctgtgtattacatcaaatacttcgaagtcgccgaggcacgcccccagtataggcctgttgatcgactgttgatggcaaagttcactgctcacacaaccgttacagaagatactggaccaccatccacgttcccatcttatgcctgcaaaattctttcttttgatgaactcagagctcgggcttacaagaaagatattatttcagatgctataggcataatgacagccatcgggccagtgcagactgtttcttatgcaggtgttatgaaagctgtgcttaatgaccatataaccaatggaagagaaactgtcgtcgtggcgttatggggtccccatgctacacaattccacgctgaaaacttgcagcagcaagcagacaatggacatgttgtcatgttatttgttggtttaactgttaaatttcgagaccgccagctagccctacagggtagcactgtctgtagatggtatcctaacgcaccaatccaggaaacaatctccctcataagcaggtacagagtagttatcatgggtatcgatccatcggatttggcaaacgatcaagccaaagctgctgagtttaccttctttggagaaatcggtgaacaattgattggcaggcctgttcttaacctggttgcatctgttcatggagcacgagatatagtaccaccagagatcaaagcaatttttggcagacaatatgtcattagaactagtgtgtcacgtggctcattgcaaagaaatcgggtatcctaccaggtggattcccttatgctaccccacccagatccaagccatgcaatttgtctacccagccatgatacttgcatgggctcttctggacatggctcaacatcagctaatgcagttgaaccacatgccatcgttttgtcttctactcaatctatgccaccttctacgccgtttgtgcttccagatacaaaggtcatagctatagcacatctagataaaaaacgtaaatcttctatggctgatgagaatcttggccatggaggctcatctcctgatgaacatgatcgtcgcaagccttctgttgtgcacacactgttcgtagacaagctgccaccagagctgccaaaatgtgaccaactatactcaagcaactatgtatttcttgcctcctcatttgttatagcaaaaatgtga

SEQ ID NO: 19900 - DNA, 374 bp, Oryza sativa
  Clone ID: PAT_MRT4530_25315C.1
tgtgtttttttttttttgggggacaaaaccaacagaaatcatgaatggtaatagcagaacaatgttactctttatcatctacaataaatatcaaatggatcataattacatataataggaaactttattggtcactgtaatgaatgaatcatacttaaaattctcactttcttcataatgccctcattactgctacccaccatgtcaaatatcctacttctattagactgtttatatcataacttttacacaaatggatgttcaacggtccatcaaaactgaaactggttggcatcaagttaggactttcgagagcttcctacaggaaccacattttgacaggagggtgggatttctggaaaactagcctgagt

SEQ ID NO: 19901 - DNA, 4017 bp, Oryza sativa
  Clone ID: PAT_MRT4530_25316C.1
tcatggcccttatgtcttccgtatcaatggtgtcgtgcatcatagaataggttctttgcttcctgctcctggacggcgcccggagtacgcacagctatacatatatgacaccaccaatgagctgcaaaacagacttaatatttttgaccatgctgacagtgctgcagatgtccctgaccctgctattgtacaagagcttatctctatgcttgaccaatgcaatcctcttgtgcaacagttccggattgctcgagacaagctgctctctccaagtgctcctgaaattgctatcaaactcatkgggtcaggtcattctcagggtgatcgttactgccttcccactgcttctaagttggctgcgctcattgttcctggtacatcttctgagatatcgaagtttgatgtcgttgtgcagaagcattcaggtgaatkgagtcagctttctcccattcatccagctcttatgtcactgcagtacccacttctcttcccatatggtgatgttggttttcgtgctggcattaagcttagagaggtagatgatcagccgcctgcgagtcgtgatgaggcgtccatgcttgaatattatcggtatgagtgccactaccgaaaggatgagcccaacctatttacttgttgtggtagactttctgatcagctcgctgttaatgctttctcatgtatcgagacatctcgcctcaacttccatactctgagccagaagaaccttcgctctgaaacacattaaggtatatctgatgctgttggtaggggagacactaatggaaaagatgttggtataaaggtaattctgccatcaagtttcattggaggaaggcgatacatggtgcaaaattaccatgattcaatggcgttgtgcggtgcctacggtcctcctcacatattttcaactttcacatgtaatcctaaatggccagaaattgctcaggcgattcgttttgagctaggccagaaaccaaatgatagaagtgatatggtcacacgtgtttaccatatgaagctagatgagtacattacatatattaagaatggacaggcattcggtccaatacaagctgttgtatacactgtcgagttccaaaaaaggggattgccgcattctcatacattaacatggctcatgggtcaatctggagatccttcacctgcattcattgatagccttataagtgctgagataccagatataggcactgataaatttgggtttggtcttgttgatgaattcatgatacatggcccatgtggtgagcacaatccacattctccttgcatgaaagatggtaggtgctcaaaggggtatccaaaacaattctgtgatgtgacttccatagatgatgatggctatcctatctatcgatgacgcaacaatggtcgctatgtggtaaagaatggagttaagctggataatcggtgggttgtcccttataatctagctcttctcaagaaatttcaaggtcatatcaatgtggaatggtgcaataaaacgtaccttatcaagtacctttttaagtatgtaaataaaggaagtgattgtactgcgtttgctttcaagcagaaggatttagaggaggcagacactagcagcgccaacaatggtgggatagatgaggttatgcagtacatcaagtctagatatctatcaacttgtgaatcatactggagattatatgggtttgagatacatggaagaactccttctgttgagcggcttgttgtgcacatgcccaatatgcagtttgtgatataccatgaagaggttgaccttgaagaggttatagaagaccctgattcttccagaactatgcttactgaatggtttgttgctaatcaacgacacatctttgccagggatctcacatactgtgagtttccctccaagtttaactgggactccgacaaaaaagtctggacaaaacgtaaaagaggaaccaaaatagggaggttaaggcatattcatccaagtgctggggagccattctaccttagaatgttgctgatggtagctcgaggttgcatgacttttgaagatgtcaggacataccaaggtgtgacatatagcacctatcgtgaagcttgccaggcacgtggtcttattggtgatgatgctgaatgggttcatctctttgaagaggcagttatctgggctactgcataccaactcaggaacctattcatgactgttctagcacattgtgatgtaggtgatgttagggttttgtttgataaatactggaagtatatggcagatgattttgcttacaagctaaccaaagctcttggagtacagcgtagagctattccggatgttatgttacagaacaccttgctcaaagaattggatggcattttctcaaataatggcttattaatctcatcattcgatctcccgacaccagctgaatgttcggataccagtgcaggaaataggcttattttagaagagcttagtttcaaccaagacagcctccatgaagagtctatgtccatgtatgccagcttgaatgatgaccagaagaagatatatgacaaggtctttgacaggctagctcataaggaaaaatgtattttctttatatctagacatggtggaacagaaaagacattcttgtggaatgctattatggcaaggctgaggtcaagaggcgagatcgttcttgcagttgcttcttctggagtcgcagctctgctcatgcctggtggaaggacagctcattcacgctttcgaatacctatagatatacatgatcagtccatgtgtggtgttcgtagaggtacaatacttggagatcttattaagaaggcatcattgattatatgggatgaggtgcctatgacaaacaagctatgcttcgaggtgctggatagaactcttcgggatattcagtccactgatgatgcaagtaatgcgcataagccatttggaggtaaagcaattttgcttggtggtgattttaggcaggtcttgccagtgattcagcaaggtacaagagctgatgtggtgcctgcttccttggttaaatctgcattgtggaaccatgttgaagtcttacacctcaccattaacatgaggctacataatccatcgctctcgcagcaagccaaggatgagctagcagagttcgctaaatgggttcttgacattggtgagggacgtgttccaatggatagacgacagggtgaggttgaaaagacattgatacagatacctgaggaattgttgcttactccacatggtgacaagattacagctataattgatgctgtctacccagattttcagaccaactatgactgcatcccatatcttgctcagcgcgcaatagtctgtctagtaaatgcagttgttgatgaggttaatgatatgatgcttgccaaagtacctggagaagcaaaggactatcttagcagcgacactattgcaaatacacttgagaaagctgcggattttgatctgttgtatcccatagaatttctaaactcgatatccataaacaacttcccggaacatcacatatccctgaaaattggttcagcagttgtcctacttcgcaacatcaaccaatcacttggcctttgcaatgggacaagattactggttactcgacttggtgattttatttttgagggcaaaatcatgactgggacaaatattggccagctggtctgtattccacggattgtcctaagtggaaatagtccgaagtggcctttcacgctccagcgcaggcaatttcctatcagactatgttatgcaatgataataaacaaatgccaagggcagacattaggaaatgttggtgtatacctcaagaaccctatcttcacacatggatagctatatgttgctgtttcgcgagctacatcaaaggaaggactcaagttattgatagaagatgatgatggaaatccttgttccaccaccaagaacatcgtctacaacgaaatattatcgttgctgtagattagttttattgtggctatctctgcagcact

SEQ ID NO: 19902 - DNA, 1198 bp, Oryza sativa
  Clone ID: PAT_MRT4530_25317C.1
ttagatgagatggtaaaggttctccctaacactacacttaactggcatctcctcacaacttctgttgatataccagtagtggctagagacctgaatatctacacaacgacctgcaataacaaataaagcactcactcgacagcgatgatccagtccatccagctctcggctattatacacctggtggtagaactggctgagcgactgcgcggcgagcacgccgatgtggccgtcctgcgagagccctagctctagccccggcatggccgccgccgccgccgcgtggctggcgaacatgggcgcgaacccgatgtggccaccgccgccgccacccccaccccccaacccccccgctcccccgccctggagctcgatcccggcggggatccccatccgctgcatgatcccgccgatcaccccggagtcggcgccggagaaccctgcaccggcgaacccggcggacgccgtgggcggcgctgccgcccacatgtggtggtggtggtggtgcgacctggagagggcggagttgggggaagggagggagggggcgacggaggcgagcgcggacgccgggatggtcccggtccccgtggcggcgacgatggccggctccgcctgctggagcagccactggacggtctcgccgtcggacttgtggccgagctcccgcgtgagctggaagatccgggcggcgcacagcgccggcatccggatccgccgcccccgcccgtccaccttggtgtggcggtccttgttcgagctccgcttcggccctagcccctgcatcctcctctcccccgccgccgccgcaaccaccacctgcatctgctgctgctgctgctgatccttccctccgcctccacctccatcctgctgctcctgctgctgaggatgaacttgaatctggaggcgatgctgctgctgctgctcatcgtggtgatgctgctggttggtggtggtggtggtgggctccgttttgtttagcggtgggggtggggggaatttggggtccattagctgcagtagtcgaccatgttgttctctctgaccatgcagtccttgaagcagccgtcgtagcagtgggcgtccgtgctgggcttgacatcctccaccgccactgtgaaggctttcttcgtccccccctccatcggccaaagtgtcccccagagaagccagggagctcttatgtcgagttgag

SEQ ID NO: 19903 - DNA, 190 bp, Oryza sativa
  Clone ID: PAT_MRT4530_25318C.1
tagtgaaagggttagaatagaaacttgggtagaatagacagatagggagagagagagagagagagcttagcaagctaaggcttagctgctgcaaggctccatatgcttcttttgttgtgagatgagattgagataagatgagcagggggtggtggtgcctggtgtgaggctataggtaagatggtgggag

SEQ ID NO: 19904 - DNA, 414 bp, Oryza sativa
  Clone ID: PAT_MRT4530_25319C.1
atggctgtcggcgtcggcctcgattcttctccttcctcagcattctcctgctgctcttgctcccccggatgtggcaccagcggcagcaagagaggcgccggcaacaagggtgccatggccgggttagggttaggcgtgagagaaggggcgagaggaggagccgggtcagaggcgccgtcctgccgcggaggtggagcatcgcaggagctccgtggcgacgccggcgcggccacgccgggtcgctgttccctgcccgcgaagcgataccgatacgccgtgtgggaggcaccgaggcggagagggaggggatacagggatagggtttctttgtgggctattgggccaccaattgagattgctcctacagtcacctttgacgggtggccggccgtcagtggtgacatccacctctga

SEQ ID NO: 19905 - DNA, 3087 bp, Oryza sativa
  Clone ID: PAT_MRT4530_2531C.1
atggcagcagatggagcactggcgtcagcgccctactcccctcccctcccggatctggccggaggggaggaactaggcagtggtggctaccctactccctccccttgcctccctctttctgatttgcccggaggggaggtggccggtggcggcgcgacaacaatagatgggagagcggcggcggtccctccacttctctaccagatctggccaaaggggaggaggcgaacaatggtggcagcagtagagggagcagtggcagtggtggcgactggcagagacatggacaggctcgaatggatgtatcattggccgatgtttttatcgccatatatggaacaagtgtctaaatttattgatattgccaaggagtacgttgagaaggagaataggaggggtatttattgtccatgtgctaaatgtaagaatgaaaaagtgtgggaaaatctgacgaaggtaaatgagcacttagtcactcgtggatttatggagaattacgttatatggacacatcatggcgaaaatgatgaagttagactcgttgaagaagaatatgaaccggttgttgaagacatggattgcacggatggttgtgctgaagacaatattgatctggaggaattgttatgccatgtagaacctgagttgcttgttgggtcggctagaggtttagataatttcgaagctttgaagaagacaacaaaggatattctatatgatgagtcaaagggctgtcacagtgacttctcaattttacgaaaagagtacgcctcgttggttaaatgcccaacttgcggtgctagccggtacaaatcaaacagcaatacctgcctagaagaggatgacacaatcggagagactaagagaaaaatcccgcagcttgtgatgtggtaccttcctgtgaaagaccgcatcaagcggttgtactcaaaccctcgagatgcggaactaatgcgatggcatcaagaagggcgcaagaaggacgggatgctccgacacccagcggatgctcatcagtggttaaatttcgatgcaaagtacaaagaatttgctaaagacccacgtaatattagatttgcactaagtactgatggacttaatccttttggagacatgagcagttcccatagtacttggccagttcttcttaccatgtacaatcttccaacttggcttggccagaagagaaagtatatacttctatgtatcctgatacaaggaccccgacagcctggtattgacattgatgtatttctcgaaccactgttggaagatatggcagatttatggcatgaggggttgaaagtgtgggatgagtacttacgacaacacttcacagtgaaggccatcattttcgttaccatttatgattaccccgccatgttttcagtttcaaggcagatcaaaggttccaacaagcttgtttacttgaggcaccggcagtttctacccaagggtcataagtttcgcaagatgaaagcagagtttgatggtactgaagagaatgattctgcaccgaaagttacacccggggataaagtatgtgaggcaacagagaaaatagaatgcgtgtttggaaaagggactaagaaaaaatcaaaggggacaaagcgtaagaaaacatcaaagggggcaaagcagaagaaagaagatcgcaagcccccttccccattcaagaagcattctatattctttaagtacctgccgtactggaaagatctggagattcgtcatgccaaagatgttatgcatcaagagaagaatatattcgacaacgatggtttgcaatcacggtccgacctagtcgaaatgggaattagggaggagctacacccgcaagaaggagaaaagactggcaaagtttatcttcctccagcctatttcacactaactccagatgagaagaaggcatttttcaaatctctctgtgatgtgaaagtgcccataggtttctcatcaaacatcagacgactagtgtcaatgaaagatttgtcggtatctggttataattcacacgactgtcatgtcttgctcaccgtgtttctcgcagttgctattcgggccattcaacgggaacatttaaagattgctatcacaaagatgtgctactttttcaatgctatctcccagaaagtcatcgatcctgaagagttagcacttcttcgtacattcccacatgagatccaatgccaacttgaaatgtatttccctccatcattctttaatatgatggagcacctcatggttcacatcgtgccccaaattgttgccctcggcccgttgtatctacatcaaatgtggtcctatgagcgttacatggctgtattgaagggctatgtatggaatcgcgcccatccggagggatcaatggttgaggggtacaatacagaagaggtggtcgagtgttgtattgattacctaaaagatggaaagacaatcggaatacctgtacctcgacacgagggaaggttgactggtagggggacggtagggaagaaaagattcgtcgaccttgaatacaaatttgtttcagaagctcacttcagtgttcttcatcagcttgctatcgttgagccttacatcgatcaacacctcgaacttctcagatctgaaaataagggacgcacggatgattggatgataaaagaacacaagcgccgcttcgtagattggttgcaagaactaaatttacctgatggagataccaccgaggaaattacaatgaagcggttctcatgtggtcaatcaacccgagatactaagacagttacacagaacagcggagtccgagttgaagcaatagattcactaggggaaaaacagacatactttaggtttattgaagaaatatgggaaatcgactatggactcacaattcaattccccatttttaagtgccagtgggtaaaacatcttaacggtgtcatcattgataagtttggtcttactgttgttgaccttgggaatgtgcgtcacaaggatgactcctgggtactcgccgatcgcgtggcacaagtgttctatgtgacagaccctgcaaatttgaagaaagaaatagttttatccggaaagcaaaagatattatga

SEQ ID NO: 19906 - DNA, 627 bp, Oryza sativa
  Clone ID: PAT_MRT4530_25320C.1
atgtcgcgcgcgctcaactccggctgtggtccttcttcaggtcgtgcgagccgcgaaatcacaacgtggctccatggatctctgcgagacactgtcgggaggcgccggaggcgcggaagatgtggggaccgccggaggatgcgagcgcacgccgcgagggagaggatccactatcagcagcagcagatgcaggtggtggcggcggtgacggggaataggaggatgcaggggctagggccgaagcggagctcgaacaaggaccggcacaccaagctaacgcgggagctcgaccacaagtccaacagcgagaccgtccagtggctgctccagcaggtggagccggcaatcgtcaccgcatggggacgggtcgcaccaccaccaccaccacatgtgggctgccgccgcggcaccgcccgccgcgtccgcggcgttcgccggtgccacatcgggttcgcgaccatgtttgccggctacgtggcggcggccatgccggggctagaactaggactctcacaggacggccacatcggcgtgctctccgcccggtcgctcagccagttctaccaccaggaggacggggaggatgaccgcgatgacggcgagtccgatgaggagtccgggcagtag

SEQ ID NO: 19907 - DNA, 929 bp, Oryza sativa
  Clone ID: PAT_MRT4530_25321C.1
gagttatattactttacttaaacaccgtgggaatgcttggaatttacagcgccacatcatgcgatttttttctcaatcatgaagcattgctctactgtataattgtgtgctgtatatgaggcactaaaagtgtaaaacatgctctacagagaaacattacacatttattttcaccatgacacgttgacaccatgcctgcaagcacacattgttgatgtttctgctgttccgttctattaatagacaggtcacccaaatcaagaaattgacaaaaatagtaaacatgctacacaaactaaaagcaagccagggaaaatcaagagaaaccttgaaaccgacatcatacaacataccacaaaagaataagcatataaaatcaggcctctaaaaatgtatatgcatcatatttgcgttgcagaaacagcccgtgggtgaggatcagtttgacggacatcgtatttgtcgcacataagcggatcatcactctcgtaaaaaggaaaaaaagaagacctctctaactgcaaaaatacctgaatatctacacaacgacctgcaataacaaataaagcactcactcgacagcgatgatccagtccatccagctctcggctattatacacctaaacacttggagggggataaaccggcaaccatccatggagcagcaggagtaacaactgaagatgatcatgatccatcccaacaagtcgccggagcaaagtagtagcctctttcgagcttcgacaccacacgaggaaaaaaaatcagacataaaaacccccatgaagaacaacccaacagtaacaaaagcattccattcccccctccattagctgcatgtccttcctagaattctcttttctcctccgaagagacgacgcgtggatgaacaaattcaggtggcgcgcacgcgtccgcccacgcgtccg

SEQ ID NO: 19908 - DNA, 213 bp, Oryza sativa
  Clone ID: PAT_MRT4530_25322C.1
atggtccctatggcggcgatggttaagggccatcatccggctgacggtgcgtcggcggcgccgccggtgaaaaccttgcttcggttccgaacgagcggtggcggcgatccacgtcgcatcctccttgggggcaccgctttggagaaacctcttcgtgcaaggatattgtcattggtctatgcattggcttcgaacttcagtcctaggccttga

SEQ ID NO: 19909 - DNA, 1706 bp, Oryza sativa
  Clone ID: PAT_MRT4530_25323C.1
ctactgcccggactcctcatcggactcgccgtcatcgcggtcatcctccccgtcctcctgctgctgttgatggtgttggtgatggtggtgcgggtgtggcagttgaccagtggcactggcgccgccgacctggtggtagaactggctgagcgaccgggcgaagagcacgccaatgtggccgtcctgtgagtgtcctagctctagccccggcatggccgccgccacgtgggcggcgaacatggtcgcgaacccgatgtggcaccggcgaacgccgcggcggcagcccacatgtggtggtggtggtggtgcaacctggagagggcgcagtttggggaagggagggagggtgcgacggatgtcagcgccgacacccgtccccatggcagtgacgattgccggctccgcctgctggagcagccactggacggtttcaccgtcggacttgtggccgagctcccgcgttagctgggggcccccggctgctctcttcgccggttttcgatgactaggatgccacgtcagcaaaaccatttttttttttttttttttttttaaaacaaatgagcagtgatatctctgaactttcgcttacacatagatagcaagcagtctagtagtggaccaatccggccttctgcacgcatacagtcactcacacgctactagcctctaaaaatgtatatgcatcatatttgcgttgcagaaacagcccgtgggtgaggatcagtttgacggacatcgtatttgtcgcacataagcggatcatcactctcgtaaaaaggaaaaaaagaagacctctctaactgcaaaaatacctgaatatctacacaacgacctgcaataacaaataaagcactcactcgacagcgatgatccagtccatccagctctcggctattatacacctgcaaaaatgaacacaaacacagatacataagctcatcaagcaacctttcgaagagcatgtcatgtgctgactgtggagtgaaaaagattgagctttcacctaaacacttggagggggataaaccggcgaccatccatggagcagcaggagtaacaacggcggcactagcgtcgccgacctggtggtagaactggctgagcgaccgggcggagagcacgccgatgtggccgtcctgtgagagtccggcgaacgccgcggacgcggcgggcggtgccgcggcggcagcccacatgtggtggtggtggtggtgcgacctggagagggcgcagtttggggaagggagggagggcccctgtatgtcagtgccgacacccgtccccatggcggtgacgattgccggctccacctgctggagcagccactggacggtctcgctgttggacttgtggtcgagctcccgcgttagctggaagatccaggcggcgcacaacgccggcatccgaatccgtcgtccccggccatccaccttggtgtgccggtccttgttcgagctccgcttcggccctagcccctgcatcctcctattccccgtcaccgccgccaccacctgcatctgctgctgctgatagtggatcctctccctcgcggcgtgcgctcgcatcctccggcggtccccacatcttccgcgcctccggcgcctcccgacagtgtctcgcagagatccatggagccacgttgtgatttcgcggctcgcacgacctgaagaaggaccacagccggagttgagcgcgcgcgacat

SEQ ID NO: 19910 - DNA, 567 bp, Oryza sativa
  Clone ID: PAT_MRT4530_25324C.1
ttcggcacgaaggcatcgtctacttgatgatccagtggttcaactatcaacaattaatgatgatgatcacttggcagtttataggcttccaaaaatggaaaaaaagccaaattacattcagtttgttcatcgccgtgatgattgggacaacggaaacaatatcagtgtaacagcttggaagccctacggtgttcctcttctggcacaagtatctcgtaatgaagctgtcacgggtatgcatatccatgagatggtccgtaaaatgcttgcacctatgcagaagaatcaggaatcccaacattcggttcaaagctctgtttccacaaggacacagacttatcatactgacagcaccaaatttcagctacagttgattgacgatagcaacacaactattgagcaatccaatgatactattagagttccacagtcttctcttgcagctgtaatctttgtcaattggtctaaagcagatctgacaaagttaaacactcatcatttggagaaccttccggaggtgttcacgtatgctcctcctgccaagagaacccgtggtgaacctctctc

SEQ ID NO: 19911 - DNA, 194 bp, Oryza sativa
  Clone ID: PAT_MRT4530_25325C.1
cggacgcgtggttcagactctggttactacccatgggacgagttttcccggacggccatctcatacgatttcaatttctcgttcggggcaaaaccagctctagacaaactctacgctataactagaagtaagggtgcacgccctctcgctggcgctaattgatgcgtagaacataccgacctgcctcatatcag

SEQ ID NO: 19912 - DNA, 481 bp, Oryza sativa
  Clone ID: PAT_MRT4530_25326C.1
ccacaggaaaaacgcaggaatcagatgagagagatagactcagaggaaatgttccaagaggttagacctcttgctaactttcctccaaaatgtgcataggattacccattccataggaattttaaaggattggataggattcaatcctttttcatttctgcagctcacacccgctcaaattcttcacaatccatgggccgtggccgcagtacagctatgggatggtcatcctgctgcaggccaaccacattctacgttaacaagatctcgagattgaagacgatactcgagagtactggccgtccttgtactgcggctctttctcgacctgctttggtgggaaaagatctgttgaactacacgaagaaaagatttatcaactacgggactgtctggaagcactatctgctgaggcgccgtggccgcgctttgctgcagcaacagcggctgcagaagccaatagaaagcacgctgttcccac

SEQ ID NO: 19913 - DNA, 1626 bp, Oryza sativa
  Clone ID: PAT_MRT4530_25327C.1
aaaattcacaagtctttagaaaggagcaaaagaggaggccacctgccgaaattgggccaggtcggccgagcccatggttcagctgaacccaccgtggctccgttggttgcaagaaagaacttgcaccgatgatatgcctccatgagtacccactttctattgtagaccatgtttgtttttgtaggttttatggtgcactattagcatttgttcaagattctatcccaaaacacaattaggaaggatattgttttaatcatagtacaattgtcttcactaactagaaaattacaactctcacaacgaatgtcagcatgacaaatgcattctggcttagatacatactatgcaaatacaatacttttcatctgattgtttcacggaatttggactggataaccactaagtgtcctaatacatatcgacagtgcttgtaatgacaacttcatatgacaagtatgtcatggccgacctcttatttatcaattgctcttcctagagaagttttgacctttaaaaggtttattattgcatatgtgttgttgtgcacatattttgaatttgattgtgaaagatggaatgactatcgtagataaaatcattgagaagtttcgtgagagtatttcatttttgacagcaacaccaaagcgacatgagaaatttgaaaaaaaggcccaacaaatgaatcttaagtatgagaaaaaaattgcctttcattgcaaaattagatggaattttacttatctcatgcttagcactgcaaatttatatcaagatgtctttgcaaaacttggaattcctgaaaatttgtgtactccttttgtccatcaaatgatgattgaaagtttgctagggtgcttttgagataggttcaagatattttatgatgcaactgaggctttttctggtggtaagtatgttactgctcctaaggtttgtgctatttatttaggtatgaaaaaatggtcaactagtgatgatccaaacattacaaaaatgaccactttcatctcagcaaaatatgagaaatactggaaggatgtgtatggtattttggctattgcgtgttttggaccatagatataaactttatatgttgtttgctatgcttatacaaatctatgaagaagagttggcacaaggaatagttaatgaggtgaaataagataataagatttgtctaaattagtgctacaatatcaaaatcatgtggaagagggtgttggaactccagatagagtcaatgtgtcttctagtagtgttgtgtttaatatatttgatccgtatatgtctggagaaccaattgcctcttcctcattgcttcgcactgagttagatttgtatttggatgagaaactgctgcctaggacgcaagattttgatattatcatttggtggagatttgtagggtattaggtatccaacttttcaacagatggctcgagacattatggcaatccctattacaacagtagcatcttaatcaacatttagtactagtgggagggtgattagtcaaatctaaattagcctaaacctgaatttgtggagactcttacgtgtgtgcaagcatgaggtcgtgctaacatgttaggtaatttcatttttttacttttttatctttca

SEQ ID NO: 19914 - DNA, 645 bp, Oryza sativa
  Clone ID: PAT_MRT4530_25328C.1
ctgcaggaattcggcacgaggggaaggcaggaggagaagcacgcacataccagcaggaggtgcaggactgcgtgctccttctcgttgttccttactcaccttttgcctctcgctgccttgccccacagcgaccggtctcgtagcttaggtagtagtagcccagcctctcgcatcacttcacactcgctgcccaccctgcctcctctggtgtcgccgctcgacctctctcgcctctcgtctccaactccccagcagcgagcagcatcttcatcacagctctcagctccctgcagagaggagggcacaagatggacaggctgaacgcgaagctgtacctgcagaactgctacatcatgaaggagaacgagcggctgcgcaagaaggcgctgctgctgaaccaggagaaccaggccttgctcaccgagctcaagcagcggctcgccaagacgaaggcggcggcggcggcggcggccgcgaccaaggctaacggcaacggcaacatgcccgccggcggcggccgcgcgtccctccccgacctcaactcggctccgccggcgcacggccatgacaaggccgtgcccaagtccaagaagacggccgccaagtaatgcagcttcgtggctgtcatgaactcatgatctatgt

SEQ ID NO: 19915 - DNA, 119 bp, Oryza sativa
  Clone ID: PAT_MRT4530_25329C.1
gaaacagatttcgaagataatactgtaaataattttgcatgtttcttaatccctacgctagagaacagcaaccgcgtgaggctttgtcggtcaaactcttattccaaggcatggatcat

SEQ ID NO: 19916 - DNA, 213 bp, Oryza sativa
  unsure (1)..(213): unsure at all n locations
  Clone ID: PAT_MRT4530_2532C.1
ccggccgagatccgtgcgaccagcgtcgggaaggcgactgtcccgcgcttctctctctctgccgccgcgcggaacggcgcgatctacccgggggacggctctttattctcccaccgatctacccctttctccttggagctctngcnccacggccccgcgcgggagcagtcgaccagggggtgggactgacgcacagcctcgtccatcgcttgc

SEQ ID NO: 19917 - DNA, 318 bp, Oryza sativa
  Clone ID: PAT_MRT4530_25330C.1
atggcggatgctaaatttgggccgcgcgagacaaagtgctcacaacgcgcacacacaccctacccctatgagcacctccggaaaactgggtcggcatgtcttgagattgacgaagtcaccacaggcgcctcgctgtcgacgggtggggccttctattttcagtgtcccgtcggaggagctggcatgatagtggacaattgccttctagctcactgcaccctcagcgccgatgctgtggatgacatgacatgccatgcatggcccgagtttggtgacgagactgtggatgacacctaccaagctcacttctcgctttga

SEQ ID NO: 19918 - DNA, 1333 bp, Oryza sativa
  Clone ID: PAT_MRT4530_25331C.1
tgggtccctgtccaggaaaatgttttgtgtactagtgagttttactttgttaattatagaatgcatgctttgcgtacacacgcgcgttgtacttgtacgtactccggcaatggggctcaagaaatacgctcaagtggaggcggggaaggagtgatgtgaccatggctactacggatacaaccattgttcacatcatggatgaacaacaagatatcaagttcaagtcctccaagtgctaggatccaattcggccacctgctacactgctgacttcaaacagccaccgaatctgcatacgacctccgtttttgacccgtgagtacttgatggaaagctctcggagtcctctttccaacggatctagccacatcaccaaattccaccctagccatctgcaaataaagaaacaaggtgctgtaacacctgtcatgggcctttgggcttgtaactttgtttggaaccccggcccatgtgggacccatgttgggggcgccccaaccaggtggagcacgaccctaggcaccctaggtcgtcctcccacatccataaatagctaggaataaggttgatctgcaccggcaagatcaacaacccacggagaggaataaggttgatctgcaccggcaagatcaacaacctacggagaggaataagtttgatctgcatcggcaagatcaacaactcatggagagcgccgccgccgcccacggctttgtgcgccgtcgccgccgtcttgccgtcgccaccaagtcgcgccgccaccgtcgccgtgccgtgctgctcctcctccgccacccaacacagcagcagctgccacgtgctcgcgccgccgtcgacatccaatgggagcacagagctggcgccgacttcttcttttccacggcgccgtcgcgaagttctcctcgatcttctcctctggaaccgccttgcatcaccgccttttgccgcctataagtacccggcgaggaggaaaacttatgtcgagcggggcaatattgtgatatttaccgaggcgcaggaggaggatgtggaggcggccaggtgggcagatggcgtgtggacgggcgccgccgcgatagcagctgcaacaggagcagcaatgcttgcggctgtagcacaagcatgcgacaacagccgtgcttgtggcggccccagcagcattgtgtggcatcagctcactataggcatgtcgttggagcagcagcagcaggtccctgcgacagcagcaagccagcaagctggtagagctacagcaagagcagcaacaatggcggacaaaggcagcagcagctgtagcagggacaggggcatccttgtcctatttgttttgtga

SEQ ID NO: 19919 - DNA, 580 bp, Oryza sativa
  Clone ID: PAT_MRT4530_25332C.1
ctgattcccggccgggatccaaggcaccgcagcgggcgcgccccaccaccgggccctcctccccctctccgccctcgccaccccgctcctccccttccttccccgcagtggtcccgcaaaaaccctagccatcccgccgcctccgccgccgacgacgacatggacgacgacgccatcacggcgctgatggacatcgacgactccccccgcagcagcggcgccggcgccgtcttcctcgacgacgaggaggacgcggaggtcttccccggccaccgcgcggcccgcgccaacgaggcccgcgggcccctccccttcgccggcttctacaactccttcgacggcgccgacttcgacgacaccgacctcgcctgaggcgcttacggtaacgtgtgggggccggtgctcttgtggggggctctcctggaagtttgagaggctgatctgtctctatggtgatggattcttctagttagttcgtcggttagatttcttttcatgtatctcgagacgtcgtgagatcaatctgggtaccttttgctgccgatgtttttgaatctcgaaaaaaaaaaaaaaaaaagcg

SEQ ID NO: 19920 - DNA, 1566 bp, Oryza sativa
  Clone ID: PAT_MRT4530_25333C.1
gcagataactacatttatataaatacatgttttttggttggagtgaagtgatggaacaggggcaaaaacatttctgatgctgaaccctttgctgaacggaacaagcaggatgctggcagcataccaattagactaactgaactatcaacaatgaaattttacaacagaaggtgatatacaactggtgtttaaatgccccactacacaaataccaatctaacattctgctagattacaattccttttgtcttcagacatggcaattctgtacgaaccttgacttgatttttatcaggatccaggaaacctaaacgaatatataaataataatgtacaggtgctatcccctgagaacggacttatggcgtggcaggcgtttcagccttcatcaaaacaatttcatgtagcggctgcaaaatttacactgcctgatcagtttgggggatgccatgtttttggaaccattcaggcatatgaaatctttcgtatagtgctggtctaacatctctctggatagagagatgcttcagaagtggaaatataacttccatgagctgattatcattatgttgtccagctgaaaatggaacacagggtattccattcaaaggttgcaatatgaaactgaatgggttgttgtcaacaatgacaactctgcagaaatcttttgacacgcaagaaagatctttgacatgttctctgtattccgtagtaacagttgatggacgatatagacggagtttgaatctattatggacatctattctgtcaactaaaggtcttgcataaccttccaaacctgctgtaaagagaataagatctgcaaattcactagttttctgcaagaactcgtgcaaaccaggacgttcaaaaacggtgacatgattcactttgttcctcccttcaacatccttctcagtggatatgcactccatgtcaaagcaatgtaatccagcttcaacagcttgggtgcgtacaatagctggaagactggatgactcatatgcagaaactaaagtttcatccaaatcaagcacaaccatccacagctctgctaaagacgtgaggcgctgcagggattccggcgggggcgtcggcgcaggggccgtgtcggccgggatctcggagcggagcggcatgaaggccaccgacggcgactgctcggagtcggccggcccggagaggagcgggtagcggaacccgacgaaggagaggagctgggcgcaggatggggtgccccggaggatctggagcaggacctggaggaggaacccgatccaccccaccaccgcctgccacgcctgcgccgccaccttcccccgctgctgctgctgcgccgccgccgccgccgtcggcgagtacacctccgccgccgccatgatcgccgcccgcggcgagctgtctccccgcaacgtggggcggttgggaggcggggaggcgaaggcgatggcggtggcgaggccggagaggcaaccggaggagggaggagggggggaggaggacgtggtggtcgactggtccggacgcgtgggcggacgcgtgggccgcgggtgccccgagaccgtc

SEQ ID NO: 19921 - DNA, 192 bp, Oryza sativa
  Clone ID: PAT_MRT4530_25334C.1
atgaagccttggatgcacaaacccaaatggggcctccatgaggtggaggttgaggcaaccaaaggcattaatgaagctttcagctgcacggctttgatgccgatgagtacgaagacgacggaaacgatccacacaaacaccaaactggagacacatgtcggagaagacgtcatcgaggtcctccatggctag

SEQ ID NO: 19922 - DNA, 1116 bp, Oryza sativa
  Clone ID: PAT_MRT4530_25335C.1
atggcaaaccattgcaacaacacctcctctgtcacggttgctgaagttgcaagagggtcgcatgtaatcaagattgatggatacttaaggaccaaggagctgatggagaatggcaagtatgtttcatctatcccattcagtgttggaggtcatagctggttcatcacatacttccccaatggagttaacacagagagtaaggattacctgtcggtttttctgaccattgattttgcttgcgccgggggcgtgaaggcaaccttcagctttgcattgctagacaagaatggtagatcagtgcaattatacagcaaattgtaccctttacacaccttcacggaaaaaggttcagattggggccactctaagttcatgaagaaaactgatttggaacgctcagtacatttgagcaacgattcattctccatcatgtgcgatttgactgtcatgaaggatatctgtagcaaagaaaccacacaaaagcagtttgtggtggttcctcctagtgacctgcaccagcatctgggagacctcctcttgaagaacatggatagtacggacgtgacgttcaacgttggtcaggatatattctcagcgcacaagtgcatactcgctgctcgttcatctgtcttcagagctgagttctttggcgccatgagtgctaaagcccgtaggaccatcaaaattgaagatatagaagctggggtgttcagagcattgttgcatttcatctacactgactcactgcctgagactgctcaaaatattgtgatggctcagcacctagttgtggcagcagatcggtacaatgtcgggaggctgaagctaatatgcgaggagaagctatcaaagcacattgactccaacatggtggctaccactttggccctagctgagcagcacagttgctatggactcaaggaagcttgctttgagttccttgcttctcgctccaatcttgagaggatgatggccagtgatgattatgagcatctgaaaatcagttgcccgtctgttctcatggagcttgttgcgagccgccccccgccgccgctctggtcatcgtcgtcgctcgggaaggccgccgtcgggttcgccaagtcatcgccgtcctag

SEQ ID NO: 19923 - DNA, 2737 bp, Oryza sativa
  Clone ID: PAT_MRT4530_25336C.1
cggcacgagggtagtactacatacacctcctcttatagccccggggttgaattccaccgacccgcggcacgcatccttttttctccatccccctccttccgttcttccatttacctccacctatatagcactccggaattgcgccatctctctgccttaggagtacagtgaagtgctctccatataattgcagtggtgcaaggcaggcagcaactttcttcttcttcctcctatcataatctgctcatccttttcctcctctggagcaaccatgtccatgcagaaggtgtactagatatatagagttagttcgcagctgctccctacttacataaacaaacgcattcagatagccagcttcttgatcggcaacagcagctagttagagtgcaacaagaggtagcagagacaattttttttggcaaggcaagcaaaagctgatcgaggagagcgatcgagcaggtgttgatcgatcggtgcgaggaaacagagacaattttcccacacagattgtgatttggtagcagcagcaatggcgggcgttggattcgtggaggacatgctgcgggagcagagcctcctggaggcgacctgcggcgacctcttcgaccacatcgacgacctgctcgacttccccaaggaggagtcggccgccgacgtgctcctgctcgacgcgccggcgccagggagcccgctgtcctcgcgcatcatcggcggccacgccaccatggcggcggcgccgccaccgccgccgcagatgatggcgctccccccgccgccggcccccgcgaaggacgacgcgtcggcgctgttcgacgcggccggcgcgctcggcgccgaggtgttcgaccgcaaggacgcccacattggcccgtgtgatgagctggacatggacatggcgcagctggagtggctgtcggggctgttcgacgatggaaccatcccgcacgagccgagttttccgggcgtcaactgcgcggcgccgatcaaggcgtcggcgctgacggcgaacgccggcgtcgtgctgccggacaaggcggaggaggcgctgttccgcagctccagccccatctccgtgctggagcacagcggcttcaacgtggcaaccaatgggggctcctcctcgtcgtcctcctcgtcggcgtcctcctcgtcggagtcgttctccggcagcggccgcgcgtggtccgcgcccgtgtcgccgcgcccggagccgcccgtgctcgtcatcccggcgcgcgcgcgcagcaaacggtctaggccgtccgcgttcccggctgtccgcggcgcgccggcggcgacggagaccaccatcctggtgccgacgccaatgtactcgtccacctcgtcgcactcggatcccgagagcattgccgagtccaacccgcacccgccgccgatgaagaagaagaagaaggccaagaagccggccgctccggccgccgcctctgacgccgaggccgacgccgacgcggcggacgccgactacgaggaaggcggcgcgctcgcgctcccgccgggcaccgtgcggcggtgcacgcattgccagatcgagaagacgccgcagtggcgcgcgggcccgctcggccccaagacgctctgcaacgcgtgcggcgtccgctacaagtccggccgcctcttcccggagtaccgcccggcggcgagccccaccttcatgccgtccatccattccaactcccacaagaaggtggtggagatgcgccagaaggcaacccggaccgccgacccgtcctgcgacctcctgcagtacatccgccgccgggattaatctcccggcggcggcggcggcgtcgtcggaggacggttggtcgtcggtctcagtcccccttagctatatatgtatacatgttagtatgtatgcatgcatgcttgcttcagtcgtcagtgcgtcgtcttcctcgtcatcaccatcaccatggacatggacatggacagcagtgtgatcatcagcagcattgccctcctgaagccatcatccatcatcgatcaccgcccgctctgcggcggctgccatcggcaccagcatcagcatcatcatcaatccatggatcgatcgccggggtcatactggcgttagtgcagctagggcttttcttggggttttatttttttcctttttgtctattgattaattggttccccttaaaaagatgattttttggttttgtatagaggtgggtgagagagagagaggaggaggccacgcagaaaatagatgaatcaccgtggttgttgcattgcagatttgcagttgcttgcaaaattaggtaggtgagaaggagagctaaaccagcagcagagggagacagatttagagaggaaaactttgcagctagtcagtcagtcaattaggaggaggaaaatgagatgtgttttttttaaggggggtgatgaggaggtggagtttgttggtttgctaattagaagtttcttcttgctagtagctactcaggggggacatccatcatagtttatattggagcttgatgtactgaactccgaaaaattctttttgcagttcatctatgtctagggattgataagtgttatttggtttctatactagcaattactttgtagcaattaattatatatctctatatgccttttttctgtttctcctgccttgttggttggtggtgcctccctctgtacaagttgtgatcatccaatttgaggagatatattcctttatgctctgaaaaaaaaaaaaaaa

SEQ ID NO: 19924 - DNA, 480 bp, Oryza sativa
  Clone ID: PAT_MRT4530_25337C.1
atggcaattaaggaccggttcacgggaaaccctgggagacttaccgtgcttaccacaagcgggagtggcttagaaattctggttcgtgaatttctgggcgtgacagtggatctggtgacggctcaacgactaagagaagaggtggcggcggctcgaggaaagaaggagcagcagcgaggcagatcagatgaaggcttggtgcgtgcgacaaggagaaggagcaatggtggtggctcagtgacaaggagcagcagtggtgaggtggatcaaatggaggcttgttgcgcaggcgatgagaaggaggagtggcagggcggatccggtgatgaggaggcccgggcggtggattcgatagagtcgaggcgtgcaagctctggaactagtagcggcgggtcggcgaggatgttggctgcagcggcacaacctcccatccacaagctatatgcatcggcagcgacggcattatccggcatacagtaa

SEQ ID NO: 19925 - DNA, 818 bp, Oryza sativa
  Clone ID: PAT_MRT4530_25338C.1
ccggccgatcatcaaacgagacaagagtcacagttcgagtcagagctatctaaccaatccatccatcgagcaattgttgatccgtctgtgaattgtgatggcggcggcggagggggagcaggggaagacggtggtggtggtcggggtggacgacagcgagcacagcaactacgcgctggagtggacgatgcagcacctggcgagcggcatggcgggcagcggcggcgccgagctcgtcatcgtccacgccaagccctcgccgtcctccgtcgtcggcttcggcgccggccccgggtctggagaggtggtgagatacgtggaggccgacctgcgcaagacggcggaggatgtcgtcgagaaggcgcgccgcctctgcatcgccaacgcgatgcacgcgttgatcgaggtgatcgaaggggagcccaggtacgtgctgtgcaacgcggtggagaagcacagcgcggggttgctcgtcgtcggcagccatggctacggcgcaatcaagagggccttcctggggagcgtcagcgactactgcgcccaccacgcgcactgctccgtcatgatcgtcaagcaacccaaggccaagcgctctcgtgccgagaccgcgtgaaaaacaccaaatttcgggtgtgagctgagccgagcaatgtgtgtgtggttcgcttgggtagcagcagcttcttgcgttctgtacatgggatgatttgtatgtgttagtttcataggttttatcagtttatgtatcgaaatgtttgtgcatcaaaaaaaaaaaaaaaccttgttataaaaaaaaaaaaaaaaaaaaaaaaaaaaaa

SEQ ID NO: 19926 - DNA, 2538 bp, Oryza sativa
  unsure (1)..(2538): unsure at all n locations
  Clone ID: PAT_MRT4530_25339C.1
ntttnnnnnnttttttttttttttttttcgtgaagaaaagaacccctccaaaatggggctgattatattacccatatcaggcaaaaaatttatcaaagaaatatcttgtctgttagttaggaaactaatacaatacaatagtttcaggatagatcagatatatgctgaacacaacgagtgcagcagtttttacacgtaaagcccttttaatttatgaatcctacccccgcttcatacctgacctatacttatcagttatcagccttataaataaaggctttggcactatgaacttcaagaacaaaacacaaagcaccagaggaatttatccaaatagattcactaaggcaagcattttcagctttgctgcatgcaacaaaaccaggagaaggcccacagagctcaagagaaaacaacccctactttccgagcaaaatcatcatcgtcatcatactcttcatcatcatcttcataagcattctcgtcatcggatttgtagtcctggccttcgataggctcatagtaggactccccctccctctggtcataattatcagcatcttgattttccacgggatccacctcaataatatcttcagcctcaagtttgtcaccatgagatgaagattgcccatggccctccacagggatgtggccttcgtctctgaattcttcatcgccagatccacttttgtattcatcagaactaattatgttgtcaccttccttctcagcttcagccagagaagcttgcctgtgtgagacctcggcagatttatcttgtttggggctacaggcagatgtgccattggcccatgctgcctctcttttccgctgtaagatgacactaaggggctttgggccctcaaaatcaagcgatgcttcaggctcaacacttccattggccttactggagtccctcgagtttttgcgatgagggaagttgtgtgagtcaggcacatcctttgtcaaatgctggccatctgcattcctggaacctaaagcaagttcacttgatctccgctgggtctgctcttcatgttgtcctgcctccctatgcctggtaccctgaaattccgtgcgcctaactggagacagcctgtcccggagtcttcttctatctcgctctttctcggagcgagtatcaactctgtcaggagatcttccaggaagctttattctgccttgcagacgagagctaagagtgcttcctcgagagctctggtgatgatccctgtgtgaacggtgaccatgtgccctttccctgtagcgctcatccctccgccgttgctctccattgcgttctggactaattgccaatgaagactcatttattcttctcctacggagccgatgacgtaaatccgatccatccatctcgacacggtctctatctctttgcagaaaccttctttctgagtggaaaggccgttccatgctcctctcagatgatctacgccgttttctctcgtagccatcatacatatgtcccatctggtcttgctcatccataccattgaaccgctctctttcatgatgtgcacgaacatcaaaatcagctggagcatattcataatcttccactggatacatatctcctccaaaatcttcatcatgtaaataagcagcaccatctgcatcattgtccacgagaacatcaaaacctggtgaagattcacccaaaagttcatcagcctccctactgttctggggcagatcatctgcagggggcatttcataactttggttccaatctcgcacaggatcactatccattggaaaatggttctggtagcactcaggatgatccccacctgaagaagtagtgaagctttccttaagtgctgctggcgtactactttttaccttctctgacttaggacaagacattgcattggaagcaaccggtattgcaactgtagctgtcctggcagaattaaccgttgaccgatcaacggctgttttgcccctctcattagttattggagcaccatgctgaatggaattagtagactgcacagaatctttaatgcccaacaaatcattcttttgagtctgaagctgctccaaaggtaaggaagaaacttttaccacctgttctgatggattatttcccactgattgtggtccatgataaaatgcgcatctgtcacctttcaagcagtttccctttttaaagtaatagcatggaaccaactgctttccagagttaaatggagcgtagtgtgaagaaactgcaggcattccagtagttggagcaccaaacataccatcaattggcggatggcgaaacggacattttggattcaagcaattgctatttaaccagtaccagcagtctctagggttcatacgagcattatcactgtgacgaaaatcacattcgttccccttcttgcatgtgaggggcgaggcgaggaagtagacgcagtcggtgttgcgccgcagcgcctcctcctctggcgccaggggcctcgcgccggcctccgtgctcgcctcccccgccgccgccgcagccgcggcaccgtccgcctccat

SEQ ID NO: 19927 - DNA, 778 bp, Oryza sativa
  Clone ID: PAT_MRT4530_2533C.1
tccgacagaccactaacacaccctcactacacgaactatcgcccacgccccgcggttaagacggagaacatcgctagcatcaacaggacgagtatcctaaagtatgaatacttaaggggtaacaaaatatacaaaataacgaaataactcgtggaaaaaaaaaagacagaaaaaaaaaaaaaacgctaatataaaaaataaacacaaaaacaaacaccccgccaccgccggcacaaaaaaaaaaaaaaaataacttaaataaaaaaaaaaacacacccgccaaccccaactttgtaataacgatagtcaaaaaaaaaaaacaaaaaaaagcctggaaaaacaaaaaaacacacacgaatggaaacccagaaaaaaaaaaatttaaaaaaaaagcgggcgtcggccgtaccaaaaaactgaaaaaataaagacaaaaaaaaaaaacgcaaaaaaatggggcgaaaggaaaacataaaaataaacagcaaaaaaaaaagaaaaaaaaaaaaaaaacagaataataaaagaagggaaaaagaaaaaaaaatctattacaagaaatgcaaaaaaaaacgtaaaacggaaaaagaaaaaaaatgtggagaaaaagggaaaaaggaacggggcctgtccgcaaaaagagatatggcgcgcttccgtgccacgacgtccgagaaaagaaaaaaaaaaaggcggccaacccaggattcgaccttacgatcggccaggccagagagaaatggcttaccactgcaatgccatggaacttgtgattgaa

SEQ ID NO: 19928 - DNA, 643 bp, Oryza sativa
  Clone ID: PAT_MRT4530_25340C.1
catgggacccacacggtgcacgggattggatcggcgagacgcgcggcgcttttggattggtgcgctcctctccctcgacgcggcatcggtttcacgcgcgggcgcgggacccacgtgaaatttggagcgcgcgcgggagcggcttcggactgggtggctcgctggcatgcgggcccgacatggaggagagagcgcggtctcgcgtgcgcgggatttcggcgcggcaacgtgtcgcactcagattcgtcaagacagggagcacgcagattgatttgcatgtgaagctttggatcaacgccgtggcaagcatccaggaggtttccttcggatgtaaggaagaacgaacagccaggattgcatctgagatagggtttgccttaagggcatttgtgacaatgtcttagggggtcttaggctataaatagagaaatggatgcaagggtggaggttgctcttttttaatccttttgagatgctcggtgagagtttcggtgtgagtttggagtgtgtttgcccgagaggcttttgtattaggattagtttggagtgtgtttgtccgagagattttaagtttgtattaatgttcctctgaaggtgtatgtttgctcctagttgagcggttattttgcatcacctatgaatg

SEQ ID NO: 19929 - DNA, 123 bp, Oryza sativa
  Clone ID: PAT_MRT4530_25341C.1
cgttaaaaggggatgaaaacaattgggagacagttaacttaggaaggaaatattccttagcaacaaagccaaacacttggcccttcctatcagacgatcagactgaccgggttctaaaattca

SEQ ID NO: 19930 - DNA, 806 bp, Oryza sativa
  Clone ID: PAT_MRT4530_25342C.1
cacgcgtccgctccgccgccgcagcatcgccgtcgacctctcgtcttctccctccccggcgtctcgcctgcaccaccgcgcctcccgcctctaggtttcactaacattggtaaccgcagctccggcctccggggccccggtagctcgccgctgctgcgccgaaccctctattccgtcgcactccggtgatgtcggacacggaggaggagcgccgtctagggcgcgggtcggcgggggcggaggcgggggccgatgggcaggaggaccctgacggggatgaggaggaagaggaagaggaggaggaggagtacgagttctgcgacgccgaggaggcgatgcagtgcgtggagatggcggagcggagtgcccccgacgccggcgtgcatgactacgaggcgctcgccgcgcgcaagcgcaaggccctcgccgaggagcgaaccgaaagggatgcatcttcaaagaagccaaggcaggatgggctttcagaagtggaagcagcgactgtgtttgaccaactaatggaaggctttggccttcgtaggaaaagaaggtccaaagatgccaggaaaaggggaagaaagaaaggaacaaggaataagtacagtcctgaagttactaaaaaattgggtgatgccacactgctttttacagagagcagatttaaggaggcaattcctatattacatgaggttgtgcggatcgcgccgaatttgtcaaattcataccatctacttggtagcatttataaagagtgcggtgaactagataaagccataaactttctaatgctcgctgcatatgtttct

SEQ ID NO: 19931 - DNA, 3014 bp, Oryza sativa
  unsure (1)..(3014): unsure at all n locations
  Clone ID: PAT_MRT4530_25343C.1
atgtcggacacggaggaggagcgccgtctagggcgcgggtcggcgggggcggaggcgggggccgatgggcaggaggaccctgacggggatgaggaggaagaggaagaggaggaggaggagtacgagttctgcgacgccgaggaggcgatgcagtgcgtggagatggcggagcggagtgcccccgacgccggcgtgcatgactacgaggcgctcgccgcgcgcaagcgcaaggccctcgccgaggagcgaaccgaaagggatgcatcttcaaagaagccaaggcaggatgggctttcagaagtggaagcagcgactgtgtttgaccaactaatggaaggctttggccttcgtaggaaaagaaggtccaaagatgccaggaaaaggggaagaaagaaaggaacaaggaataagtacagtcctgaagttactaaaaaattgggtgatgccacactgctttttacagagagcagatttaaggaggatgacagtaacctttaccttgtctactctactaaactgcaggcaattcctatattacatgaggttgtgcggatcgcgccgaatttgtcaaattcataccatctacttggtagcatttataaagagtgcggtgaactagataaagccataaactttctaatgctcgctgcatatgtttctccaaaggatgtatttttgtggaagaaactcattgacatggcattgaaaaaggaagatgctgctttagcaagacactgtgttttaaaagcgatgagagcagatcctgaagatgtaggactgaagtttgattgtgctaatatatatcgcgctttgcatgactatcagaaagctggagagatatacgagcagatagtcagaatttatccttcaaacattgttgctcgtaaagcagcagcacagatgtacagggactgtggtcaaattgataaagctattaatttattggaggattatgtgaatgctcaaactacaaacatcgactcgaatcatctggatctactgatatccctttatctgagaaataatgcctataatgaagcattgaggctgattgagagagcacatatagtgtttggatctcaacacaatttgccagtacaattgcaggcaaaagctgtaatctgccatgcttatcttggagatatgaagcatgccgaggtgtttcttcagaatgtgcatctggagcgttcaaaagataacaccgatgtgatcaaggaggttgctagcactctcgaaaatttaggacaatatgagtatgcaataaagttttacctgatgattgaagatgttgctgttcataatgatggtagttcatatgtgaaagttggtcaatgctacatggtcataggggagaaaaggaaagcaattccttactttcagaaagtaacgtctcaggcttattgtagttgctggggtgttacatgtatttctaaggttcttttgagaaatgctaacaccgatgagagcgatctcacctttatccctgtttcagacccttatcctatccatgaatcaatgtccataacatataagattgtgaatttggaagccttgcaaagaatggaggacaacattgatgtgcgaataactttatcctctctttttgttgatgtggataagagtgacgaagctattgttttgctttctcctcctaacaattcagggtcaaagtctgctacagatcaaccgaagccatggtggcttgatgggaaagtaaagatgcaccttgcgaacatatattacaataaaggcatgttcgaggactttgtgggcaccattcttatacccattcttgaaacactgaatattgagtatgctaatcgaaaggtgaggaaagctaaaaaacttccaactaatgttctatatgaaagagccaaagtgttagctgaacaacgtccagaaagcgtgtttcaaggattaaggccaatagcatcaccggcagagttacaaaaggcaagcagagcaaagaagttgctagagaaaagagcagcttcgaatgaagatacgataaaagatgatctgctttgccaaacattagctttgcttcaccgatactgggaggctctacaagttatcaaccgtactcttaaacttggaaatgatactctcgctgatgagaacaaagaggagctcagatccttgggtgctcaaatagcttatagagctccagaccctagacatggctttaattatgtccgctatgtagttcagcagcatccatattcccttgctgcatggaactcatactacaaggtgacatcaagaatagaagataggttctcacgtcatcataaatttcttctacggacaagagaagaaaagactgactgtgtgcctcctataatcatatctggccatcgatttacggctatcagccagcatcagtcagctgctcgtgattatctggaagcttataaattgaacccagaaaatccatttataaatctctgtgttggatctgctctaattaatttagcccttggctttaggcttcagaataagaaccagtgcatcgttcaagctttggcattcctctttcgatatctgcgtctttgtgacaacagccaggaagccttgtacaacatcgctcgggcgtatcatcatgttggcctcaacaccttggcagcaatttactacgagaaggctttagccgttgaggtgaaagattaccctattcccaggcttccatacgaggagaattcctgtgcccagcaggatctcaagccagggtattgcgatgtacgaagagaggctgcgttcaatttgcatctgatttacaagaaaagcggagcagatgatctcgccagacggattcttaggacttactgtactatttagtagtagatagaattatacatgtatatatttggtatttgctagtgttcaggtgactgggaactgcacaaattttagttgaattttgtggccgtccatttctcttcaagatttgtgcacgaatatgagcttttgtttctttgtcggatctggaatccactaggacacagtacctgnnt

SEQ ID NO: 19932 - DNA, 392 bp, Oryza sativa
  Clone ID: PAT_MRT4530_25344C.1
aaaaccggtttctaatataccactttcacacattcagacacaaaaaaaaaaacaagaagaaatgagcaatcttttactggttttacacacagctctgttactacgtacttgcaatcttgcatcatggccatggcaagggcaagggcgatgcaactctctcgccaagaaagtgaaaggaggggaaaagagattaagaggaagaagctaagggattagggctagtagattaacgagtggttaaatactgatgggtgtttgatggcaatggcggccatggatggatggattgggctagaccttgtagatgatgaggaagcatgggaggacggcgcggctgtcgaggacgacgagctcgccgttgcccatgtcgacggagtcgcctcgtgccgaat

SEQ ID NO: 19933 - DNA, 1816 bp, Oryza sativa
  Clone ID: PAT_MRT4530_25345C.1
ttttctgccaattcctggagaatcgcgcccttttttggctcccaagattcttcccccctccatttctgcgtcttttccacgccacggtgacggcgacgagcttgctttttttttttttttcttttttggggccaattagtgattctttgtccggccttgcgattgctggagttgtgttggggatcgaaaccgaggtgagccgatgagcaagaggagttgcggcggcggcggcgcgcggttgcaatgcgcggcggcggattggggcggctgcttcctcgcgctgccaccggcggcggcggcggcggtgccctcaggcggtgacaccgatggcggattcaacctggcgtggactctccaccagtcgttccaccctgcctccggcctcttcgccagcgtcggcgtcggcttcccggcgacctcctcgagctcgccgtcgccgccggacgctcccggagacccgtatgccaagtatgtctcgccggagatcgagcaccatgctctgcccggtcaaagtgtggaggtggagctaatggagaaggggaagaagaacaagaagaagacgaataaagcattcaagctcaagatcaaggtgggcaatccccacctgaagaggctgatcagcggggggatcgccggcgcggtgtcgaggacggccgtcgcgccattggagacgatcaggacgcatttgatggtggggagtaatgggaattcgaccgcggaggtgttccagtccatcatgaagcatgaagggtggactgggttgttccgcggtaactttgttaatgtcattcgagtcgccccgagcaaagcaattgagctcttcgcttttgatacagctaacaagttcttgacccccaaatctggggaacaaaagaaggtcccactccctccttcactagtggctggggcatttgctggtgtcagttcaaccctctgtacttaccctctggaattaattaagacacgattaaccatacagagaggtgtatatgataactttctccacgctcttgtcaaaattgtccgtgaagaaggccctactgagctgtaccgaggtttaacgccaagtttaattggagttgtgccatatgcggcgaccaactactttgcttacgacacccttaagaaggcctacaagaagatgttcaagacgaatgaaatcggcaacgttcctaccctgctcattgggtcggccgcaggagctatctcaagcacagctactttccccctcgaggttgcacgcaagcacatgcaagttggcgcagtcggtggcaggaaggtctacaagaacatgcttcatgctctcctgagcattctggaggatgaaggggttggagggctttacaggggtctggggccaagttgcatgaagttggtgccagccgccggtatttcgtttatgtgctatgaggcttgcaagaaggtattgacagaggaagaggatgactgaatagtgtgtccttacactcttcagagcgcagttttgcaactttttgactggaggcatcttttgggcttgatttggaatcaaatcatgctggaatcggatgaaactcgtgtagtttcttaagaatttttaccccaactctgtgttgtcagcttggcctgataaaacctgcctctttccccagttttgcttcaggatatcatatgcagagaacatgtccaataactgatttctgctgagtttatgaagtggttgaaacgcaaatgggcagtcataattcccaggtggtgaaacaactacgagactctgtaatctgtgtgcagctttgcaagtgcatgaaaggttcatttgatcaaaaaaaaaaaaaaa

SEQ ID NO: 19934 - DNA, 309 bp, Oryza sativa
  Clone ID: PAT_MRT4530_25346C.1
gaattaaacccgcagctacattatgacggcgataaagtaacaacactacagccggtactcgagaataccatgcatggttatacaaccaaccaacatgctgtcaacaaggaaggtgagactagctttgtttgccaagagctaacgtcggggcattacggcacagacgttttacacacatttccttgagctctcttggctcaacccgactcctccacagctggttgtgggggggggctggcgttgttaattacggactagcaccgactccgcttggcggggctctaggggctcgttggcgtgctggcctgg

SEQ ID NO: 19935 - DNA, 395 bp, Oryza sativa
  Clone ID: PAT_MRT4530_25347C.1
atagtgaaaccttttttttagtatatttttcttttccagcttctctgaagataaccacatcagatgaaatggtattggattggttgtacataagctatatttgaaagtaagagagtttgcagtgacatgctaagtagatctgaaagttccattactgaatcataaatctaacatgacatatagctgcttgcctgcttgtaagaatggaaaagagaacctaatgtacagaattttgactaattgagctccctttccggcctatacactggtgttcgaaaaaagaatccttacatggaatgaattcatggatctaagagaaaaaaaattcatcggtgcttgccctgatttgccattaaattggctcactttgcaagaacccgtggccggattttttt

SEQ ID NO: 19936 - DNA, 327 bp, Oryza sativa
  Clone ID: PAT_MRT4530_25348C.1
atgggcggcagcggagcggcctcgcactcccccggtggcggccgggagcggtggcgggcggcggaagcgcaacctcgcgtgcaagctgcgaccgggaccggcagcagcgcggcctctcacacgctccctggtggcagcgcccctcgctcgcccggatctagaggcggcgcccctctcctgcccggatccggctgtgggcgccggcggcgacgcagccgggagcggcggtgggctcgggagccggccgcggcggccgatcgcggcggaagtgtggcgacgctgacaacgacgatgacggatgacggcgatgacgatgacggcggatga

SEQ ID NO: 19937 - DNA, 587 bp, Oryza sativa
  unsure (1)..(587): unsure at all n locations
  Clone ID: PAT_MRT4530_25349C.1
ccggccgggnatacatgccacaatttaaacgttatctacagcagcatgaggagcacatatacctgcaccacatagagagtactttcacacgtaattgctgctgctcccttgcttatgcangataggactgccacatcagctcctatgcaacgtatntatgagcgcactagtcacgtacagacagaatgtacacgcagagtactcagacctacgagaacgccactgtcacgggctgacagataacaagaggctcacaaccattcagagacaatcgtaagggagcaggataaagtcatggacaaccgagttctggcaagcatctaagtagcaattgaaaaacaaccaagtatgcgggaacagccggtgtcatacaagactctagagtggtagcactacaatattactaccaggccattagtatcgtatatatgattgagcagcaactacaaccagcggcaggcctttgcaggctactctgatcagacctcaagctcaagctcaagatttaggtggacttacaacttgacatacatatgtggtctctatcctaactactacattgatcagaggaagcattcccaccgtag

SEQ ID NO: 19938 - DNA, 813 bp, Oryza sativa
  Clone ID: PAT_MRT4530_2534C.1
ctctaccactctctctctctctcagtgaacgcggaggcgccgtgcgctgttcttcggcgactcgctggcgagcagccacgtgacgtccctcgtgtgcgtgctgtcgcaggtggaggcgccggcgaggtcgggcgacgcggcggcgggtggccccctcgtccgccgcctccgcgcgtcccgcggtgcggcgagtaggagggggaacgacgtccagaaccagaagtacgcaacggcgaagccgtgcgccggcgccagtgctcgaaccccgccgccgcgtcgcccgacctcgccggcgcctccacctccttctcggccatagcctcctcctcaccagaacagcccaacaattccaccgcccgcgacgacgacgacgaagccgcctccgccaccgaatcaccgagcgcctcctccctccgcgacgacaccaccgcggccgccacgaagggcagcctcctgctccgcagacgcagatagcatccgccctcgccatcgtctccgccactgccaccgccaccgccacggcccaccaaaccacaaccctcctccgcgctcgccaccaccctcctcgccgtgacggcggcccgcgtacggacgccgccgaccaccacccgcgcctgcctcctcgccgccgcgccgtcgcgcttcttcttcttccccatccgagcaaaaaaaaaccctccaacacccctatcgcccctttcgttttcccccgcattcctccaatattccccattttcgcgcccccccctttccgccccctttttcccccccttccccctttttcccgcccccattttcccccccccccctccc

SEQ ID NO: 19939 - DNA, 474 bp, Oryza sativa
  Clone ID: PAT_MRT4530_25350C.1
gggggggggaaggggctttcgtgttcgggggtatgccggtcacaggcgccgctcgtcgacgcgcttcttctggaagctggatggcgggcgtgctccagtgcccgcaggagcactgtgcgccgctccagtggtaggagcccacgcggtaggcgcagcgcgggcacacgagcttgccctccacgtccgccaggtcgcccatccactcgaacttgtcgtgcatgaagagcgacgtgcagtcagccaccggcgctgccacctgctctcgcttggaccaggcgaagggctgctggccgggacccgggtcgtggggggccacctgggcgggcactcccagctggtgcccacaccgcttgcacgcgtagaaccccaccggcggcgccggagtaggcggagctggcgctgactcagccgcggtggtcgcggtctcagtcgtgctggcgctgctttccaatgtggtgctggtgctggtgctgg

SEQ ID NO: 19940 - DNA, 789 bp, Oryza sativa
  Clone ID: PAT_MRT4530_25351C.1
atgcgtgcgccaaaggggacgcggggcaggagctgcgcgggcgtgctcgggcgccggacggcgggaggagaggagcggcgcgcgggcgcgaccggcgagaaaggagcggcgcgcgagcatcggctggcaggaggagaggagctgtggcaggtgagagtggctctggtgagagcgcaggcgtggccctcgacggaattgacggtggcgcggcggaggctggcgagtgggggcgagctcctcgccctctccaccgcggcgacgctccacgtgcagctccagcaagcagcggctgcgacaacagcatcggcgccgcggacaacgccgatggagcgggacaagcggccgaagtgtgcgagtggccgccgccgacgactactagcccccgtgcgctaccccaaggctcgctcctctcccgccagccgccggccaccgcacgccgctccactctcgcccgccatagcacagctccgcccctctgctttggccgtcccgctacgccggcctaccgccgccgccgcgatccgcccgcccagctccaccccgcggcctgccgccgctcagcccgcccctctgctccgctccgctccaccgccaccgctccacccacggcctaccgccgccgctactctgctctgctcagccggtggcagcggtggcgagaagccgagggcctgcggcattgtctcctccgcgcaggccgactgcaaaatgccggccggtccagaggtagaatacgtcgttccgcgcctacgacgatcgacgtacgcggctatgcccgcctcacggtga

SEQ ID NO: 19941 - DNA, 493 bp, Oryza sativa
  unsure (1)..(493): unsure at all n locations
  Clone ID: PAT_MRT4530_25352C.1
tcgtccacgcgtntcgaaacacaacagacagtcattaaaccaacgccctaacagacaccaagtcttatgccacagataattacttaccagaacacgcagaagactcagaagaactcaaaagaggtagacacaattccagattcctcctgcgcgacttcatcgtactgttcaccgtcttgagcttcgccctccggtcctcctcgacttaaaacatcctaccgctgggaattccagctttactgagaaagcccaggaaacataagtcttgcaaaaccattgtgccaacaggtaaaagaaatacttaaaacatcctaccgctgggaatcccagctttgagataaaaggggttttaagaaaaaaagaaaaaaaaactattgaagggtgttggagtgtataaagtgaattacccgtctttccctatcagcttaggcttttaggtgcgactggctggtgcatgcaacttaatatggtatcagagcctgaggtctcgagt

SEQ ID NO: 19942 - DNA, 3354 bp, Oryza sativa
  Clone ID: PAT_MRT4530_25353C.1
atgaaggaaccgactgcgcacatggctcccgtcgtccaccgtttcttcctcgtcgacgtcgtcgtcctcttcgccccggcgacgaggtaaacctatcaagaaggtgaggagctccatggagatgtgaaggcaccagaggtagagagcgaccgaccatcatcgctgcccgtgatggcggtgctatgcgaccaaatccgggccccgggccccagaaccagcttctgctccacccaacaccagctacgccgccacacgggttggcaaacagcaaacctccgtcgttgcggtgcacgctggtgctccggtcgagtcgtcctcaaggcgtgttaaccctccgcctggcaacccctgtgcatctccatgcgcccaaggagaggccccatcgtcgccaccactggccagccgagcggccgttcgcgaggagaggcaagggccgccaccgtcacctgcgtaggcttccaccatcgtcgcccgtgccgacctcctcgacaccagctgtcgcggcatcccactgtcgctagccatcatggccttccacgcaggaacccgcgtgggactcccgccgttgatgctccatcgtgccagcaactccaaccagatctggttcagaggcggcggatccacctgacggaagactagatccggctacggcagcattgaaagttcgtcatccgcagcggcaacctcactttcctcgccatgcgccaagccaccttcgtcaggtccataccagacatgctgccggaaaagctcccgaatctgatgtacctcaacttgtccttcaacgcgttctccggtcaaattccggcgtcgatcgggaggttgacgaagctcctggaccttcggattgacagcaacaacctcaccggtggcgtcccggtgttcctggggtcgatgtcgcagttgaaggttcttgatctcggattcaacccgctgggcggtactatcccacctgttcttggccagctccagatgctgcagcagctcagcatcatgaacgccgagctcgtttcaactctgccgcctgagctgggaaatcttaagaatctcactgtcatggagctgtccatgaaccagctctccggtggattgccgccggagttcgccgggatgcaagcaatgcgggtgttcagcatttcaacgaacaacctcaccggtgagatcccaccggcgttgttcacgagctggcccgagctcatatccttccaagtgcagaacaacttgttcaccggcaagattccgccggagctgggaaaggcagggaaactgatagtgttgttcatgtttggaaatagattatcaggcagcatacccgcagcattagggagtttgacaagcttggaggatcttgatttgtcagataatgatctgacaggaggtattccacctgagttgggtcatctcagccatttgacattcctgaagctgagccataactccatttcaggaccgattccgggaaatatgggaaacaatttcaagatgcagggagttgatcattcgtcagggaattcctctaacagcagatctggttcggatttctgtcaactgctctccctaaagatcctgtacctgtcaaacaacaagctcactggtaagctgcccgactgctggtggaacctgcaaaatctgcagttcatcgacttgtccaacaatgcattctcaggtgaaatccctacagtccagacgaactacaactgttctcttgaatcggttcatcttgccgacaacggcttcaccggtgtttttccatcatcgttagagatgtgtaaggcgctgatcaccctagatattgggaacaacagattctttggaggcttagagagcacggatactgaagtaccacaatggtggagcgacaagggatcagggccgagcgtgaggcgcggcccaaaggagattggcccattagggctcgggtggggagagggaggcggtctggtggaccggatccaccgcgtgggggtcccaggacgggggccacttggcggcggcctgggcggtggattgcgacggcggcggccggcggcgagcaaaagtgaaaatcgcggtggggcgatgaaaggtcgattcaaggtggcgagagtatctccggggtgcaaggaattcatttccggtgccggatgggacggaggggccccgagggaggccggcgatgagcggcggctccccggaacgggcggcaatggcgacaaggccatgccgggcggtggcgggaattggggcttcgtctacgcgcgttcgggaaggctaccaagctacgtgcgagccaaaagagggagaggccgagtgagaagggagaacggagagaggcactatcgagtcgagacgggcgctgtgatgggtgaccgacggcgcgggagcgagctctccggcctcgggccggggaaggggaagatgacggcacgtggagtcctcttcttgcgtccttcgcacgcatcggtcttcctggagcttcggcgacggacagcgagggcgactgcagggcaggggcgacaatggcgcggcagcgtggagagtgaagcgggaggggttgagaggaggggctcggctgcggaggtggtcacgggtggccgggctgagagggaaaaagcaaaaggggaggggaaaggagctcggctccttgccgatttgggcgagcagagggaggagggagagagcggcggcatgggcggctgcgtggcgcaggcggccaggactaacgcggcgacgaccgggcgggagtttttaacgtctcacgaaaagtggagcgttacagtagaggaagtggagcacgcctcgccggtggagccggagcaggaggcggcgagcaaggtcggggagcgcaagcggctcgacgggcgacgcatcacatgcagcgcgtccacgagcggcggcgcttccacgagcgggaggtgcgccgacgtaaacctggtacctggtaccctggtgtcaaattggtacctaggtatcaaatcttggtacctgagtaccaagcgtggtaccccaagagagagagcgaacgagagcatctcggtttcacttgaggcggagagatgtcaccgccggccaccgcggccgctgctcgcacgaggcaagaccacagcgctgcagcacgtggcggtggcgccgctggtggacgcgctgcgtcgcccgctgagccgttcacgccccaagttttacccatcattggatattttaaatttgagggaaggtgttccgatgcgcgtaccaggaggcccgtgcatcgaagcacaacagttgacaaaggagggccggagggagcggctgaccggggtcggcttgacccggtcttggccaagctggcgccgacgtggcgcctacatggctgccacgcaggccggcgggaggtag

SEQ ID NO: 19943 - DNA, 1593 bp, Oryza sativa
  Clone ID: PAT_MRT4530_25354C.1
atggccgcctcctcatcctcgtctcccctccctctcgccctccccctcctcctcctcctcctcgtcctcttcgcgtcccacccctcgccgcacgcggcggcggccgcggcggatgcggcgcccgcgggaggcggcggcggcggcagcggcggcgagctcctgtccgcggcgcgcgcgccggggttcgcggcgtggctgcgcggcctgcggcggagcatccaccggcacccggagctggcgttcgaggaggtccgcaccagcgagctcgtccgcgccgagctcgacgcgatcggggtcccctacgagtggcccgtcgcccgcaccggcgtcgtcgccaccatcgccggcggcgacggcgctggggccgggaccgtcttcgcgctcagggcggacatggacgcgctccccctgcaggaattggtagattgggaacacaagagtgaggaaagcggaaagatgcatgcttgtggacatgatgctcacaccactatgcttctaggagctgccaagctacttcaatctcagaaggatgaccttaagggtactgtgaagctcgtcttccagccagcagaggaaggttatgctggcgcacgctatgttctacaagaaggcgtgctagatgatgtgtcagccatttttggcttgcacgttgatccaagaattcaagtaggcaccgtcacctccaggccagggccatttcttgcagcatcaggccggtttcttgcaacgatcactgggaagggtggtcatgctgcaggcccacacaacgccgtcgaccccatcctcactgcatcctctgccatcgtcagcctccagcagatcgtagcccgggaaactgatcctcttgaggctgcggtgatctccgtgacattcatgaaaggaggcgatgcctacaatgtcatcccagagtcggtatctttcggtggcaccttcaggagcttgacatcagaaggcctctcatatctcaagaagaggatcaaagagatcgtcgaagcgcacgcgaccgtgcaccggtgcaccgccaccgtcgacttcatggaggaggaacgcatcccgtacccggccaccgtgaacgacgaagggatgtaccgccacgccagggccgtggccgtggacgtgctcggggaagacggcgtcaaggtgggcaccccgttcatgggcagcgaggacttcgccttctacgcgcagaggttcccggcggcgttcttcatgatcggcgtcggcaacgagacgaccatgcggaaggtgtacccgctgcactccccacacttcgtcgtcgacgaggatgtgcttccggtaggagccgccttgcacgcggccgtcgccatggagtacttgaacaagcacgcatttacggctacgttctaaggcctccttttcatgtaaacatggggatttcatatgaatttcacagaaaatggtgtaagttcttgtaaaaaaaaacatgggaattttgtgtgttccaaaggaggcctaagtctttcagtggcttttgaaatactcgtgttttctaagttgtagatttagtacaagattttgcataaaggtaaataataatagagtgaattacagtgcaaaaaaaaaaaaaaaaaa

SEQ ID NO: 19944 - DNA, 372 bp, Oryza sativa
  Clone ID: PAT_MRT4530_25355C.1
atggaggtgtccgccgctgctcctccatgtccttcggtgttcgaactcgccgccgcagaggtcgccgccatgattatccccggatccatcatcgtgccggatacgccctaccatggccagatccacgcgcgtggggcgcagatcggtggccgggtgcgccgcctcgtcgcctcctacacaccgtcaaccgtcgccttcacgcctgcagccgtgccgtaccggatccgccgacgtcgcgcccgccgctgctcggcagaggaggtggtgctcgacgtcgcgccgccagccgtgccatgccggatctgcccaatgccgccaccgctcaccgccacacccgctcgccgctctcatctccgaaaaaataggatctag

SEQ ID NO: 19945 - DNA, 1621 bp, Oryza sativa
  Clone ID: PAT_MRT4530_25356C.1
ccggccggggccgcccccgcccgctactcgcgtgcttcgcccgtcacacggtgactcacaccgatccacgccgccaccgacgacgatctcctccgcgccgcccctccgtgcaacccctaactgccgcccccattcctcccctcaccatccaacctcgccacctgacgattcccctaagcgccgctctccccgcttccatcgccgccccccgctgctcgcgcgcctccgcccatcgcgccgatccacgccgccaccgatgacgatctcctccgtgccgcccctccgtgtatcgtctaactgccaccccatcccttccctcaccatccaacctcgccgcccgacgattcccctaagcgccacgcgctctcatccgtcccatcaccatctccttccaacctctccggccatccgccctcatccctcccctcgccatgtccttccaacctcatcggccatccggacgtcgccccctgcccgtcggagatcgacggccgccggttccaccaaccaccgcaattgaccccatctctcatctctgtgtttactgaatatttgcatagtgtttgattttgaccaaatccactatagtgatggcagatgaacagtgatactacttcaacatcagaaattttctgcatgttgtgaggattgttcagctggcttgcacacattaagatatggataacaatattgggggctccacaccagcatcgttaacaagatcacgcccttttgctgatattactaatacaagtgccggggataaaaaaagaacgtaacagtattgggtctcccccctcttatctttaacaacatcaagagttttttttgtcagttatattcagtccatcaagatgtcacttgcgtactaatttcgcaagatttcctccctcagccctgtttgccgatattactaatgcaagcgcggggggatttacaaataaaccatgtcagtaagagatgcacatcctccaatttgccgcaaaaggaaatatgcaaaatctgcaagaaggtggtgctaatctcagcgcattagaattaagaaggaagtgatgtgaccatggctactatggatacaaccgttgctcacatcatagatgaacaacaagatattaagttcaagtcctccaagtgctggaatccgattctgctacactgctgacttcaaacggccaccaaatctgcatacgacctccgttttcggcccgtgagtacttgatggaaagctctcggagtcgtctttccaacggatccagcatcatccccgaattccatcttgttttgacgcaatcacaaaaacaaggtgctgcgtcacctgtcatgggcctttgggcttgtaacttcgtttgggaccccggcccaagtggggcccagtggggtgcgccccaatctggtagagcacgaccctaggatcctcttggtcgttctcgcacccctataagtagccagataccccttcagggttgcttagggttttgattaattgtaagtttagccattgctacttagcttgcagcgcgcatgtcggctagaccgtccatctgcttgttcgaaacctcactttatcgtgtatcaattcatctttgtgcgtcttgtctatctaataattcagttgctttct

SEQ ID NO: 19946 - DNA, 608 bp, Oryza sativa
  Clone ID: PAT_MRT4530_25357C.1
gaatagggttgatctgcaccggcaagatccacaacccatggagagttctcacaactcaccgaaagatcgggccaacaacagccttgagtgtcgagaggacctcagggttcatcaaaggtatcgctgatcggctagaggcatcatcactagatagtttggtggttgattgtggctcaattaggactcggctacacaaaattcaggctctgatcccagaggagttagccgatatccttactctagctgtttaccttgagcaacatcaattcaaactagagaaagctaagttaagactggccgaatggcgagagcgcaaggacaatgaagccactatccaagctaatcggcaactggtgcatgaagagaaatccaagcttgatcaacaatctgaaggcccaatcaaatctaacattgatcggctcgaggctcgcaagattgaactcttagcacaacttgaagaatgcaacgctgagctggatatagaacacaaaaaactagccgatctcccaaagtctatcaaagagcagaaagcaagactcaaatcggctatcaagcatgtcgctgatctgaccaagtctctgaagatcatccctagaaccgatgcttaa

SEQ ID NO: 19947 - DNA, 442 bp, Oryza sativa
  Clone ID: PAT_MRT4530_25358C.1
cggggtcttgatagccttggagctccacgccgtggaggcgctctaaactagtggatcccccgggctgcagaattcggcacgagctcgtgccgaattcgcacgagcctaagcatgtcttccggtgcgccaaactgggcttgaatgaatcaggaccttgtttgccccccccctgggcggtccacccccctgggggaaaggttcccccaaagggaaattattctggtttttgaaaggaaccttggaacaaaaaaaaacccccccggccattttggaacaaatcctttactttccccgggaaccttcctctaaattggtgttaaaaaaggaaaggggccctccctctcccccttccccctaattttaaaaaaacacccccccggaaaaatttttaccccggggctttcccggccgccctccctttgtttaaaaaaaaatttttctt

SEQ ID NO: 19948 - DNA, 447 bp, Oryza sativa
  Clone ID: PAT_MRT4530_25359C.1
atgaggaggcggcggtggccggcacgctgcgccgccgcactgtgcatcgccgtcgtcgtgctgcagctcgccgccgccgccgctgccaggtcactgtcgtcgtctaggcgccgcgcgcacgaccacggccacagggtggcgctgccggcgtcggcggcggcggtggcgtcgtccctgcagcagcccgtgcatcgcgccgtggcgaaggcgaaaggtggtggacgctcgaccgccttcgacgccggcggcggcgtgccgtgtaaggagaagagcggcggacacggcggcgctccgtcaccgtgctccgacgacgacgacaagcgcgtcgtgccgacgggcccgaaccccttgcacaacagaaacaagaattgccctcatcagctattcctccatggggtgtttgtttcgattccacaagtggaagattctgcagttcatcatgtctga

SEQ ID NO: 19949 - DNA, 1065 bp, Oryza sativa
  Clone ID: PAT_MRT4530_2535C.1
atggggaagaagaagaagcgcgacggcgcggcggcgaggaggcaggcgcgggtggtggtcggcggcgtccgtacgcgggccgccgtcacggcgaggagggtggtggcgagcgcggaggagggttgtggtttggtgggccgtggcggtggcggtggcagtggcggagacgatggcgagggcggatgctatctgcgtctgcggagcaggaggctgcccttcgtggcggccgcggtggtgtcgtcgcggagggaggaggcgctcggtgattcggtggcggaggcggcttcgtcgtcgtcgtcgcgggcggtggaattgttgggctgttctggtgaggaggaggctatggccgagaaggtttgcacgcaggcaggcgaggatcacgacgaggagagctccgtcggcgactccggctgcggccgcgagaggagcgcgacgacgccgtcgagccgccggccgccgggagacgcggactcgagcgacgcggagtcaaaccaggaggccaagcagcaaatgtgccgccggagttcgacgacctcagcagctgcatttcacgcgggagcgacgacgaggagcttcaggatgatggcaccgccggcggcggcggcagagatcgaggagttcctcgccgctgcggagaggtccgaggccgagcgcttcgccgccaagtacaacttcgacgtggtgcgcggcgtgccgctcgacgccggcggcgccgggcggttcgaatggaccgcgcgttttgattcagattcaaactgggctgccttgggccaacgtgttacgagggttttgctgaacaatccaagctgtaaaccgaggcttcgattggcagcgagtgctgagaatccggttgatttcagtggtgttgacgtgcggctccccatgctagtgtacatctcgcgcgagaagccgtgcgccgggaagcgccagtgctcgaaccccgccgccgcgtcgcccgacctcgccggcgcctccacctgcgacagcacgcacacgagggacgtcacgtggctgctcgccagcgagtcgccgaagaacagcgcacggcgcctccgcgttcactga

SEQ ID NO: 19950 - DNA, 461 bp, Oryza sativa
  unsure (1)..(461): unsure at all n locations
  Clone ID: PAT_MRT4530_25360C.1
ctttcgttgacccgctcggcgttanactcgagagtccccgtccatcctattaatcctcgggcgtagaccacctcacctagtctccaagctccatcgaagacgacgactcactgctagctggtagctgctgccggtggtgccgatcgactgccggacggcgggcagagacgccatgggagaggagaagagccagcagcggcggcggcagggccaccctctcctgaggggaggcggcgcggggaagcaggccgggcggcgttacanccacggcttctccgcctcccagatggtcgcgctcgccgcctgtgcggggcgcttggcgcctcgntcccgccggacaaccgcgacgacgacgacgacgacgccggagggagcggttattggcggcgccggttcgtncgacgcaaggccgttaagganttcctccttgcttcgccgncgacccgccgtccccaagagtt

SEQ ID NO: 19951 - DNA, 788 bp, Oryza sativa
  unsure (1)..(788): unsure at all n locations
  Clone ID: PAT_MRT4530_25361C.1
agggacccatgtccataagtgagttcattgccaagatgcgatcctttgactatgagatgacggggcaaggaaagctccttacgatgaagagctgatagcgtacatcatcaacggcttcgactcagactttgactcatcggttataggattgatgccagcgacaagaattgctcctctcttaatctctcatgtgtattcccaacttttgagctatgaaaacaggatcagtattcgccaaacttacctccgtatttcggcaaacgctgcaaatcgtggcggtcgtggtggtcgcggtggaaatcgcggtcggtgctcctcccgccggtcgcagtgccggccgtggtggcgcagtcggggccaacactgggcgagggcgcggtaaggacacccacccggtgtgtcgagcgtgccataaaggaggtcacattgcaagtgactgctggcaccgctatgatgagaagtacgtctccgacgagaagctaggcgacgcggccacatatgcgtatggtgttgacaccaattggtatgtggacaccggggcaacagatcacatcacagggcagctagataaacgtgactacatggagaagtacaagggaacagatcagatccacactgctagtggcgaaggtatgaatatttaacatattggtcataccattgttcctacccctagtagtcccttacctcttaaaaatataattcatggtccccaagcaatcaaagaatttagtctctgttcatacactcatagggtgcagaaatgatcgcagtcactnnttcccagg

SEQ ID NO: 19952 - DNA, 101 bp, Oryza sativa
  Clone ID: PAT_MRT4530_25362C.1
ggaaaggcccaaagagggcaacaacagccattccaattttaaatcgaccctgggcccagggtcacatagacactttaactcatctgaaggttcttttgaaa

SEQ ID NO: 19953 - DNA, 437 bp, Oryza sativa
  Clone ID: PAT_MRT4530_25363C.1
gaaagtttttttcttatccaataagaacacgtacctatccatgggtataaatatgtacacccgggttcattgtaaactatctccacaatcaatacaacaactctcgatgcattgccaccctctttactgagactttttacttatcatccgatgaaacttggcacccgacacggaaccgcatcggctttcgatctccggcgaaggggtaagtcctacgttccaccggcccagacaattgtatcggctacattggcagcatcaaaggctacatcagtacattcgacctcctggattgctctggtttggttaatatatttgcctaccgatttatcatatatcttagttaatctagtttggtagctctatttacttgtatcggctgagattcgctttaaggtttatgccagtatcggctaaatcgctttaccagactagat

SEQ ID NO: 19954 - DNA, 522 bp, Oryza sativa
  Clone ID: PAT_MRT4530_25364C.1
atgatgcacacgtgccattgcggcgcccaccctttccaccaccagctcgcgtgcatgaaggttgtgtcactcagctccaacccatgtgctaccgctgccaaggagacgagcatcgcagagggcggctctttcccgttgagccaccgcatgatgcaatcggcctccaagcttgcgccgacatcgctgcatccccctccctcccaggctcaccggccgcctctccccttctccctccgatttctggtattggagataagagatgtcaagcaaacacgaatgaaagttgagggacacaaagtggacttattcccgaaagacaaacaccggccgaacggattcgacagaaccaaagctctggcccatgaagggagtacagatgaacgagaagcccagacgaaaaatcacctctgcggcgcaacccaacattcagtacccaccacccaacgctcggtcggatacgggccaacggcggagaacggcagccgatcgactaaactcttcgacgctgacgatgtgatttga

SEQ ID NO: 19955 - DNA, 426 bp, Oryza sativa
  Clone ID: PAT_MRT4530_25365C.1
ggtttaaaagttttttttgaccccccccctttataaaaagtaaatgaaagaagtgtgtaacatcccagcccagggcttaataggattaatagaatactcatatcaactagttgcaacttcttttccggaagccgatttccaaagaactccagggttaagcgtgcttggcctggagcaatttgggatgggtgactgatcgggaaattcttcccgagtgcgcacgagtgaggacaaagtatgcagaaaagacttgtattggtctgtgagggcagtctataacctataaaagctatcagatgtaagcgggcccggcctgggagaggcgggacgttacaaagtgtttgtgctttatattatggaatggagggagtatatgcgttggttgacttatgttgctcatgatgtaggtgggcccacctgtcggcc

SEQ ID NO: 19956 - DNA, 1215 bp, Oryza sativa
  Clone ID: PAT_MRT4530_25366C.1
atgaatctgacggaatcgaagatgcgtcgatccaaatccaatcaggctgccggtgaatcgactgcccttgatccagatgccgctagtgttgtgggagccgacggtgctccagattctactgttgttgcttgtggtgctctacgagctagtgctctaggcgctggctttcctaccatgtatccaccaggtggtttcctaaattatttacagagtaataagatctctccatttacccagacacatccatttgtgaactatcataatgcaagtcagctgccagaaaatttccactttgttggtgcaccaatgagttattctacaatgtcacctacaactccatgttctaaagcgataccgtcaccaactgggaggtgtgctgcagcacaaataggttcacaagataaagaaacaattgatattgaggacgatgacaccatcgagcctgctagatccgatgctaggtccgagaagcgattgaattggtcaaatgaagaagacattagattggctagtgcttggctgcacaattcaattgacccgatcaatggaaatgataagaagtcatatcaatattggttagatgttactgctacatacaacagtaccactaagagtaaccgtatgagaaatcgtaaccagttgaagcaacgttgggagcgcattaagaaaccagtctccgaattcaatggttgctatgcaagaatcactaaaatacatcaaagtggtatgagtgaagaccaaaagatggaccaagcattccagctatatgcctctgaacataatgacaagcctttcacaatggtgcatgtatggaggatattacggcatgagaaaaagtggtctacatatttgaagaaaattaacaaggaaaagtacaagagtataacttctaacccaactcatgttgtgaatgtcgaagatgctccaaaactgcgtcctattaggcataagaaggccaaagatgaacgcagcggaaaacgtctggcatcagaggctatttctgttattgaccagaaactagataaattcattgaagcaagcagcaaggctgagaagataggagaggtacaacaaagtttggcaaataagaagctagaagtagccaaccttaatcataaagcagctcaggaacaaacaaagagtaaaatgattgacctttacaaagacttactgctagctcccacaagtgatcttagagaaagttcaatactatag

SEQ ID NO: 19957 - DNA, 1541 bp, Oryza sativa
  Clone ID: PAT_MRT4530_25367C.1
gaagcggccgggaaaaaccggccggggcgactagagacacacgaaacgcgagtacgccgacgccgcgacgcgtcctttcgtttcgctcccctcctccccccgatctccgccgccgccgccgccgccgccttccgatctccgcctccctcccctccggatccccgcgctcgccgtcgacgcgctccctctcctccgcccctgcgtctcggcccacggttacctgaggtgaatacattggagttggctgggatacttctgatttgaggagattataaattggaacaatgcctccccataagatagagacaggccaccaggatgttgtgcatgacattgccatggattactatgggaagcgcatcgctacagcctcttctgataacacaataaagatcattggtgtaagtggcaactctcaccagcagcttgctactctgagtggacatcagggccctgtctggcaagttgcatgggctcatcctaagtatggttccttgctggcatcctgcagctatgatgggagggttatcatatggaaggaagggagcaagcctgatgaatgggcgcaggcgcacactttcattgagcacaagtcctctgtcaattccattgcttgggcacctcatgagcttgggctgtgcttggcttgtggctcatctgatggcaacatttcagtcttcactgctcgttctgatggtgggtgggacacaacacgcatcgatcaggctcacccagtgggtgtcacctctgtttcttgggctcctgcaatggcgccgggtgctctaatcaatacagggccttccggtcagtttgaatatgttcagaaacttgcctctggtggttgtgacaatacagtcaaggtatggaaactgtacaacgggagttggaggatggattgctttccggctcttcagatgcacagggactgggtgagagatgttgcctgggctccaaatctaggcctcccaaagtcaacaattgcaagtgcctcccaggatggaacggttgtaatctggacagcaccgaaagaaggcgagcagtgggaaggcagggttctctatgatttccagacacctgtgtggaggttatcctggtcattgactgggaatattctggcagtgtctgatggtaatgataatgtgaccctatggaaagaagccgtcgatggcgaatggcagcaagtgaccactgttgaggcttaggtgttttgagttgttcttcccctggctgccaattataacatatgtgtagccttcaggctggccaatggctctctgcttacaatgtggctctagtaattttgcttctgctcagcaattagcaaggcgcaagtaatttgcttggatagagtagaaaaccctttgtgtcgcaactctttcatgtattatgtgttcccttgtgtgccttctgtttaccattatttatggcacttctgagtgcagatttttcgctaaaaaaaaaaaaaaaaaaaaaaaaaaaaaaagtactctgcgttgttaccactgcttgccctatagtgagtcgtattagaatcaagctta

SEQ ID NO: 19958 - DNA, 786 bp, Oryza sativa
  Clone ID: PAT_MRT4530_25368C.1
atgaatccgacggaatcgaagaagcgtcgatccaaatccaatcaggctgccggtgaaccgaccgcccttgatccagatgccgctagtgttgtgggagccgatggtgctccagatgctactgctgttgcttgtggtgctctacgagctagtgctccaggcgctggctttcctaccgcaggtgctcatgccgccagtccatggtggcaagaatcatctcctgatagctcggaatggatgtatccaccaggtggtttcctgaattatttacagaataataagatctctccatttagccagacacatccatttgtgaactatcataatgcaaggaggatattacgacatgagaaaaagtggtctacatatttgaagaaaattaagaaggaaaaggacaagagtgtaactcctaacccaactcatgttgtgaatgtcaaagatgctccaaaacaacgtcctattgggcataagaaggccaaagatgaatgcagtggaaaacgtctgacatcagacgctatttctgttattgaccacaaactagataaattcattgaagcaagcagcaatgctgagaagatgggagaggtacaacaaagtttggcaaataagaagctagaagtagccaaccttaatcataaagcagctcaggaacaaacaaagggtaaaatgattgacctttacaaagacttactgctagctcccacaagtgatcttagtcaagaagctttggctgagagatccaaagcattggagtgtatgagattggctttgtttgctaaagataattga

SEQ ID NO: 19959 - DNA, 483 bp, Oryza sativa
  Clone ID: PAT_MRT4530_25369C.1
atggcgacgggcgggcggtgcggcatggggcttggcgcggcgcggcacggggctcggcgcgacggcgacggcgatgcgatgacgacgcggcgcggcagcagcccggggcgcgaggcggagcgcggggcgcgaggcggcgacgcgacgggcgagcggcgcgcgggcgcggggcgcgaggcggcgacgcgacgggcgagcgacacgcgggcgcggggcgcgaggcggcgagagggcggcacgcagcgacgggacggcgacgcgacagcgacaggacgacagcgcggcgacgggacgggcgacagcggcgacggcagcgcgcggcgcgaggcgatgggacgcacgcgcggcgacggaacggcgatggcgacggcgcggtgcagcgatggcgacggcacgcggcggcacggggcgcaatgcggcgagagggcgggcggcagcggcgacgtgacggcggccaggcgcgtgcggcagaggaggggttag

SEQ ID NO: 19960 - DNA, 1398 bp, Oryza sativa
  Clone ID: PAT_MRT4530_2536C.1
tcagtgaacgcggaggcgccgtgcgctgttcttcggcgactcgctggcgagcagccacgtgacgtccctcgtgtgcgtgctgtcgcaggtggaggcgccggcgaggtcgggcgacgcggcggcggggttcgagcactggcgcttcccggcgcacggcttctcgcgcgagatgtacactagcatggggagccgcacgtcaacaccactgaaatcaaccggattctcagcactcgctgccaatcgaagcctcggtttacagctgtccaccgggtagtcggtggtgaggatggagaggaaggtgttcacggtgtagagtatcggctcgtcgacagggtcgacggtggtgacgaagacgtcgacgccggggagctcgccggagtgccggtcggcgaggacggcgaggtccgggacgcgcttgatggggccacgactactctccgcgtcgcacctcgtaacacgttggcccaaggcagcccagtttgaatctgaatcaaaacgcgcggtccattcgaaccgcccggcgccgccggcgtcgagcggcacgccgcgcaccacgtcgaagttgtacttggcggcgaagcgctcggcctcggacctctccgcagcggcgaggaactcctcgatctctgccgccgccgccggcggtgccatcatcctgaagctcctcgtcgtcgctcccgcgtgaaatgcagctgctgaggtcgtcgaactccggcggcacatttgctgcttggcctcctggtttgactccgcgtcgctcgagtccgcgtctcccggcggccggcggctcgacggcgtcgtcgcgctcctctcgcggccgcagccggagtcgccgacggagctctcctcgtcgtgatcctcgcctgcctgcgtgcaaacctgcaaaaccaccacatcccaagccgcctcatcaatcaccttctcggccatagcctcctcctcaccagaacagcccaacaattccaccgcccgcgacgacgacgacgaagccgcctccgccaccgaatcaccgagcgcctcctccctccgcgacgacaccaccgcggccgccacgaagggcagcctcctgctccgcagacgcagatagcatccgccctcgccatcgtctccgccactgccaccgccaccgccacggcccaccaaaccacaaccctcctccgcgctcgccaccaccctcctcgccgtgacggcggcccgcgtacggacgccgccgaccaccacccgcgcctgcctcctcgccgccgcgccgtcgcgcttcttcttcttccccatccgagcaaaaaaaaacccgtcgcttcgtccgctcccaaccgcgcggccgcgcgtacaaatacctgtggccagatacggatccgacggccagcctgtttccgtgacacgggatccaaccgttggaaa

SEQ ID NO: 19961 - DNA, 216 bp, Oryza sativa
  Clone ID: PAT_MRT4530_25370C.1
atggcagggtctgaggagaagaaggagatgcaagaccccaggacacaggccatagcatccaccattagagttgtgcccaacttccctaagccaggaataatgttccaagatatcacgaccctacttctaaatccccctgtgttcaaggacaccatcgacttgttcgttgaacggtacactggcaaaggcatctccgttgttgctggtaacatataa

SEQ ID NO: 19962 - DNA, 600 bp, Oryza sativa
  Clone ID: PAT_MRT4530_25371C.1
atggcaatggctgggtacgtgctccagcgaccgtcttctcctccgcgcgcctcctcgccggacgccgaggcactgcggccaacgtcaccgaccgccgagcgcccgtgttgtcgctggacgccgagattctccggccaaaatgcggcagtgcatcgtgatgtgtatgatttgcagaagctcttgaaacaggaacccctcgacaatcgtatgattgttgatgccataggggtgattactttgtcgtggaaggagcactatgtggagccgcgccccgaagatttggtgaagctaatgtctgacctagaggatttggtgggatttttgagtggcaactcaggtccaccttcttttgaagaattgatgaggtatgagagcatgtgcattgacgcttcccgcgacttgaagatatttgccgaggacaaggttaagatgctgaccttcggaaaacatcttgatgcctgtcatgctgactggcaaaccaaggcagaatactatgagaataaggccaaagaagcgagagctgcctctgcagaatatcatcagttaatgaagtgtaacgaggagatgattatcaatcaccctgccgccgtggactcttag

SEQ ID NO: 19963 - DNA, 315 bp, Oryza sativa
  Clone ID: PAT_MRT4530_25372C.1
agacaaaaccacctggggaaagggggaccatgatccacaggatgggacaaggacccgcggtaccgccattcttggggggttacccaagaggacccaaacgcacttacccaaaagacgaaaaaaaaggggcttatttaaatggccgatgagcaatgtagtagaaggggtagcatgccaccaaatctaaagggaatgggaattttttttggggggagtgacttttttttccctttccttttttttttacttctcccagcacaaaagcaattcaccaaatcgcccgcccaatggggcaaccggggcgacaccggaagg

SEQ ID NO: 19964 - DNA, 120 bp, Oryza sativa
  Clone ID: PAT_MRT4530_25373C.1
atggtgaataagagcaacgaccggcttcggccaataggagcgttcaccgggcgctatggggtggctatgcgctcttcccctctgtgcgaacttaaagcttatcgggctttccatcccgag

SEQ ID NO: 19965 - DNA, 1023 bp, Oryza sativa
  Clone ID: PAT_MRT4530_25374C.1
ctaggcggaccacttaagaggtctgcctgcgaaaatacctcttaagtggtccgccgagcgacgatgacgacgatgactaccgccggccgcgtcgttgccccttccctcgacccctcccctcccagatccggcggaggggaagggcgtcggcggtggcgcgggcagagggcgttggcacgagccaaggatgatgcgaggcgaagggtcgcacgagtgcacgccgaagaaggacgacttcgccatgccgaagaaggatgacttcgccaggaccggttcgccccggcatccagcccagagaaggacggcttcgccaggtccagttcgcccccgcgagggccgaagtagccttctcggcccaccaagcttagaggccatagggccggcgatcgcctgatggcccatcaagggcccatgagcctcccctagcgccgccgcccgagctcgccagccgccccggttccgccgccgccctcccgcccgcgctcccgcttccgctgccgcccgcccgcgctcccgctccagccgtcgccgcccgctcgagctccggctaccgctggccgctcccgcctccggatccaggcaggacgaggcccgccaccgccggatctggcccagctcctcgtggtcgtcgttggcgacggtgaggcggggatgctggtggcgccgctgcccgcgtcgacgcccactcgtcgtcgtcgtcggggtcatcgtcatcgtcgtggccacccactcgtcgtcgtcgtcgtggtcgtcgtcgggatcgacgtcgtcgtcgtcgtcgtcgtcggggtcgccgccgccgccaccaccaccactgacgtagcagctgcaccggccgctggtggtggcctcgaacctcctcaccaacttcaccggcacggctgattccttcgccagccacctctggaccatcgccaccgacggcgttctatcccagctcggcatgctcggcccctcgtcgtgtcggcgctcgtccctgccctccgccccgcgtcgtgcagtgctgctgccgccgccccgtga

SEQ ID NO: 19966 - DNA, 495 bp, Oryza sativa
  Clone ID: PAT_MRT4530_25376C.1
ttttttttttttttttttttttttttttttttacacaaaggtgactataatcagataatcagttcaagaaggcacatgtagatgtaggggagctttaggttttacagcagtaagcttcctgcattccagtcattaagcaacagtgtgacaccatagcaaagtctttgccttgaactaacacgtgcagagtggaaaaagtggaagccatggggtgatgggggccaggcttttagactatcactgtatcaactcttgttccccagtgaacctccatactgattggtatgtgagcttcaaaagacagcttcctgaaagctataaactagatcttgaagtcaacataagtgcaatgggcttctgcgctgcagtaaaggatccaactgaaacttcatcatggcaattgtctctagagaggaatcaaaccatgaatcaaaatcgtccgcggcatttgagggtccggaattaggaggaacactgacacttgagatagttgct

SEQ ID NO: 19967 - DNA, 1173 bp, Oryza sativa
  Clone ID: PAT_MRT4530_25377C.1
gcacgaggggagaacacgcgtctcacacttttccccccccgccgaccgtcggcgagggcgcgccgccgctgatgtcgcagcagcagcaggcgccggcgccgccgtaccggccgtaccggcaggtgagggcggcgaccccgcacagccgcgccgtctcgtgcgtgaggttctccccatgcgggcgcctcctcgcgacggcgtccctcgacggcacggtcgcgctgctctccccgtcgtcgctcgccgccatcgccaccctgcgggggcacgccgacggcgtgtccgacatctcctggtccacggactcgttctacctctgctccgcctccgacgaccgcaccctccgcatctgggacgtccgccccgtcctcgccggcctcaaccccggcagcggcggcggcggcggcggcgcccagcccgccgaccccaacgccgaccgctgcatccgcgtgctcaagggccacaccaacttcgtctttagcgccaacttcaacccgcagacgaacagcacggtcgcgtccggggggttcgactgcaccgtgcgcatctgggacgtcaagagcggccgctgcgtccgcgccatcgacgcgcactccgagcccgtcacctccgtccacttcatccgcgacggctccatcatcgtgtcggggagccatgatgggacctgcaagatttgggatgcggggactgggtcttgcctcaagacggtcatcgacgagaagaagcccgcggtgtcattctccatgttctcgcccaatggcaagtttatcctcgtcgccgcgctcgacgacacactgaaactatgcaactttgcaagtggcaagttcttgaagatgtacagtggacatgttaacagaaagtattgcctccagtccgcgttttccgttacaaatgggaagtatattgttagtggatcagaagacaactgtgtgtacatatgggatctccaagggaagaacattcttcagaaacttgaaggccatactgacactgtcatctcggtgtcctgccatccaacggagaacaaaattgcgtcgggcggcctcgacaatgataggactgtgagactatggcttcaagatggctgatgaatttgcagaaggaatgtgcctgatacaactcttgtgtgaacctgggacagcatagctatctaaaagagaaatatgcttctac

SEQ ID NO: 19968 - DNA, 133 bp, Oryza sativa
  Clone ID: PAT_MRT4530_25378C.1
gatgccggagagggtacctgcataccagggcgtgctggaagcggaaggcataactggcttcgtcaacagaatggacacggtgggcttggagtgcggctgtggaggtctcgacgcttccacctgtgtggaggtg

SEQ ID NO: 19969 - DNA, 107 bp, Oryza sativa
  Clone ID: PAT_MRT4530_25379C.1
tcccctatttctggtcttctccgagacgggtgattgcgtcatggtgaccgacgcgacacgcaagtggcgtacatcattatgggccgggccgggcctgatttgggccg

SEQ ID NO: 19970 - DNA, 543 bp, Oryza sativa
  Clone ID: PAT_MRT4530_2537C.1
ctagtggatccccgggctgcaggttttgacaaccaacacacacgagcacatatgtatgttaaaaacatttataatgttatgtgttgggtgcaatttagccctttttcatgagtttgaagtctctgcaactacaacattttcatacaaaaagtaaaagagaaattaacaattagaaatggcaagagtatatatgattagattgcttaccaaaggcttgccctatctctggtccacccttaaacccaacagtaattaagatgcacgcaaccatcaaaaagtaattgatctctggagagtatacttggccttcatgtttgcctgaggtatgcttcatggtaactcttggaaaacaacccaaagcaattgattgtcgaatgatggagaagctggctgatatcaatgcttggctcgcaacaatagcagccaaagttgctatgataaacatgggccaaaatagtggctctggagtactactgtagaacgtcgtgctgagctttgaagggttcttgaccaaaaatgctgcctgcccggcatacgcaagga

SEQ ID NO: 19971 - DNA, 382 bp, Oryza sativa
  Clone ID: PAT_MRT4530_25380C.1
aattattatgggtttttattattttattatgtttaacttatatataatgtttaatattagaaaaaaaaagagggggtatattacaaaattatacatcaaaaaaacaacaactgaatttaaaaggtcaactaaaaggttaaaaaccacaaatgatcacatattttcacacaagaatatcacactattaccacaggttaaaattcgagaggctcaaaaagaaaaaaaaaaacttggtcagaaaaacaacctattttgaagatacctgaacaaaaaaccatcaagaactggaattcctagctttgtaaagtcggcacagcgacgcgaatatcatggattttcagatgtcgggggggggattgattataaaaaaaaagggacgggg

SEQ ID NO: 19972 - DNA, 243 bp, Oryza sativa
  unsure (1)..(243): unsure at all n locations
  Clone ID: PAT_MRT4530_25381C.1
gttactgacggtacgtgcgcccgcatgttgtgtacgcacgcaacgtctactgacgtgctcagccatggcggcaacatggccgtcgtcgtgtctcgcgtcctctctctcgcgcgtaaccgggagcgcattccanagctacaacgcgatatacaactttggcgactgcatcaccgacaccggcaacctctgcacccgctgttgcccctagtggctaaataccgggcaggctcggtacggcaacac

SEQ ID NO: 19973 - DNA, 962 bp, Oryza sativa
  Clone ID: PAT_MRT4530_25383C.1
cccacgcgtccgccaatcaatcgccccaccatattttagccctagaaacaccacgacgcgcaatccatccaccccgcaattctactccctctcaaatcctccatcgccgcagcacttcgagcttcgaggccgaggagggggagcgcgacaagcccgcgggaagggagtccaccatggcgatggcggatctgctgaggagggaggaggagttctacgcctccttgttcgactcccccaaaggcggcgatgccgtcaagtcgcgtgggcagatgattgagaggaagattgaagttcttgaggacatggccaccaaggttagtaaccggagatctcgtaggtggttgaatgatcgcttgctcattgaacttgtcccccgtcttcatgttgaagaaatcaaaggcctttttgctcctccaccatggggtcttacagtctggccattgaatgttcagatttgtgtagggagtagtgaggaactgcccgtttctgcattttgtaggacaagtgatggtgaatgggatgccttcaggagtattgacatggacgttgaggcacgattgatgcaacagatgaaacaatcttctacaaaacagaagaatcatgtggacagcgatgaattgattgctctcaatgcttggcatcgtatagatcgccaaacaagagaagccataaagagaaatttcctcccagatctgcttgacatatatgaggaccgaattagggccttcattgaagatgctagtggtaaagatgtgcttgtactgaatgtccaggatccgtttcagaggttgcttctgcatggtgtatgtgagttctataacgtatcatctacaaccacgactaccatgagagatggaaagctgtggaagacgacaacaattaagaggagaccgggaaccggtgctccctccaggctcacattagttagctttctgaggatgaagaagaacggatcccagtaa

SEQ ID NO: 19974 - DNA, 513 bp, Oryza sativa
  Clone ID: PAT_MRT4530_25384C.1
aaaaagggaaaccgggggaaaaatcaaaaaaggtgggaaaagggccccccgggaaaaaaaccccaaaaaaaggggaaaaaaaaccccgggggcccccgaccgaaaaacaaaaaaagccccgcccgggggaaaaccccgccccaaggggcccaaaaaaaggaccattaaccgggcctccaaaaaaaaaagggggggccccaaagaaccccaattcccggggggggccccggggcccccggggaactggaaaaacccccggcccttgggcggggggcctgaacccggggaaataacccccccccggggccccagggaaaaacccgggggcgggggaccaattggaaaactaggcccccgggggcccttaggaagaaaaatggcttcccttttaataacccgggccaggggggtaccccccccccgggggggctcccggggggggggggccccccgtaaaaccggaccaaaaaaccctggaggccccgggggggggaaaaacccagaaccccccga

SEQ ID NO: 19975 - DNA, 237 bp, Oryza sativa
  Clone ID: PAT_MRT4530_25385C.1
atgggtgccatttgcaaatttcttagagggtttttagagtctattgctctggggaaaaaccttgggaatgttggttatggttttgagttgcttgagtatttggcacttgcatatgtgcaaaggattttgagtttgagctgtattttggttttggctaggagtttggctttgaggcatcttccttggggagttctaatgggcgatcgatcgccctaccgatctggtagcgatcggtag

SEQ ID NO: 19976 - DNA, 149 bp, Oryza sativa
  Clone ID: PAT_MRT4530_25386C.1
ccacgcgtgcgagcacgcgtccgagagatcaggtctaacactgagagtgacgtgctccatgatcacatctgcagctgtggatggcaacatgcatgatgagccttccgctatttgcgcccggccaggccaatggcctatcgtccatatcc

SEQ ID NO: 19977 - DNA, 588 bp, Oryza sativa
  Clone ID: PAT_MRT4530_25387C.1
atggtggacttcctcatcggcctcctccgcgtgcccgcggggctcgccgcgcgcgtcctcaccaggcacggcgtcgccaagctctacgccggcgcgcgcgccctcgacggcgccttcttcctcgtgtccccgggcccagaccgccgcctgccgccgacgccgtccctccgcctgctccggccgcgcgtcgccgcccgctgccgctcgccctctgcggccacgctctcccgccgctttccgccgccacgcccgcttgcctgggtcgaggcgcacaccgccgccccacctgaggcgaagaggtcgccgcggatgccacgtcagcaaaaccggacaaaaatactgccgagggacctccgcgccgccgcggtcgtggttgcggacgacgtcgacgtcgacctctgcatcctcggcggcgggatgaacgtgtcccgccgaccggccgacatgcacgcgcatcctccgaggcggccgtccacgtgggcggaggctgatctcgcgagcaggaagctcttcgtccacggcctcggctggggcaccagagccgactacctctgctccgcgtttatgtgcctaatcatacaaaggtag

SEQ ID NO: 19978 - DNA, 662 bp, Oryza sativa
  Clone ID: PAT_MRT4530_25388C.1
tcaagtttttaaatatataatctagctcctctcaaaccaccaggtgcccaaattttttcccccccctttatgacatatcttcatgatagagatgaagtccaagaccaagacgggtacaagctcggcgaaaagccattgcttcagccttctgcacaggatctccatagcctgtatcatcagcagaagaagttccagtggcttctctgtagatctctgcatcagttccatggagagtcacgcgataaataacagatacagattttccatcagatgaataaacaatgctgcgaacctcgccagaccattctggagcatgtatattcagaattttgttaacaatgtgccatgggatgtacttcagggagaagccatcttcgacgcgcgtcttgacgagggcctcggggaccctcttaccgagctccctgaggacctcggcgagcggcttgctgatgccttcggtgggcgcgggcgcggccacctcgccgccggcgaagtcgtcctcgtcctccgacgggaaggccggctcctgcggccggcgcgacgcgcgggccttcgcggcgaaggggcgcgcgaggagaggggtggcggccgcgcggcggccgaggaggaggcgggctagggcaccggaagccatccctcctttggggccccctatcattctg

SEQ ID NO: 19979 - DNA, 381 bp, Oryza sativa
  Clone ID: PAT_MRT4530_25389C.1
cccgggctgcaggaattcggcacgagggaattctggaaacattgtcaataccagtatggcaagtaatgtaagttagctgctacaaacctatcggttttaaactgataagtgatatgctctgtgatttaaattgcaaacaaatttcactacaattctggaactcaattgctattctttaggttttagctttaaattcagcatagcatacctaggttgatactcctggaattttgggaggagcatttgatttcctgcaattctcttcttccttcatcaatactcagggtctttctgtatgttaatttttatgaaccagcaatgcttcctgtgaacttataagtcttctatatagtcgtaacatatccaacacattgcatatgt

SEQ ID NO: 19980 - DNA, 2001 bp, Oryza sativa
  unsure (1)..(2001): unsure at all n locations
  Clone ID: PAT_MRT4530_2538C.1
aggcatatgactggatttcgcttaaatatgaactgactgttagtagtctttatcagatacatcgagtacactcgtgtcggatagcagctatgtaaactgtaccatcgttgctctaataacttttcaatgaaaaaaaatcaagctctaataacttttagtcccccatgataatgttttggggccgtggcaatacaacacttgggtgatttaggctgtatgctatatgaacagttgacaaaaggctaacttgcttaaaatctatacgtatggacgcttgcgccggagttgatggtcactctatgatcctgtacatgtgtgcgatctcaaagcagttcgccaattccatcctacggatgcggcgatatgcaaactggaccaaatttgatgcggtctgcgagcaaatttaattcagcctggagttcagatcttcccgttgtttttccgtactctgaaatgatccatgtagttgtagaagtaaagaattgctgacaacaaaaatcgagctcagggccatcaatccccctgatagagatggtgtcatggcgaaatcaaattgaggcagcaacaccccggcggcaatagggatagctactatgttatatgcgacagcccaggctaaattttggtgaactttggccatagttgctttcgaaagtgataaagcatccattacctgagaaagtctgtttcctaatagaacaactgaagccgcgtcagaggcagcactctcttttgagtttgttcgcatagctactcccacatcagcagctgctaaagatggtgcatcatttattccatccccaaccattgcaacccgacgtccctctccttgcaatgcagttataatgcctgccttttcatgtggagttaaggatgactttatgttttcacttctgatccctacagttctcccaatgctttcaactgcttctttcctgtctcctgatagtagaaatgtcaagatttcttcctgctggagcctgtccacggttgctttggcatcatcacgcagaacatctgatacagcgatagcacctattattccttctccctcacggccaacataagcaattgattttgagtgattagatgatgcctcactggaagacacaaactctagatgatttccgagatctgtcagttcagttgacgatgccttggtctcaaatcgattgtggacccagtccaaagtgcctactgcaaccaagcacccatctacttctgccaaacagccaaaaccaggctctgtaagttgaccacttgtggctgggatatctagtttgagaagttcggcctcctccattatagcatttgcgataggatgcaatgctgttttctccactgcagcggcgagacgaagaatctccgcctcctcatatgctaaagaagctatagaagtaactactggtcttccctttgttagcgtccctgtcttatcaagtacaatggcatctattccagctaaacgctccaaaacatcaccccctctaataagtagtccccgtttagcacccagtgaagttcctatcaaaatagctgtaggggtagctaatccgagtgcacaaggacaggaaacaaccngcaggtgaacattatagatcagcccaagaatcataaatgcaggcatatgcaaatagtgcccttcatagcccacaggcttttcagccagccgcgtcatcgaacaggtatcgtattgagaattcaagatgtttggcatgtacatcaatcatgtaggatttcaatgatgattagttagtttgtgcactgtgacctgactttgtaaaattagtctatttgataacatttttttaacaatagttttcagatcattagagtgaaacactgagctttcagaaaacagtaccaggactacttacaagtacatccacagcgagcttcaagctcaatagtaatgaatccccgtctggaccagaaatatcatttagaaggacctctggaaagatgtgggtgccaatgtaataccttggaatagagaaggta

SEQ ID NO: 19981 - DNA, 238 bp, Oryza sativa
  unsure (1)..(238): unsure at all n locations
  Clone ID: PAT_MRT4530_25390C.1
aacttccaaaccactatattgttaaaactcagtacaattaaccgcgaagggtagtattgctactcagggcactatatcacctatggcatacaccatatggtgatggcgtgttcaaagccaacagagcttgggctggagcttgagccagattccgatcaaagtngagatcattaaactgctgcagtgtagctgctgcgctctgacccgaaaaatgcttatggccttatgtgaagactgt

SEQ ID NO: 19982 - DNA, 253 bp, Oryza sativa
  Clone ID: PAT_MRT4530_25391C.1
aaaccttcccaatgtacatactttacatattagattgcaaggcatattacaaaaagtgcttacagaaaggggaagaatgcccacttcaatctgcttacagaaaggggaaggatgcacactccattctgtttcaacaaactaatggtacaacaatatggcgagtagctgattctctggaaaaaaactgccatagcctccaagatgttgctctaaggggaaaatccccaaaaaatgctatttacattgtattcct

SEQ ID NO: 19983 - DNA, 284 bp, Oryza sativa
  Clone ID: PAT_MRT4530_25392C.1
tacaaaatggccaacgaggccatcctaggggtgctttttctgcgcctacagaaccttgaccggggtcttccacaaaaccctcgccgagtcgtcggactccgccgtcgtccccatcgcgaactactcgcaggctactgcttcggccatgaggggcttggatccggaccggggcggaggctagccgtacatactccaagctcttctgacactacaacgccctctactttcacgtactcctacgcacctgcgccgaattctgggccaccgactaggatccactcccc

SEQ ID NO: 19984 - DNA, 2550 bp, Oryza sativa
  Clone ID: PAT_MRT4530_25393C.1
ttttctctccttctccgactccgacgatctttttgccggcgaggtgcggggagcatgtacctgtcggccttctcctcctcggcgtcttcgcacggcggcggggacagcgaggccagggacagctccacggtggtcgccgtcgaccgggacaagaacagccagcaggcggtcaagtgggcggtggaccggctcctcgccaggggcagcgttctccagctcgtccatgtcaagccacagcaaaatgctgaagcaggagcggatgcagagatgcaacagatgttcatctcatacagaggctattgtgctcgtaaagggatgcaattgaaggaagtgatcttggatggcagtgacatctccaaagcaatagtcgagtatgccactagcaacgccatcaccgacatcgtcgtcggggcgtcgacgaggaacacattcatcagaaagttcagaaatcctgatgtgccaacatgcttgatgaagatggtgcctgattactgcacagtgcatgtcatccacaaagggaaggcaatccaagtcaaggcagccaaagccccagcaccctttaccactctccctcccaaacagtactcacagtcaagcatagaatctgatggatatccgagatcaagaggagactggaagaagatttccaatcaatcatctccaaaggcaaacagaccatcggtggaccgactatctggctttgcaaaagctccaaccagggaaaggcctctctctggagctagatcagcacccccaaaggatttcgacgactatatcgacttcatagctcctccaaggccctcggtaacccgtagctccttttcagatgatgttgattttcctttgagcttggagttgccatcgatggacttcggcgattctttggagctttcgctttccgcatcaatgtccatcgaaagcctaagctcagctgggaaggatgtcgaaacggaaatgagacggctgagactagagctgaagcagacaatggaaatgtacaactccgcatgcaaggaagcaattgatgctaaacagaagcaggctgctcagatgcaccagatgaagatggaagagtccaagaagtaccaagaactcaggaatgctgaagaggaagcccttgctctggtccaaatggagaaggcaaagtgcagagccgcactggaagcagcagaggctgcacagagaattgcagagctggaggctcagaagagactgagagcagagtggaaggcgaagcgcgaagccgaggagaggaagagagcaacagaagcaatgaacaacactgatttaaggtacaggaggtattccattgatgacattgaagctgccacccataagtttgacaaggcactcaagataggggaaggtggatatgggccggtgtataaagctgtcatggatcatactaatgtcgccattaaaatcttaaggccagatgcatcacaagggaggaaacagtttcagcaagagatagaagtgcttagctgcatgaggcatccaaacatggtgctgctgctgggagcatgcccggagtacgggtgcctggtgtacgagtacatggactacggcagcctggaggaccggctgtgccggcgggggaagacgctgccgatcccctggaacatccggttccgcatcgccgccgacatcgccaccggcctcctcttcctccaccaggcgaagcccgagccgctggtccaccgcgacctgaagccggccaacatcctcctcgaccacaacttcgtcagcaagatcagcgacgtcggcctcgcccgcctcgtcccgcagtccgctgccgccgccgaggccacgcagtaccggatgacctcgacggcgggcaccttctgctacatcgacccggagtaccagcagaccgggatgctgaccaccatgtccgacatctactcgctggggatcctgctgctgcagatcatcacggcgaggtcgcccatggggctcacccaccacgtcgagagcgccatcgagagggggaccttccaggaggtgctcgacccgatggtgaccgactggccggtggaggaggccttggtgttcgccaagctggcgctgcggtgcgccgagctgaggaagaaggaccggccggacctcgggaaggagatcttgccggagctcaaccggctgcgctgcctcagccaggagtacgacgcctccaaggtcagcagcaccagcaccacctgctccagctccgctccctacagcttcggcggcgacgacgtctccacgccatgatcagagtctctgctgcctccatcctccatggctgctgcacctgcagctgcaatgtatagatgattaaaaggcactgctgctgctgccttcgctctgtgtggactgcagctgagctgatgatgttacttaatggcgcaacatagtttgggtgattaatcattagcatgtagatgattaagaggagaaaattaaaccatgtaaaggaaagattaaggcaatgcatttctgtatgtaatgtgacatgcccaagatgccaagtgggtgatgagcagcctttggttctcagatcataatttgcgc

SEQ ID NO: 19985 - DNA, 438 bp, Oryza sativa
  Clone ID: PAT_MRT4530_25394C.1
atgtcattgccaagctcactcacccacgtcgccggcaccgctagcgtcaccctactcctcctccacgctactgcgtccctatgcaaccgggccgcctgcttctcctctatgcccccacgcagccgggctgtcgacgccgcctactgctactccgcgccggttcatctccggctgccggtgcgacacaccatcattgtcgtcaggccgcctcatccatccacagtccccacgcctgctcgtcgctgctccgcctcttcatcgtcgtcccactgcatcacgcctcatcgtctcttcctcggtcgttgccatgcggatgcgggtgcagcagggcctcggtcgggtgacagggccccggaggtgtcgggtgcagaggttgttttacgcccgtttttcactttagggccggggccgggtgaacccgaagggcagcgagggtga

SEQ ID NO: 19986 - DNA, 656 bp, Oryza sativa
  Clone ID: PAT_MRT4530_25395C.1
gcaaatgctatcttcttactgttgggtttgagcttggtgcattaatatttctgaggatatgtattgatggctagcagacgacaggatggtaactgtgcgctctggtgtttgcaccggatggtgtgatacattcgaatggggagtcacatattctttctctttggtggtgccaggctaacatgtggggggagggatgtcacttgcttaaaactttacgaagactgcacattctttgctttacgggaaatcaaacctcagctcttcgacagtgcaaaggaggctgtagcatataactgtcatgatttacccgagttggatcttaacataagctttagggttagtgaccgatcgttgcatgctctggcacatgggtgcccccatcttacaaggctcaacataacgggatgatgcaatttcaacgatgctgatttggcctatctcagtagccattgcaagagcctgagttgcctcaatctgtgcgattgtgcgagggcatttttcctaatagcattgtacgccatcgactgtaactgagggcagcttcattgggtgaacctaggctggggagatcgtgcaactggcaaaggagtgaccaggttgtgatcagggggccctgaacttcgggctctggacttgtgtggttgtgtgctgataca

SEQ ID NO: 19987 - DNA, 249 bp, Oryza sativa
  Clone ID: PAT_MRT4530_25396C.1
gtccgtacacttgactcatgctttttttttattatcaaaagacagtgggggaggcacccacggtatatattataaaagaataaagtatttacagggaagacaaaaagagtggaaagaaaaagactaaagacttaaattacagctgatcaatccatgattgaactaaaggcctgttaatctctttgagtctaattaaatgtagactcaattgactcatgcttttggattgaatatcttattgaatgggct

SEQ ID NO: 19988 - DNA, 287 bp, Oryza sativa
  unsure (1)..(287): unsure at all n locations
  Clone ID: PAT_MRT4530_25397C.1
ctggataaggccgagaaggctgagaagaagccagccagaaggaagggatcgtcgtcgtngtcttcggcggccgaggaggacgacgacgncacggcgnggttgtaggtcagggggcgtcgggggtgatctcgccgnacttcctcgacgncgtnctccgnncgctgcggcgccgcctccgcgcgcacgntccccgtcactgccggcgccggggctgcttgcctcctccctcgcgctcctcggcaaggtctccatcngcctgnttctcatgagccactttgtgccggcgt

SEQ ID NO: 19989 - DNA, 1411 bp, Oryza sativa
  Clone ID: PAT_MRT4530_25398C.1
tcacgaccaaaaaagcccaccgacttccttcctcactcctccaccggcgaccagccccggctgcccttcaccctgcgccgccccagtccaccgccgcgttcgccggagcgacgatctcgcgccgccgcctcctcctcctcccctagattcctgacccggccacgccggcggcgctccccctccgccggaggctggcatggcgtccggccgcggcgggatccccgggccctctcgcgccctcctcgtcctcctcctcccggcgttgctgatgctcctggccttctccacctcctcctccgcggcggcgtcgtcgccgggcgcgatgcacaacaacaactgggccgtgctcgtctgcacctcacgcttctggtttaattatcgacatatggcaaatactctgtctctgtacaggacagttaagagattaggaatacccgacgagcggatcatacttatgttggcggatgatatggcttgtaaccctaggaataactatcctgcccaagtgttcaataatgagaaccaccagcttaatctatatggtgacaacgttgaggttgattaccgaggttatgaggtgacagttgaaaactttttgagagttttgactggaagacatgaaagtgctgtaccaagatcaaagcgtcttttaagtgatgaaggaagccatattctcttgtatatgacaggacatggtggggatgagtttttgaagttccaagattctgaagaacttcagagccatgatttagcagatgcagtaaagcaaatgaaggagaagcatagatttaaagagttgttgataatggtagatacatgccaagctgccactctcttttcacagcttcaatcacctggtgttttaacgattggtagcagcatgaagggtgaaaactcttattctcatcatcttgattcagacattggtgtttctgttgtggataggtttaccttttatacacttgctttctttgagaaactcaacatgtatagcaatgcctcattgaacagtcttttcaactcctataatccttctatgctgttgtcgactgcgtattatcggatggatctttatgaacggccattaaatgaggtccctgtgacaaatttctttggatcagtcatgaatactatccacacagattctgcctactcaggcttcttagctgcagatgatattggaaccatcccatccactggagataatctactgaaccatgctgtgttacagaataaggctagccaaagaagatcaaacattgaagaagtgaaagaagcacaagtaaggtcccatgggtggacagatgttctgctggaacagcttgatgtcaagaatgctgacactattgtcatgtatggtctgggaacaatgggtatactgttagcaatttcaacctggttatcaatgtag

SEQ ID NO: 19990 - DNA, 1949 bp, Oryza sativa
  Clone ID: PAT_MRT4530_25399C.1
aaaaaaaattaactaatatttaatttatcatgttagttgttctgttacattcgaacagtcttattagaatgcgcttgcaggcagatctcatttcttgcattcccagcaaggaatgcagacatgcagtacacatctgaacgaaaaaaaagggctcaaaacaaacaatcacgattagcacacaatttgcattgccctccgttaacgccatggttctggtttttggaggctaaacaacagctacagatgtacaccatacttttctttcggccgcccgggttcataccaatttctctgacatgttacctcgcataccaatttgacaaacgatgtagtactgcactgcagccaaatacaacagctaagactcatccacatagtttcatcatggtatgaaatgttgcttccgatgcatgatccttctccagggagcaacacctccagcgattgctatggaagcatcaattatctgtgccgaagtagcggtcaccgtactctcccaaccctgggattaccctgtattcctcgctcaacccggtgtcgatctcggaggttacaatcttcagcctcggaaatcgcttgcagacgcactgaattccctcaggagccgagataagattgagaaatatgattcgctcctctggaacaccttttcttatcagaagctcaatagcttgatttgctgagttacctgtaccaagcactggatccaaaagaagaacatgccgttcagcaatatccatgggcagtttatggtatataagttgctgtccattgtctccaacacgatgtattagaatcttgccaatttttattcctttacaacaagcacgcaatgcattctccatactttcaccacttcggacaatagacactccacagagcttcttgcaaaattcaactcccatataaatggaccctgttggagtaataatctgcttttctgtaaatggcaaatgccccagtccgtgctcaactaccaaacggatcaaccgatctgaataaaagacaaagtcaggtgtagtgatgtccctgtcacgaatcagagtatgcattcctcggatctggaatgttgtttgaaccacataaacatgtggatagattttgcacaagtcatgctgaccaagcttagtacgaatatgttgaacaatcaggtcaattgccacatgattatcacctcctcgtggtatgatcacgtcggcatattttttcgaagggagaacaaaatcatcaaatgctggcttcacaaacctgccatactgctcaagcaccgagctaacatctctacctctttcaactgtatcacgccttattcgtcgagctagcctaatatcagcatctgtgtccacaaaaattttcatgtccatcagattgcgaactctttgatcatggaagactaaaatgccctctaatataatgacatctgatgcattgacctttctaaagctttcagaggaccgtcggtgattcttaaaatcatatataggaacatttacaggctgtgcccgttttagctgccccatgcattccagaagctgctctgtgtcaaatgcatcagggtgatcaaagttgtaatcttgggcatgtgcagattcttcagcagttaacccacggtagaaggaatcctggttgacgagcacgacacggtggtcgtgcagctgctggatgatcatgtcgcacaccgtcgtcttccccgacgccgtcccacccgaaaccccgatgacgaagggctgcctgagcgcggatggcgacacaagctccgcggcgtcggcggcgacgccgttggcgtagacggcgccgttggagtgggcggccgccgccgcggccgccttggcggaggaaggggaggacggggcggagggggaggagaggcggagcgcctcgaggcggagtccgctgaagtgcgcccccaccgccgagtccatgacgtcgtccaccgccttctccggcat

SEQ ID NO: 19991 - DNA, 166 bp, Oryza sativa
  Clone ID: PAT_MRT4530_2539C.1
acgcgctcttctgccgcgtctgggcgctcgtcgccgccgtcgcctagatgaggggtgtttgggtcattatacatgggcttaatgagcacagttgaaggtattcgcactttgctgatctgctcacatcatgtggcttctgagtatattctttgtactttatttgcca

SEQ ID NO: 19992 - DNA, 315 bp, Oryza sativa
  Clone ID: PAT_MRT4530_253C.1
atggtggcatggaggccactctccaccagatttgagtggctgggcgaccctgactccaatgctgccactgcctggcttgcttcctcccatcgtcgatgtgaggtggcactggtgaacgatggtgagatggcaagtggtgactgcgcactggccggcccggcccaacgtgccggtggaggggcccaggcacggcccggtggtttggccgggccagcacgggctcgacctccgtcgggctgcgccgtgcttgggccgggccaaaatgccgtgccatgggccgggccgtcgggcctcgggccttttggccatctatag

SEQ ID NO: 19993 - DNA, 269 bp, Oryza sativa
  Clone ID: PAT_MRT4530_25400C.1
ccatcaggaggccccaaatagtttgggcaaaaagtttctcataacaaacaaatcaactccattcaatcacatccccgaagattgaagagaagggatgtcggggggcgggcggggggcttcactgggccagcttgtaagacaattccaggataactcctattgatttcaggtaacagacccaaactcggaaattaatcaacagggcccaagcgccggcgtccttgggtgggagctcatcgcccactgggggtgaagcgcttcgggcccgc

SEQ ID NO: 19994 - DNA, 315 bp, Oryza sativa
  Clone ID: PAT_MRT4530_25401C.1
atggcgaagatgcacatccgtgtgcctaatttggcgactttctttctcatcttggccgccggcgatggctgcggcgacgcatgtgatggccatgcgatgttggagaagacaccattggggaagaaggttgtcatgacaacatcatgggctatcaacaccgacttttctggttatggcacaactgttgcggtggtgagcttagtcgtcaccggtgccggtgccggtgcagctacggcagaggcagcgggtatgtatgacaccgggaaaatcaaagaatttggctctagtgacggtgccggtgcagatactaaataa

SEQ ID NO: 19995 - DNA, 811 bp, Oryza sativa
  Clone ID: PAT_MRT4530_25402C.1
atggctttcaatcttcctagtctatttcagaggataacaaacctagactctctagttcatcctttttttcactcaggaaattgatgatttggttaaaaggatgcctgtttgtaaggcccctggaccagatggttttaatagcttctttatgaaaagatgctggcctatagttgcagaagatttctacaggcttatggcacatttttatgaaggctgtgttgatattcagtccatagattcttccttcattactttggttccaaagaagaataatccagaggttgtgaatgattttagactgatttctctgatgaatataagtctcaaacttctgactaaggcattggctaataggttgcagggagttataactaaattggtccatgagaatcaatatggttttatcaagggtaggacaattcaggactatttagcttgggccttcgaatatattcatcagtgtcaacaatctaaaagaaagattgttatcataaaaattgattttgaaaaagcctttaattccattgagcatggtgcaatccttgatattatgagacatatgggctttcccgctaaatggttaaattgggttgaaatgatctttagttctgccagttcagttgtgttactcaatggagtacctagcaatggattcaagtgtaaactgggagtaaggcaaggtgatccattgtctcctttaatttttgttttaggagctgagcttcttcaggctattttgaatgaggcctgcagattggggactctccctttcacatacttaggtcttcttatgggaactactaggcccaaa

SEQ ID NO: 19996 - DNA, 147 bp, Oryza sativa
  Clone ID: PAT_MRT4530_25403C.1
atgggcctggtcggccagctgacaagtcggcctgctttccaggctgccggcccatttcatcactgcctcaccggtcagcgggccgccgacctcggatccggccgccccaagaccggcatcgccgtccgccgcacgccgtcgccatga

SEQ ID NO: 19997 - DNA, 396 bp, Oryza sativa
  Clone ID: PAT_MRT4530_25404C.1
gggcccaaaaaaattcccatcaaaaaggggtgccccaggcaaaagaaaaaatcccccctttccggggggcttttttacccattggggtggaacaacccccttttgggccagggggccccaatcatttgcggggcctaaactttggggaaaaacccgggttttacaaaaaagttggggaggccccccaaaacctttgggggggggtggggaaacctacgccaattttattgggggggggaaaaaacgggggggtgcttgcccaaacaattggaaaagcggctgccttgaatggttaatcccatcccttaaacgtggcaacaggggcgggggcggtaatcccgtcaacacgaaaacttaagggattggacaccgggggaacccgtccttttttttccg

SEQ ID NO: 19998 - DNA, 1289 bp, Oryza sativa
  Clone ID: PAT_MRT4530_25405C.1
gctgcagggccccggcacgggggctcggcggcgcgtcgcagctgcgcccccgccacccatggtgctgggaaagatcgtcatcgtcatcggctccggaatcgttgggacattactcaccagcggagaggccaagattgcgctccccgattttagggatgtgctctctggtgccttcaaggtcaatcatctcagagaggacctccaacttttgtccaggtcaaatcaagttgctattgtcaccgtcgatggtagaccaggccctggtgcttatggtataacagctgttgttgctggggctatcggctatttatacataaggtggaagggttggaaactttctgatttgatgtttgtgacgaagcgtggcttatctgatgcctgcgatgtggttggcaaacagttggaacatgtttcagagaatgttaatgctgcaaagaggcatctggcaggaagaatagatcatgtagattgtactttagatgaatgccaggaaattacagaatccacaagaaaagaggttacagtcatccatgaagatataagtgccttccaggaggaaatgcaatcagttcatcttgtggttcgtactctggagacaaagcttggacgtctttcatatacccaagtcttatcatcaactcctcttccagctattgaattgccagagagaattacaagggctgcttctttgcctccaagttcagaaccggagttttctggccctcgatcacctgtaacagaggcatctaaggttgtgcattctcctacaactatgtcggcatcaggactgagtatgctagttgaaacatcaatgccacctaaaaggggtgttttgagccgagcaagttctatgaaagaaggatcccaggagctatcaaatgggtcatcaagttcaggggaaccaaccactgggaggaatgttccaaattcaagactgtttggagggtttggttttttgaagagttctgccagttgagatacatggcattgtcatggttttacccaaaggagttggattgacctttacgtgtatatgtattgctagctactaggtgccagtagaaaaatatgcagttgccccatggcatcactttcacctattggaagtgccaattttttgtagaaattaattaatctatataccaaatacaaatgcattgcagagatatactgtttgtcggttgtggttgtaaaaaaaaactcgtaggggcagaaagagacacctgattgcgtcttgttgcagcaagtgccttccaggaggaaatgcaatcagttcatcttgtggttcg

SEQ ID NO: 19999 - DNA, 222 bp, Oryza sativa
  Clone ID: PAT_MRT4530_25406C.1
atggaagggtggcgaggtgttggcaccagcgcgagagccatgggaataaaggagtcattggagacgggaaaaacagcgagacaagggaacctttccgtcaccggcttagagaacgaggagaggaggaggaggccggtcagaaagggcctggccgatcaagccatcgacacctttcagatttccagccaaccgacgaggccaactggtggcgaaggacgccag

SEQ ID NO: 20000 - DNA, 1001 bp, Oryza sativa
  Clone ID: PAT_MRT4530_25407C.1
ttcaccgaacacccgacgaggagaaagaaaccacccgcaccgaggaggcccgaagagacaaacctgaccaaatccaccctagctacaaattttcttggccgcgcgcggcaggcagatcgagcaggcgagcgaagatgtcgtggcagacgtacgtcgacgagcacctgatgtgcgagatcgagggccaccacctcacctccgccgccatcgtcggccacgacggcaccgtctgggcacagagcgccgccttccctcagttcaaaccggaggagatgaccaacatcatgaaggacttcgacgagccggggttcctcgccccgaccggactgtttcttggaccaaccaagtacatggtcatccaaggtgaacctggcgctgtcattcgtggcaagaagggatcaggaggcatcacagtgaagaagaccgggcaggcgctggtggtcggcatctacgacgagcccatgaccccggggcagtgcaacatggtggttgagaggctcggtgactacctcgtagagcagggcctgtagatcaccgtcgccatcatcgtcgtcgttgccacagttcaattcgtcagcaacaaattaaacggagacgaatgagagacacacacagcacatagtagatctctatgctatgcatttttctagccaccgtgcatgcatgcatggggattgtggtttaattttcctctcctctttccttgtccacctccgcaagcatgttctggatcacctcttgtacgttctgccatattttgtttgatcccatttcttcatgccgtttttggctaataactttttgtatttctttctgacgtggtcatttcgatttccattggagtttggaaatgtaacaacaaatgtaattaacatgagaaaattcctttgacgccgctaaaaaaaaatatgtttttatgctaattttgctaaaattagtattaccctttaatttttaattttgatgtcttctgcccattctgtcagttgaccattatattt

SEQ ID NO: 20001 - DNA, 774 bp, Oryza sativa
  Clone ID: PAT_MRT4530_25408C.1
gcacgagggccacgcatcaccatggcgctaatccaccaccacctcgccgttccagtggctcccgctcctcctcctcggggtctcggtccggccaccgccgcccggcggctgacccttcaccgccgccgccgtaggagtggcgccgccgccggcaggatgacagtcacagcttcgtcgatggtggagccggcaagtggggaggagacggcggcgcgttcggcggcggacgtggtgagggcgttctacgacggcgtgaaccggcgggacctggcggcggtggagccgctcatcgcggaggggtgcgtctacgaggacctcgtcttccccaaccccttcgtcggccgcgccgagatactcggcttcttcgccggattcatgggctccgtcagctccgacctccgcttcgtcatcgacgacatctccgccggcgacgactcccgcgccgtcggcgtcacctggcacctcgattggaaggggcggccattcccattcagcaggggatgcagcttctaccgcctccagctggacgagaagcagcagcagctgcagatcgtgtatgggcgagactgcgtggagccagcagtgaagccaggggaatccgcgctgctcatcatcagggccgtcacttggatcttcgaacgctttccacgccttgcaaacatgctgtaactaactggcctttaattttgtatggtaactagtatttattttctcgttatgtgcactgtactttagcttataaaagaaattgaaagattgaagaatttggtgaac

SEQ ID NO: 20002 - DNA, 589 bp, Oryza sativa
  Clone ID: PAT_MRT4530_25409C.1
ttttcggtcgaggtgggaggagcgatcgagaactagtctcgagttttttttgtttttttttcaccggtgctgcttcaaccatcagcatccctcatacagatgaacaaattttatttccacaccaaaaggaagagcaacacatgataacagaagaatctgattgtcctttccaacccaagccaccaggtattagtaatcttttacataaagatcaaataaatgttcacttggtcgatcctttgaggcccaacggacaagggtagagttcaaaacttagaatgctaactaatatgattttccacagtgtatcaagctcccggctcccaggaaaagtccaaatattgcagcactaccaacggtggtctgtccaatgtatctgatcttcagcaagccagggaccttgtatctgatagcctcataagtcccatagacagcaccgacggccccgccgaccgcgccgccgatggcgaccccggcgccgacgcgcgccaagcagctgtcgctcctcgccatcgccgccgccgccgccgctcctcctctcctccgcctccgccgccgcctctcgcctacgctacggaatctcttctcc

SEQ ID NO: 20003 - DNA, 339 bp, Oryza sativa
  Clone ID: PAT_MRT4530_2540C.1
tctcctggcgcctacgccgcctcgagaaagaggagaaatcaagagcgcgggggtcgaagatgccggcgactccgacgagcatcgtgggccctcactgggcctcggtacccagatgtactccaacgccctgcggaagctgccctacatgcgccatacgtgggagcatgcggtgggaatggacctgggtgcacggttcgtcaaccagctggtgcagtgtgatgagaagctcaaggaggagtctcgaatgatgcttgcgcgtacaaagcaagccagcgagcgacgatactctgatgatgatgatgactagctatttatatataggtacgccagacaccacac

SEQ ID NO: 20004 - DNA, 282 bp, Oryza sativa
  Clone ID: PAT_MRT4530_25410C.1
atgacggttgtggcagttggaatggtcggaattgccctccaaccgtcattggggagtgatccatgccgtccagccaaaacctggatccaacggtaccaggggaggttcggtcaaaccaggggccggcccatcctggcccaaaatcggcaggtggcctcctgaacttctccactccgcagacttatgaattttggcccaattcaccgtgtcaattctgagttcttggcctattcatacataagtctggttctcgacatcgtccaattgatttatcgtctgagt

SEQ ID NO: 20005 - DNA, 579 bp, Oryza sativa
  Clone ID: PAT_MRT4530_25411C.1
ttacttgtctgcagttgagacttctgattgatggctcctgagtcctgaggagaccaaggaggcgaggacgcaagtaactgcattatttatgttcaacagtccaatttccaggcttccagctacacccctgtaaatgtatcgttctagttctagatctgtttgtacaatgaagtcgtaggtacgtggtacctcttcagcactttggatcaccttctccatctctttcttctccacctccagctccaccctctcccactggagcttgattgataaggcaccggcaagctcctcttcccccacaccagtgaactcctcctcagttcggacgagattcaccgtctggtcccacctctcatacacacataacgctttggagtctgtgttacagttggctataaatctacagctcggtttcttctctttcttctcttttcttctttttaataggcgatggccgatggggcggatggggagttcccatcttgctattctacccactaccgggatctcgtcccagactacgggcatgtttggagggtcgctggcaccgggcagcgcagcgcagcgcacgccgcatag

SEQ ID NO: 20006 - DNA, 247 bp, Oryza sativa
  Clone ID: PAT_MRT4530_25412C.1
atgataattaatttagaattccaaatgtctactgccctaaaggcataatcacaaaagccaagaaatctacacaatcttatttgaccttatattctgtttgtacattatgatccaagtatgtgggtttagtgctttctctgaatttgttaaggtggaaattttgtacatctttatcaggtgctgaatgttatgtaccctttactgctttaaagagttactctgttttgggccttttggcatctgtgag

SEQ ID NO: 20007 - DNA, 1195 bp, Oryza sativa
  Clone ID: PAT_MRT4530_25413C.1
ctctactgcctccttcggctgttcgctgctgcctcttttgtcttcttattgctgagatcccctcttcgccctccccggccgggccggccgggctctagggtttgggattttagccgccgccgccgccgccgccgctcacccgcgccttcgacgagctccagcccgtagacctcgccggatctccccgatggccgtgaccttcaccgacctccacaccgccgacgggctcaaagccctcgagcagcacctctccggcaagacctacgtctccggaaacgcgatcagcaaggacgacatcaaggtgttcgccgccgtgccatcaaagcctggagctgagttcccgaacgctgctcgctggtatgataccgtcgctgcggccctcgcttcaaggttccctggcaaggcagttggagtgaatctgcctggaggaggtgcggcatcgtctgctgcagcggctgcgccagctgctaaggatgctgatgaagatgatgatgacctggatctttttggtgatgagaccgaggaagacaagaaagcagcagatgagcgtgcagcttccaaggcctcttcaaagaagaaagaaagcggaaaatcatctgtcctgttggatgtcaaaccatgggacgacgagactgatatgaagaagttggaggaggctgtccgcagtgtgcagatggagggtctcacctggggagcatcaaagcttgtgcctgtgggttacgggatcaagaagttgcagatcatgttgaccattgttgatgacttggtgtctgtggatagccttatcgaagaacatctgactgaagagccgatcaacgaatttgtccagagctgcgacatcgttgcgttcaacaagatttaaaatatcaaaaggggatgttgctacttatccaaaaactgggactgggactggttgttctggaagcatttttcatcccatcttattatccttcacagaaatgctagtttgagtttatttttgagtgatgcctgtcattagtgcctcttatctttaagtagttgaactgcagagcggcttgtaatggcgaaacatatgctatgtcaaagtacatccgtccatttttactgtgcaagttttgatgagtaagcgtttcgttgagtaactttagaaaaaaaaaaacgacttgggaatcatggcaagacttcccgggaaattgtatccgtcaatcccaaa

SEQ ID NO: 20008 - DNA, 867 bp, Oryza sativa
  Clone ID: PAT_MRT4530_25414C.1
ccggccggacgccttgcactcccgccctaacccttcttccccgtaaccccacgggaaggcgatccatggcggcggcggcgggttggctccggcgagcggcagcggcggcggcggcgcctcgcctgccttcaggccttcctatactacctactccccctccagcccctctcacagaggcccaatcgttcgtgctcccgggcataggcaccgccgtcgccggcggcatggacctcatggccgttcccaagaaaaaggtctcaaaatacaagaagggtttgaggaatggaccgaaagcattgaagccggttccagtgattgtccgttgcaggtgctgtggccgagtgaagctgccccacttctactgctgtagcggagaaaaagggaaccccggcgactcaagctcataaacctgttctgtttctccccaagttcagtctgcactcagcacatcaagcaatgtctgaacactattccaccatgaacgttttcagatctcattttgtgttcggccgctgttctgttttcaagctttttaatcagtgtacacactttaaacccagcttggatttcaaaactccccttgtcaaaaactcaaatgccactcgtgacatgaatggatgcattctgtctgagacaagaaccaaatgtgtgcatgtgccttgctagaagaaagaaataaagggcctcatcttttttttcttaaaaaaaaattaaaaaactaaaatttaaattttcaaccttaaatttggagttgattttggggttttttaatcaaagtttatttttcagcccttgtttttagatagctaagaacacgtatataaaacaattaaagttgtattcacgaattatttttcgtttgccaat

SEQ ID NO: 20009 - DNA, 455 bp, Oryza sativa
  Clone ID: PAT_MRT4530_25415C.1
ggaaaagcccggaaatctggcaaagttccccaacagggcccggggaacaaaaaatatttgaaactagacttcaaaaacccccagcccgggcgcatggggctaacggagtcccccgccaaaatcattacccggaaaaaggaaactacggggcgagcccaacgggggggggcgaaaaaaattaagggcatccgggggggggcccccttaaggaaaaacttttccctggccttgggcttccccgggaaattggaccccaagaccccccccccccactttttcctgaccccggaaaaattgggggggaagttccccttgagggcccccaaaaacttggggaacccaagcttggccccgtttttgacagggggcaagcccaaaacaaaggcagtttttttgggaacaatcgacccaaggggagctttgcccttaacgatgcaaaaagggacccccatttt

SEQ ID NO: 20010 - DNA, 200 bp, Oryza sativa
  Clone ID: PAT_MRT4530_25416C.1
gtgtgttgtgtgtctgcacccctgtgcctgtagctgctctgtgtgtgtgtgtgtgcctgcccgcccctggtgttgtgaaaaccccgtcgacaaagataggatacgccaccaatgtggggtgcctgcgggatccaggtggcccccggggatatccgaatcgagtgaataagatttgtgtccaaaaaaaaaaaaaaaaaaaa

SEQ ID NO: 20011 - DNA, 804 bp, Oryza sativa
  Clone ID: PAT_MRT4530_25417C.1
tcctgcaaagaatcgccggcgatggcgatggtggcggcagcatcaccgttcccgttcgaatccacgccaccgatggccgcgacggcgacttcctcctcctcctcctcctcctcctcctcctcctcctcctcttcttcctcaaccacctcgtcgtggcaggcattttcaagggtgatacgcagctgggcatggaagaagttcatgactggatgtgtcatcttgctccccattgccatcacattctacaccacctggtggttcatccgcgtcgtcgacggcttcttctccccgatctacatccatctcggcatcaatgtcttcggtttggggtttgcgacgtcgatcaccttcatcttcctcgccggcgtgttcatgtcgtcgtggctgggagcatctcttctcggcctcggcgagctcttcatcaagaagacgccgctggttcggcacatctactcttcttcgaagcaaatcagcgctgcaatctcaccagaccagagctcacgggcgttcaaggaggtggtgatcatacgtcacccgaggataggcgagtacgcgctgggattcatcacgtcgacgctgacgctgcgcggcgccggcggcggccgggagctcgcctgcgtgtacgtgccgacgaacaacctctacctcggcgacatcttcctcatgagccgcgccgacgtcatcgtccccgacctctccgtccgcgaggccatcgagatcgtcctctccggcgggatgtcggtgccgcagatcatctcggcggtggagggggtcgtcgggctcggcggccatggccggccggtg

SEQ ID NO: 20012 - DNA, 684 bp, Oryza sativa
  Clone ID: PAT_MRT4530_25418C.1
atgtcgagaaccagacttatgtatgaatgggccaagaactcaaaaatgacacgacacactgggccaagtctatgaagaggaacacctaaggaggccaccagccaacttgtgggctggttgggccagcctagggttcggccgaacctatgccagcgccgatggatgtagggttttgagggaacggtggagattcactccctatggccattggagggatattagagaagtatctggtagtttaggcgtggtgtctagattacgggatatcattatttggggttatatattgcggatgagaggtgggccgctgatggtgacaactcagtacggtatttctgcaccattgctgggaattatatttctagtaatgtcgttaagaaataccaataagcatttttaagccgttgccggagaagatttataaaagagattacataactaatactttatattaaccaatgccctacgtgggagaatctcaagtttccagcagacaagagacgagtctattcccgaggcgtgggaacgactactggagtatgtggctgcctgtcctcatcatgggatggacgactggctgatcctgcagaacttctataatggactcactcccacgtcccgtgatcacctagacgcggcagctggaggagccttcttctctaagacgggcagaggagccgtcga

SEQ ID NO: 20013 - DNA, 164 bp, Oryza sativa
  Clone ID: PAT_MRT4530_25419C.1
atgatgcttgctgctgctgctgctgctgtggatgtgcgcccgtttgatccgtctcgccgtgttgcaaatcgcagcgatggagcgagctgtggactggacttctcacgtgtgatggggtcgctgcctggtgggccccactcgtcaggggtgggtggtgggcccac

SEQ ID NO: 20014 - DNA, 313 bp, Oryza sativa
  Clone ID: PAT_MRT4530_2541C.1
gggcattaaaacatctttttttggttaactaattattactgaaaaagctattacaacaaatgtctgaatgaacataagcaatagaacatgactcatatcatgactgttcagattaattgaagggatacgacattgctatttggcctttataaatcgctcatttgtaaatccctgaaataggctgattcttacaaggagaaccatacgaagctcaagcaccacagatagatggctattctgagctatcgtaaaacggctcataggaagcatctgagaccttaattacttaatgcgcatagcatgtttgtttttc

SEQ ID NO: 20015 - DNA, 2650 bp, Oryza sativa
  unsure (1)..(2650): unsure at all n locations
  Clone ID: PAT_MRT4530_25420C.1
atggcggcgtcgtcgtcccctcgccgccttgggttcttggccgctctcgtgttcgccgtctccgtctccgcctcggtctcctctgtgtccggcggaagcgggccgatcaccaccaatggcgggaactacaccagggtgtgcgacccggcgaggttcgcggcggcggggctggacatggccgggttcccgtactgcgacgcgtcgctgccgtacgcggaccgggtgcgggacctcgtggggcggatgacgctggaggagaaggtggccaacctcggcgaccgcgcgggcggcgcgccgcgcgtggggctgcctcggtacctgtggtggggggaggcgctgcacggcgtgtccgacgtcggccccggcgggacgtggtttggcgacgccgtgcccggcgccaccagcttcccgctcgtcatcaacagcgccgcgtcgttcaacgagacgctgtggcgcgccatcggcggcgtggtgtcgacggagatcagggccatgtacaacctgggccacgccgagctcacgtactggagccccaacatcaatgtcgtccgcgacccgcggtggggccgcgccagcgagacccccggcgaggaccccttcgtcgtcggccggtacgccgtcaacttcgtccgcggaatgcaggacatcgacggcgccaccaccgccgcatccgccgccgccgccaccgacgcgttctccaggcccatcaaggtgtccagctgctgcaagcactacgccgcgtacgacgtcgacgcgtggaacggcaccgaccggctgacgttcgacgcgcgcgtccaggagcgcgacatggtggagacgttcgagcggccgttcgagatgtgcatccgggacggcgacgccagctgcgtgatgtgctcctacaaccgcatcaacggcgtcccggcctgcgccgacgcgcgcctcctcacggagaccgtccgccgcgactggcagctccacggctacatcgtctccgactgcgactccgtccgcgtcatggtcagggacgccaagtggctcggctacaccggcgtcgaggccaccgccgccgccatgaaggccggcctggacctcgactgcggcatgttctgggagggcgtccacgacttcttcaccacctacggcgtcgacgccgtccggcaggggaagctcaaggagtccgccgtggacaacgcgctgaccaacctctaccttacactcatgaggctcggcttcttcgacggcatcccggagctcgagtccctcggcgccgccgacgtctgcaccgaggagcacaaggagctcgccgccgacgccgccaggcaggggatggtgctcctcaagaacgacgccgcgctgctcccgttgtcgccggagaaggtcaattcggtggcactgttcgggcagctgcaacacatcaatgccaccgacgtcatgcttggagactacagaggtaagccttgcagggtggtgacgccgtacgacggcgtacggaaggtggtcagctcgacgtcggtgcacgcatgcgacaagggatcgtgcgacacggcggccgcggcggcgaagacggtggacgcgaccatcgtcgtcgccggcctgaacatgagcgtggagagggagagcaacgacagggaagacctcctcctgccgtggagccaggccagctggatcaacgccgtcgccgaggcctcgccgtcgccgatcgtcctggtgatcatgtccgccggcggcgtcgacgtctccttcgcccaggacaaccccaagatcggcgccgtcgtctgggccggctaccccggcgaggaaggcggcacggccatcgccgacgtgctcttcggaaaatacaatccaggaggaagattgccgctgacgtggtacaagaacgagtacgtgagcaagatcccgatgacgtccatggcgctgcggccggacgccgagcacggctaccccggccggacctacaagttctacggcggcgccgacgtgctctacccgttcggccacggcctcagctacaccaacttcacctacgcgtcggccaccgccgccgccccggtcacggtcaaggtcggcgcgtgggagtactgcaagcagctcacctacaaggccggggtgtcctcgccgccggcgtgcccggccgtgaacgtggccagccacgcgtgccaggaggaggtcagcttcgccgtcacggtggccaacacgggcggcagggacggcacccacgtcgtgccgatgtacacggcgccgccggcggaggtggacggcgcgccgcggaagcagctggtggcgttccggcgggtgcgggtggccgcgggcgccgccgtcgaggtggccttcgcgctcaacgtgtgcaaggcgttcgcgatcgtcgaggagacggcgtacaccgtcgtgccgtcgggagtcagcagggtcctcgtcggagacgacgcgctgtcgctgtccttccctgttcagatcgacctgcaggcggcagcatagcagcataggttctctgcaattcttggagttcgttggattcttttgctggggtggtaaaaggtaaaaaaaaaatcgaancaagtgtaattagtttacaccacgctatagatgaaacttttacaaagcacattgcatcattgggaattaattggaacaggaattttnatttttaaaaaaaaaaaaaaaaaaaaaa

SEQ ID NO: 20016 - DNA, 296 bp, Oryza sativa
  unsure (1)..(296): unsure at all n locations
  Clone ID: PAT_MRT4530_25421C.1
ggccccagggaaaaagcaaacagtgttcaagctcgacgagaggcttgagctgcgaaaagaagaggaggagaaggagagggaggaaaagaggagaaagaggcccgagctggcggagcgcnaacgagccgagaaagaagctgccagccaggtcaagactgagtatggcgatgatgtgaggatagaaggcgagcatgaggaggacgacatgatggccatgatgggaatagccgggtttggaacctccaagcaaaagtagtggcatgaactggaaaaaaaaaaaaaaaaaaaaaaaaaaa

SEQ ID NO: 20017 - DNA, 849 bp, Oryza sativa
  Clone ID: PAT_MRT4530_25422C.1
atggcagctcggcggctcggcggcagcagcgcagcagcgcggctagggcggcatgtggcagcggcgactaggatgacgactcggctaagtacgacacacgggaacaaaaccctaaaaacaagagggaggttctcaccggggaacaaaataggcaagggaacacgacggcagcggcggcagtccggcggcaagcacaagatcgacgacgacggtggcgctagagaggacacagcggctagaataaccttgtccgatgataagtatcaagtgatcaaatcaccaagtgatatcaatctgaacaataatccttgtatctaccttggaagaacaaagaatggggtatactgcgcatcaattgatctcaaacaacatcagcgtcttcaggtttggcagctgcacgaactgcatggtggtggttaccacttggagtggatgttgatacacgatgtcagtcttgaccagatcatggcagatttccgctggaatcctgaagctgttaggccatggatcgaacatgatatgtattgcgatgacgccaagaatgatagagaaatatcacaagaggaatctactggttgggactctgaggatgatagcatcctttacactgaagatatgattacatctgttgtcgtgttatgcatttggtgtgttgctgcaaatcctggtgaccctggcattttcaagtcggcagagcatccaaaattgaacaaggatggaaggcgatcccagaaaaattcagatcatgggttaagtcaaggaggaaaaatgtcaagtgatggatttaatgctgtttataacagcgagaaattgagcaacatgcttgagctaaaagattcacattcctag

SEQ ID NO: 20018 - DNA, 595 bp, Oryza sativa
  unsure (1)..(595): unsure at all n locations
  Clone ID: PAT_MRT4530_25423C.1
cgaggatttggctgatgcatcagttgttcccaggaaggatgatgtaaaacctttatctgccgttgcaggatgcccacctaacaatagcaatggcacctaacaaacccacaccagggnactgaaacaaccaaaatcagggcacccaacagcactgggaaagtgttgagttcttcaatcattagtaaagaagcatctagccgaagagagaacaaaaatagtcaggcagcacctaatcagcagaaccaatctgctggtgatatcaagcatgacaaaagaaaatgggctcttgaggtcctggcaagaaaaaatgccatttctattacaagcaaagacaaatctgaagttgctgatgatctcaagggaaactaccctctcttagcacaacttcctgtcgatatgagaccacagctcacaactggccgtcacaataacgttcccctttcagttagacaggcacaactttaccgcattgcggagcattatctgcagaaaggcaaatttgtctggtcattcgcagatgtgcagatactgaattaggccattgctggatgctggtcaatggtagaaaagggtatttccgaaaggtctagtagca

SEQ ID NO: 20019 - DNA, 177 bp, Oryza sativa
  Clone ID: PAT_MRT4530_25424C.1
atgtcgagggactatagacgccggcggcaacggaggaagggggagaaggagatgcaagatcgagacacatctgattgctggagagtcgagaccaggggcggatctacggtgttcctaccagtgtcagctgacaccgacgcccttttgcaaatcctacacgatgctatttgtttttag

SEQ ID NO: 20020 - DNA, 243 bp, Oryza sativa
  Clone ID: PAT_MRT4530_25425C.1
acattattgatcattccgcaacattatgctgtcttgaagaaagcagaggaaggatggccaatatatcgcaatcaagacaaacgctaacgccttcgtcagccaccttgcagggaaaaactcagtattccgtgccttgccagttgatgtagtcgctaatggctatcctctcaagggagcaagccgagtctcagacacagggagaagagcacgtgttgcttactctagatttcacacattcatcag

SEQ ID NO: 20021 - DNA, 1311 bp, Oryza sativa
  Clone ID: PAT_MRT4530_25426C.1
atggcccaatcaactggccaggccgttcatcactccaacctgtatgcccgggacaacaaggatcagcgcacgtcgatgatcacatttgctccacctccatcgcggacgtccctacagccgtcaggcgtgcgtcccggcagcgatcgtccagatcgtatcctgctgaagctgtccaaggtctttgcttttgtggatttgggcaattcgatcccagtcaactactatcgagatcctgatggccgcattaaaagacgtcgaggaccaattaaattggcaaatgttgaaaatcttccagagggtgttaagattattgtcaaactggatcgtttcaacataccttgctcccagtctgctatagttcttggatcctatttaggaacacttgtcaggaagccacatctagctccactaaacattcttcaatggaatcataaactttataagagagtatatcatccaaaaatgatttctgaagtagagagaaagtttgcaattgatggaagagctaataattggaatctccaccagttagatggcaaatggaggcagtacaagtcaaaacttaaaaagggctattacaagcctaacttatctatggaacgagtattgcaaaccatgcccaaaactgttgctgaatctcaatgggccaccctagtctcttactggtactcagaggactctaagaaaatcagtgacaaaaacaaagagaatgcacaaaatattaagcatccacacacattaggaagaaagagttttgcaagaaagaggaaagagctagaagttaatggagtggaggtggaccgagcaaccttctttgatgaatgccataagacgaaagatggcagatatgttaacgatgctactgaagaaaaaatgaaaagagtggatggccaagaactcagtgaagctgattttgaacaaaatatattagaagtgtttggaaaggatcatagtggtagagttagaggcatgggtccaaccattactccaacaaactattatggtggaagattttcgaatatatcaggaagcagtgaagggagtagctccagtaatgtaaatggtttcattagttttatagtatcatatttggctgagaaatatccagaggataatttgatttctaggttgccaccatcacttgctagggtcattccaagacaagaggttgatcagaaccaaggaagtcagccaccaaatactgctacatcctctcttccatttgatcagaaccatggaaatcagctaccaaatactactccatcctctagtgctagagcatcatctcagtcttgcagtgaagaagagtga

SEQ ID NO: 20022 - DNA, 1116 bp, Oryza sativa
  Clone ID: PAT_MRT4530_25427C.1
atggctgctggggcgtgcctagccgtgcctgggccgggctatgccgggcgggccctttggccatctatagcgtccctcagtggtcgtccagatcacatttgctccaccttggtcgtgtggacgtccctacagctagccgtcaggcagtgcgtcccggcagcgatcgtccagatatcgtatcctgctgaagctgtccaagatgtgaacggcattgatgcatcgtgcaaatggcaacatttttttaaatatagtgcaaatggcaacaaggtcccaaagattacaaggcttggagcttttggagaatggagtacaaaatcaagaactgatcctgatagccgcattaaaagacgtcgaggaccaactaaattggcaaatgttgaaaatcttccagagggtgttaagattattgacaaactggatcgtttcaatgtaccttgctcccaatctgctatagttcttggatcctatttaggaacacttgtcaggaagccatatctaactccactgaacattcttcaatggaatcataaactttataagagagtatattattcaaaaatgatttctgaagtagagagaaagtttgcaattgatggaagagctaataattggattctccaccagttagatggcaaattgagacagtacaagtcaaaactgaaaaagggctattacaagcctaacttacctatggaacgagcattgcaaactgtgcccaaaactgttgctgaatctcaatgggccaccctagtttcttactggtactcagaggattctaagaatgaagtatatatgaaattggctgagaaaagagtggatggccaagaagtcagtgtagctgattttgaacaaactatgttagaagtgtttggacaggatcgtagtggtagagttagaggcatgggtccaaccattattccaacaaactattatggtggaagattttcgaatatattaggaagcagtgaagggagtagctccagtaatgtaaatggtttcattagttttatagtatcatatttgactgagaaatatccagaggataatttgatttctaggttaccaccatcagttgctagggtcattccaagacaagaggttgatcagaaccaataa

SEQ ID NO: 20023 - DNA, 1236 bp, Oryza sativa
  Clone ID: PAT_MRT4530_25428C.1
atggagcatgcagcattgcagcggcagaggagccgttgcccagcgcgtccctcagtggtcgtccagatcacatttgctccacctcggtcgcgcggacgtccctacagccgtcaggcagtgcgtcccggtagcgatcgtccagatcgtatcctgctgaagctgtccaagtgtgcacaccaattgtttgatgattgttctacacaagcaagtccagaaagagtgcaaatgataacaaggtcccaaagattacaaggcttggagcttttggagaatggagtacaaaatcaagaattggtcccaaatgatcattatgttgaaaaacagaacataacaaacgcagattggcgcacaaattgctatgagtattatcctgatggccgcattaaaagatgtcgaggaccaactaaattggcaaatattgaaaatcttccagagggtgttaagattattgtcaaactggatcgtttcaatataccttgctcccaatctgctatagttcttggatcctatttaggaacacttgtcaggaagccacatctagctccactgaacattcttcaatggaatcataaactttataagagagcatatcatccaaaaatgatttctgaagtagagttagatggcaaatggaggcagtacaagtcaaaactgaaaaggggctattacaagcctaacttacctatggaacgagtattgcaaaccgtgcccaaaattgttgctaaatctcaatgggccaccctagtttcttactggtacttagaggactctaagaatgaagtatatatgaaattggctgagaaaagagtggattgccaagaactcagtgaagctgattttgaacaagctatgttagaagtgcttggaaaggatcataggggtagagttagaggcatgggtccaaccattactccaacaaactattatggtagaagatttttgaatatatcaggaagcaatgaagggaatggctccagtaatgtaaatggtttcattagttttatagtatcatatttgactgagaaatatccagaggataatttgatttctaggttgccaccatcagttgctagggtcattccaagacaagaggttgatcagaatgaaggaagtcagccaccaaatactgctacatcctctcttccatttgatcagaaccatgaaaatcagctaccaaatactactccatcctctagtgctagagcatcatctcagtcttgcagtgaagaagagtga

SEQ ID NO: 20024 - DNA, 307 bp, Oryza sativa
  Clone ID: PAT_MRT4530_25429C.1
ctctgcctcttgcgtaagccaacccagcaaattccttttgtcgctgaattacaggctgcagatgaatgcgatgttttaacccaacgactgatatgaagatttattttgctgtatcaatctcttgatgcatggttctattaaaaaaatggtctatttacttgcacgagctgcactaatcactagttagtattgctcaaaatgttatcaattttatgagaggaaatatgttactaatttgtgacgatgcagcatcttcaacgaagagtgccaaccacaacgaggcatcataggcaggaaacaatggaag

SEQ ID NO: 20025 - DNA, 1350 bp, Oryza sativa
  Clone ID: PAT_MRT4530_2542C.1
atggcggcgaggacacccaagcgcaacgccacgccatgccgcgacgacgccgacaaggccggctcgaacccacaggagcaggagagcaattctgcccccgagctctcgctgtcggagatgaaggatctccagaacgagaacgtggaggtgtcgttgtgttttggctccgcagacgagctcggcctcgacgacgaactagctggacacgtttccgacgtcgatgccgaacgacgtggtgcgccgtgcgccgtgcgtcacgaccggctacggaccgtggcagccagccagggcgatgaggcactcgctgcacctgcgcggcgcgacggcatgctgctcgatcgccctcttcagaggcggcggcggaacggcgaggagacgcgagcgccacgccatgccaagctatgccacgccgacgccgtgtcatctcgtctgaggttgctgctgccgtcgccggcctggatgaggtggcggaggcggagacgtgcaccacaagacaagaatggcccccacattactggtgggctcggaccggacaacccaaccagattccgccacctccctcagctcctggctggcctggaaatttcgatgccccaagaggttttctcaaaatttggccgctggaagcctccgccaccgccgccgacggcggaggcgacgaacgcgacccgtggtcgtattcacaagatggaatcgcggacacggcggggacgaggactacggggacgcggcggggacaacgactgtggcggcgcggcgaggacgatgactgcggtggcacagatagcggcggggcgcggcggctcccctccctccctccctcgcagatctggccagaggagggagtatcggccaggaggattgtctcaacctcagtacctgccacaatacaatcagctggatcaaatacaaaagcagatccaaggagcacctcagcaaaggtcgtgggcaaacatgatagccgatgtgatgagggaacaatttgggctcaagcctaaagacagtggaaacttgtatcgacatccctacccggagcattttgagagagtgccattaccaaaccgatacaaggtccctgatttttcgacgttcttaggacaagacaatgtatcaacctacgagcatgtaagccgattcctggcccagtgcggagaggcatcagctaccgacgctttgagagtcaggctatcctctatctctatcgggatcggccttcacatgggtctattggcacctataagtgagaagtttgcggcccaagaatttgatagtttggcccacttagctcaaaaggatcaaaacatctggcacgctcagaacccgaaggcaaatttcctggacatgcactag

SEQ ID NO: 20026 - DNA, 312 bp, Oryza sativa
  Clone ID: PAT_MRT4530_25430C.1
atggagcaagcctccacctccagcggctgttggcgccgttgccagatcgggacagctcacactagcattacaagaagatcaacgccattaccagtatgcctggcattacctgccggctgccgccgtgcttcggagtggatggttcgccgcgcccggcagcgcgttggtgagggtgtgaggctggataatggattggctgatagggactggtacttaccgtccaccattcacgctgtcggcaccatctcctccggcgttgtcgacgtcggccttgagcccaccctacgagagccgcttcatctctctgcttag

SEQ ID NO: 20027 - DNA, 4293 bp, Oryza sativa
  Clone ID: PAT_MRT4530_25431C.1
atgtcggaagacagcacaaccatggctgatttggccaagacacttgttctcttgatgaagaaacttgataaccttgaggctcggcaagattcatgggaaaaagggagcagtggtgctaatctggatgatgacaaacgtggtgttccccgttatcacaagctaacctttccaatatttgatggagaagaagatcacttgacctggcttaatcggtgtgagcaattctttcaaggccaacggacgcctgaggatgagaaggtctggcttgcttcctatcacatgacgggtgaggcgcaacaatggtatattcaattttccaaagataatggactcgtgaactggtcagtttttgagcactttgttaatatgcgctttggtcctcccatccgtaacaatattcttggtgaattgtccgcacttcgacgaaccgggactgtggcagaataccaaaaacaatttttggctcttctttgtcgtgttaccccatctctcaatccgatgcatcaagtcaatcttttcactgccggccttggcaagcctttaagtattgatgttgagcttcaaaatacagctaatcttcaggccgccatgagcttggcacgctcttatgagcagcggttggaagatgatgcagtcgctgctccacgtatcgtggagaataaacagcgttctgcactttcttttcgttctgctccagcaccttcccgtgtgggtagtagcacgtcttcttctgctgcgattgttgcttccaaatcacctacaaggccaggtactacaggcacaaggtttcgtcgcttgttagcagctgagatggctgagcgtcgtgaaaaggggctttgcttcaattgtcccgagaaattctctaaagatcatcaccgtcagtgctctatgaaaggtatctacctcttggagatggacgagggggaggacgatgatagtatcaatgatgacaccgttaccatctctcttcatgcattgaccggcatccgtactagcaagaccatgcgcttggctgttattattggaggtgtaaccatgtctgctttggtcgattccggatctacccacacttttgtggctactgaggcagcacaccgtcttggcctctcgcctaccacaaaatctggactgaacgttatggtagcaaatggtgatcaagtcactagctcaagcatctgctcaggtattcctataaaaattgactcggaggatttcatcaccgattgttatgttattccactagtaggctataatgtggtattgggtgttcagtggctccgtacattgggacccatcttgtgggattttgataagctcaccatgtctttttggagggacgatcatcaagtagcttggcatggtcatggtggtgattcttttccgccgcaggctcatgctttgactggacgtgacttattgcctgagttgctgcaagaatttgatgatctttttaatgagccaagtggactaccaccagaaagaagtcatgatcatcgtattcctttgatttctgacacagcagcggtggctgttcgtccttaccgttatccacaactcctgaaggatgagattgaatgacaatgtgctgcaatgttgacccaaggtatcatccagaaaagtgattccgaattttcttctccagtattacttgtcaagaagcaagataaaacttggcgtttttgtgtggattaccgagcccttaatagcaaaacgataaagaacaaatatccaattccggtggtggatgatcttcttgatgagctcaaaggggctcgcttcttcaccaaactggatttgcgtagtggttatcatcaagttcgcatgcatcctgatgacgtcaaaaaaacggctttccgaacccaccatggccattatgaattcttggtgatggcctttggattaactaacgctccagcaacgtttcaggccttaatgaatgacatattggctcccttcctacgacggtttgtccttgtattttttgatgacattttgatatatagttcttcttgggcagaacatcttcaacatgttagagcagttttgttggtgttacaagaacaccaaatggtgcttaaatgatccaagtgtctctttggtgaagaaaaggtgacttatctcggacacattgtttctgcaagtggggtggccatggatcctagcaaggtagaggctgttgcggagtggcctcaacctcgcactgtgcgcgctcttcgtggattcttaggcctcactggttactaccgaaagttcattgatggctatggtgccatagcatctcctcttaccaagcttctgaagaaggaagggttcacatggtcctctgaggcccatggtgcttttctagcgctaaagaaggccttagtatctgcttccttgctacaacttctggattttactaaacgatttattattgattgtgatgcctctggtgtgggttttggtgctgttttacaccagggagcaggaccaattgctttctttagtcgtgcagtggctcctcatcatgcgaagcttgcagcttatgagagagaattgattggacttgtaaaagctgttcgtcattggcgaccttatgtttggggacgatcctttacgattcgtacagatcattatagcttgaaatttcttcttgatcagcggctgtctactattccacagcatacttgggtcagtaagttattcgggtatgactttgaagttgagttccggccaggaaaacacaatggagctgctgatgctttatctcgtcgtgaagaatcagcagaattacacgctatttctggcccatcttttgaaatatttgatttattgcgacaagagaccaacacactgctagaactcattaccaaaagggatcagattcaggctggtttacttacgacaggttggtctttagtggatggtttggtcacctttgagggcaagatttatgttcctacagcttctgcatgttggcccttgctcttggctgatgcgcacgggatgggacatgagggaattcagaagactctccatcgcctacgtgcatcattttacaatcctcatgccagttcattagtgaaggattatgttaagagctactcggtatgtcaacaaaacaagactgaacatcgacatcctgcaggcttactgcaacctttagtagttccttctgctgtttgggaggatatttcaatggatttcattgagggtcttcctcgtgttcgagggaagtcagtcattttgacggtggttgattgtttttctaagtatgcccactttattgctttaggacatccatacacggctctctcagtcgcaaaggcattttatgatgatatcgtccgcttgcacggtatttcttgttctattgtgagtgatagagatctagtttttactagcacattttggaaggaactatttcgcttcactaatacaaagttaaatatgagcacagccttccatccgcaaactgatggtcaatctgaggtggttaatcgcatcatcactatgtatcttcgttgcctttcgggagatcatccaaagaattggttacagtggcttccatgggctgagttttgctataactcttcctatcaaacttcccttcgtgagacacctttcaaggttgtgtatggtcgagatcctcctactatttctgcttaccagccagggtcttcctgtgttgtggctgtggacaaatagatgaggagtcgaaatggatttttggttgaaattcgagagagacttcttcaagctcaggactatatgaagagttggtatgataaatctcatcgcgacattgaatttgaggttggtgaataggcatggctacggttacaccatcgcatggcagctggtattacagaccaagcacactctaaacttgccccaagattttatggcccttgtttaattgaggagagaattggtcatgctgcttatcgcctcaagcttcctcctcgagctcttattcacaatgtttttcatgtggctttactaaaaaaaattgaaggtgtggccccaacagatattgttcaggttcctgacattgttcatggccaggttatccctgcaccagctgctgctatcaaagctaggtggaatcaaggaattcaagaagttatcatacaatgggtaggttcatctccagaggaggctagctgggaaacgctggaccattttcgcgaagcttatcccagtttccagctcgaggacgagctgtttcatgaggaggagggaaatgttatagaccggcgttatggaatcaaataccataggtataggaataggaataggaataatcagtag

SEQ ID NO: 20028 - DNA, 348 bp, Oryza sativa
  unsure (1)..(348): unsure at all n locations
  Clone ID: PAT_MRT4530_25432C.1
gcgtccncccacccgttcgggaaggggaagaggagagatctatatcggagagatccatccatgggggggcgagccctgagcagggagagccgttccatgaacgtgcaataggtgccggggtacctgaagccgctgctgacctggcataacaagaagaatagcagcgaccagaccttccaccgctacatcgacatggacatggagaccagctcggcggaactcttcttccgactgatctacagtcttatggcctgattcaaccttataaacctgcccaaggagcgccggcacctatgccacctcgaggagctcgaaaagccggacacctccaacgcgcgccaccactag

SEQ ID NO: 20029 - DNA, 687 bp, Oryza sativa
  Clone ID: PAT_MRT4530_25433C.1
tcttgtttttcattcacagaataaagagcaatattttggcatatgtatggctttggttactttgatatctcaggcttgctgtgacatcttctttgctatgagcaagttgagctggtttacctctaacccgggagatgatcactggcgtgctcttgagcgagtgatgcaccatttaaaaggtactatggacttggagcttcactatactgggtatcccgcggtactggagggatatagcagttctaattggttctctgatgtggatgagatcaaagctattagtggatatgttttcacactaggtggtgctgctattacatggaggtcttgtaagcagactattttgacgaggtcaaccatcgaagcagagctgacggcactagatactgctgctgttgaggtagaatggctgcgtgatctattgatggatatgcttgtggttgaaataccggggccggctattcttatgaattgtgacaatcaaatggtaattttcaaagtgaatagttctaaggataacatgaaatcgtttagacatgtgaaatgacgattgaagtcattcaggaatttgagaaactttggggttataacattgaattacatccaaacctggcagatcccttcacgaagggactatgacgaaatatgatagacaatgcatcgaaggagatgggtttgagacccatg

SEQ ID NO: 20030 - DNA, 761 bp, Oryza sativa
  Clone ID: PAT_MRT4530_25434C.1
agggagagagagaactagtctcctgctggaccctgcgaaaatgaatttaatttccttctaatactggttgatgaacatagttggagagtatcaatttgggtctttaataattaacatcttctgctgagttacaaactcagagctcaggtattgtcacataaacattcttcatggatggaccaaaacttatggttacataacatgtctccatggaaaaataggctcaggaattaatttacaacagaggatacaacaaactcatggcaactgtacacttggcttgtgcagtctgcacccctacagattctgaggtttccttggtgttggggatcttccttccattgtttgcagcctttgcttcagatggaacacttcaacctggagctggaaggccctcgtgcgttctcctgctaaaactccgcgagtagagtgaagctccttctgggtttcatccatgacagccttcaagaacgccacctcgcgttcgaggcgcacattgtcagcatggacggtgtttgagaggctgtttgattcttcttgcgccagctctaatcctgtcaccttctccttcagcgtctcgacctccctgtccttctcagacaacctcttctctagctcctccttgctgtcgatgaccaaagagaggttcttctccgcttcatctttgcttgccattgccgctgaaagttgctcttccaatgccatgttcctcctgatcaggtttgctattttggtgtcatactgatggttaatgtccgatg

SEQ ID NO: 20031 - DNA, 687 bp, Oryza sativa
  Clone ID: PAT_MRT4530_25435C.1
gaaagttgactaggaaacgcgacatccaattacaagttcacaacatgttgcgaaggataaaacattttgtctgtacaccttggtgttcagctcttactatatgacccctgcatcaaaatattgtagctgtgtccctgaccatgatcccttgagctagtgagcatggttgtgttatatatatactgtagatccacagaacaagtgtgggatttgcatactactttgtggttttgtggtgatatgtgtgcaaagtaccttcagattatacgtagttttctcctattggagtcactaaaactgtatgtatgttaatagaagtgtaatttgtttctacagtaggtagtttgcctctatcagagctgctcagatgtgcacgtatctgaatagcagtggcatatacgtttgtcactagatcgaaaaaaaggaatggttgaagagaaaagagatcttaaacagtgcccgtagacttaataagcaaatatctggatttatgttattaaaatatatctaccagtatgtgagaaccctaagatcggatagataagaaagggcaaagcaggagttgtcgatggcacacgagaatccagtaggaataggaataggagctgtcgattggtaaaagaaattagcacaaagtaagcaacttagatgatataggcatgcaacaggataagattaggagatagc

SEQ ID NO: 20032 - DNA, 174 bp, Oryza sativa
  Clone ID: PAT_MRT4530_25436C.1
atgggcacacccagtgcaatttttctaggtccgccactaggtggggtcgatgtcgatcatggaggtgggaggcacggcagtgatggtggaagacggaggccagtcagcacgccggtggcgatgacggtgatggcgctgatgttggcaaaggtggtgggtggcaatgttggctag

SEQ ID NO: 20033 - DNA, 1809 bp, Oryza sativa
  Clone ID: PAT_MRT4530_25437C.1
atggtggtgatcgtccccatcaatggcgacggcgacggggagggcggtagcggcacgttcgtcgccgacaaccccccggaccctgcccccgctcccatggacatcgacgacgacggcgacgggcgcgaccgcggcggacaaggcgatagccccgcgacgcaggatctcctcagcaagttgaacggcagcggcggagaaggcgacagccccgcgacgcaggatctcctcagcaagttgaacggcagcggcggagaaggcgatagcgctgcggctgcgcgcgtccccggcggcgaaggcgatagcgccccgctctccctggcgctgggtctccacctccacgtccacggcgacggaggcggccgagacggagtggaccgcatcagcaatctccccaacgacaccctcgccttcatcctgggccaactcggggacacccgcaacgccgccgtgaccagcgtcctctccaggcgctggatcaacctctggacccaggtcgacatcctcatcttgcgctacgacaagccccccgactccagattcgtgcaggaagctctcgccgcccacgcccacgcgacggagggttccgagaccacggccatccgcctgctcgaggtcatctccctcaacagagccacgccggaggccacggccgcctggctccgcgtcgccgcgccccgcctcaccggcgagctctacttccgcaacaggtcctcggctccgttcgaagctctcgaccttgaggtgttctcgatactgtatgaggctgtcgtggagcaggagatgatctggtcgagtagctggttccagctgccctgcctcacggaggtcaccaagatcacgctgagcctggggttcctcggcctctcgctgccacagtcgggctccttcggcaagctcagggagctgcacctggagcacgtccggttcaatggcgactacaccctcgacgatgccatgctccccctcttggaatatttaggcattcgcaggtccaatggcttggcctccctgacgctcaggctggaatctctgggctggatgggactgtacgatgtggtggggattcgtcggctcgacgccgtggtgcctggactcaaggccttgtgttcggtcggatgcttctgctatcatgatgtggacagcgtcagcattgtcgcggaggagctggaggagatcgagtgggaggatttttactctccacaatcgttcaacttcaacgacttgccgctgctgacgatgatacacacccactgtgttttttgttctgaatcgaacgaggctttcatcgaaggatactatcagcttcttctcaatcgctatccaagaattagccatcttgacctgcgttttgtgattgaactaattcgagatgaaaaaagcgttacggattcgatgatagacaatatccaactcccttacattaggatgttgaacctagctttgaaaacagaaggccatgtttatggagctagtgtgttgcatattctcacaaagcgtactactatagcagagctgaggctggtgaaccaagaaaaattcaagtctgatgatgcatgtaagctggagtgcatctgtgatgggccaccagattggagagaaacggacatttcgatgaggtatctgaggaaagtagagatcctcaacttcagaggggaggaacatgagcttgacctcctgagggtcttagtcagggtagcaccagcactgaggatgatcagaataatctgccaccgttcgtgcgctgcttgggagacactatctgcacatatacgaggttttgcaagagaagcgacttctgtggaaagctga

SEQ ID NO: 20034 - DNA, 333 bp, Oryza sativa
  Clone ID: PAT_MRT4530_25438C.1
atggagactgccctcgccgccaacacatgcttcagcgaggatagggtgaggattgaggaactagaaagccatatgacatgtgggccctacaaatttttgagccgggcgcggcagaacgcgatgcggtcgggcctggtggtgctgggcgccgccgccttcggctacctctccttccgcgtcggcttcaagccctacctcgaccgcgcccaggaggccatggacgacaccacccaccacggctccgcctccggtgccgccgcccagcctgaccacgccggggaagaagacgacgtcgcgacgtccaaggacccggccgtcgtgctccgcgactga

SEQ ID NO: 20035 - DNA, 498 bp, Oryza sativa
  Clone ID: PAT_MRT4530_25439C.1
ccctttctttctcaaaagagcagcgtcgcctctccggctgcgctctatcagctacgctgggggaacccaatagaagctcccgctcccccccccttccgctccaatggctaaggaacccatgcaccagctccacaccggagccgcaagacaaaacggatatgctcttgcccccatgattgctaggggagaagacgtctggacgcctgcccaagcctgttcttctacacatgcttgacattccacacacctacatgaagctcttaatggccttaagatggaactgggtgatgctgcatgcccccttttgaagggaatcgtcgcaacaaccgatgctgtggaggccagcactggtggaaacgttgcgggcatcgttggcagggagaccaggaaggagggaaagcaaaggaaggaccacatgacaaaaaacggctccatctacatatcccaagctgatgttcttagacgctcatgcagtctctaaccgcaaggttctggcaa

SEQ ID NO: 20036 - DNA, 289 bp, Oryza sativa
  Clone ID: PAT_MRT4530_2543C.1
caaaaacaaaataatgtactttttttccacagctcatacaaatctacaccaccaaaagtttcacaactctgcctcccacgccattccgatctgtaatttatgccaaccgtaaaaacttaaacatcaacactaacatcaaattaactacaaacaaccttaaaacagttttatcaccattttcatctagacatactataaaacattcacactccttaaatgctctctatttttcaaatttgcgttgctataccctttctaattttagcatttttattaacatttcattccc

SEQ ID NO: 20037 - DNA, 800 bp, Oryza sativa
  Clone ID: PAT_MRT4530_25440C.1
ccggccggggccttcctctccggccaccgccgctccgctccctcaccaactcaatctcgagctctccgcggcgaaaagctagggtttcctctcaccaagccggcaagcccggttcctccttcccccacgcggcgatgaagaacgcgccgagatatcgatttgggggcgccgggttcctggagctcgagcgaggctaccagccgtgggtgatccccaagtccgaggcgcgaggcggagccggccacgccgtgaagaaggtgaagcgctggctgaggaagatggacgagcagatggactacgagttctacgactggaacctccgctcctaccgcttcaagtcgcccttcgatcgccgcccgctcgtcggcccccgtgagcgctgcaggaaaaacgccgcgaagcgcaccctccgtttggtcgggctcaccgacccggactacctgcttcagtgtgaggacgctgcatttggtgattgggaggacagctgtgaggacgaggatgaggtcttcgagtggtagtaccatcagcaaaccaacagatcgagcaagggagtaagtagtacagttggaggatggcctttgtctcaagaagttggacgcacatatctgacaagtagtagcagtagtggtagtatgttttgagtaccagaaacttcctgctgagagagagagcgtcggtctgtaataatagtttttgcactctccgttcccaaatcctatctcatcacgtattcgcaatgtgacaatgtcggatatttcacccaatattatctgcagaaaagaacttttttcgtctcattc

SEQ ID NO: 20038 - DNA, 644 bp, Oryza sativa
  unsure (1)..(644): unsure at all n locations
  Clone ID: PAT_MRT4530_25441C.1
actttttgtcataccgaacaaccttcaccaccgaactcgaagtttcagtctccgcccaacctgcggttaaagtgattgatttctcttgttctcgtcgactccaaacaaaccacattcaaaatgaagcaccttgcagcttaccttcttctcggcctcggaggcaacacctccccctctgccgccgatgtcaaggccgtccttacctcagtcggtattgacgctgacgaggaccgcctgaacaagcttatctctgagctcgagggcaaggacatccagcagctcatcgctgagggttccgagaagctcgcttccgttccttctggtggtgccggtggcgcttccggtggtgctgccgccgctggtggtgccgctgaggaggccaagtaggaggagaaggaagaggagaaggaggagtccgacggggatatgggcttcggtctcttcgactaagcgatctctgtctagagattcgcaaagtaacgatacctcacgaatttcgaagatgctacgcacgggttgttcaccagttcttacgcgtcttatgcgtggatggattggccggtcatggctggactgtgtttctctaaggaagggataacatacggntatggaaaataaaaaaaaaaaggcggntcggctcttgc

SEQ ID NO: 20039 - DNA, 1771 bp, Oryza sativa
  Clone ID: PAT_MRT4530_25442C.1
atgtcgggtgccaaggttcccccttgcaacgacaaccccaagctcatggcatatgttgaatattacagtccaacaggtgctattatcgcactgccagttacaataaccacgacagcatcatgtatctactggagttttaagaaaagagagagaaatagaaaaagagctgaattgttcaagaagaatggtggcttgctgctgcagcaaagatttgctgcattcacttcccaaggcatgatggacttgtcagcaaggctatttggtgcagaagaactcaaggttgctaccgacaactacagtgaaaatcgaattcttgggccgaggtgggctgaggtatacaaaggcattctccgcaataagaattccacagtgttcacagtgttcaatgagagccaggtggaacaattcgtcaatgaaatttctatcctgtcacaaattgaccacccgaatgtggtcaagctcttaggttgctgcctagagacacaagtgccactgtttgactcatatgacaattgttcaaggaacaattggataccttacagccagctcacagagaagagtgatgtttatagcattggagttgttcttgcagagttactgactacagagaagccagtatcatttgccaggccagaggatttgcgcaagctagccatgtactatttggtaatgttggtcaacaaaggttgcatacttcaagcagtaaaaccaatcattttggcagaagccagagaagagcaactatatgatgttgcacacctctcaattatgtgcttgagtctgaagggagaacaatcaacaatgaaggaggtggcatcagttcttaatgggctgagaaggtcactggccaaggacaaagctatcaaaggaaaagaagtgtacccacaaaataagaatgaagaagaggaatacctgcttcctggatcaggggacgcggttagcagagtctccaccgcccagatcctccactcgtccggctacaccgcggcggagccagccgccctccgcgccctctccgacatcgccgggcgctacgttgcctccctgggccgcgcggcctcggccatcgccgaggcccgcggccgcacggagcccaacctcgcggacctcaccctcgcgctcgaggaccacgcgctcggcgggttccccggcgcgtccgaccccgcccgccccgtcctccgctccggcgcgctctcggagctcgctggcttcgtccgcgtggtgcgggaggtgccgttcccgaagcccgtgccgcggaggggaggggccccacgcggcaaggcgtgggagagcttcgcggcggcggggaaggagcctccgccgaagcacgtgccgcggtggctcccgcgctttcccgacaagccggagccggagcccgaaccaaaggcggcgtacgacgaggcgacggcgaggtgggaggcgcgcgttcgccacgaggaggaggcgaatgcagaagaagcggtggtattgaagccgagcgttgatggcggcggggagcgcaggggagtagtaccggagaagagggggaaagtgagcttccgcgtgcgggcggagaggaagaagcggcgggtgggattggaccagcagtgaggcggtggcttcgaacggttcgcggagaatcgagaaaaatccgcggcaatagtgcgggcggcgagtcaacacccgctcggccgtggccgtggagaatggagatggacgacacgccgcggcgttgcccggtgaccctttccagtcgacgggttgaagaagacttgacgagttttgggctctg

SEQ ID NO: 20040 - DNA, 319 bp, Oryza sativa
  Clone ID: PAT_MRT4530_25443C.1
ttttaggtctttcacattcttttgaatatgttgtatctaatgatgaattacactatgcttggtagaggatagttgctgttagttaataactttcaataatccagagaattaaattgataacattaaattttagagtaataactgttttttccaactttgtatggtctaatatatgtccatattaaacttcactttaaaatttaaacctattcggtttctcttcttccctctgtctccctacttcttcctatagcctctcatttttgtgtgattctctcatttccttcaaaatctgcatgattcagtctgaggtatatat

SEQ ID NO: 20041 - DNA, 396 bp, Oryza sativa
  Clone ID: PAT_MRT4530_25444C.1
tcaactgcaggtatgccagtgtcccgacggtcgggaggatcaagtttatgcaacgttagcaatgggaggaggataagatgcatgcaagtgtgtcctattgagggcatctaaaagttgaggaccttctgatacatgtcacggatcaccgtggaggaccttgtgaaccatatctagtgcctgctacggtccaagtgggtgccctggctaacgataaatacggtcggatttacgtaccgtgagaacgacaccatgcggcggatactacatatggcaggtactggaccatgtggaagctgtcaatgttctggtgcactgacacaacgcaggcgctgaaggagctcgagcgaggcaaagaatgcgaacactgatgcattctgccgtataataggtttatac

SEQ ID NO: 20042 - DNA, 654 bp, Oryza sativa
  Clone ID: PAT_MRT4530_25445C.1
atggcggcgctaggtcacacgacgctagggctcttccgacggcgagagacgaaggcgagggtggcgacgggtagcggtgggcttggggatccttttataggggttggagggcgacggcgaaggcccacggcgaccggcgacgcgaaggaaacattggggttcggaggaaagagaccgatccgattcgacctcgaatccacgaatttccaaagcgatttagatgatgattccaaaagagaaaaggtagaggagatcccgaagatcatttcccctctattgatttcaccggatcgggaaaggagcggccggatttggaaggagacgacggcggcgcccgtcgtcgtcgtcaaggcggcggacatcgtcgaggcagcggacatcgtcgtcgtctccgcggcgaacgtccccgccgccagctgcctcctcaccgccatccaccaccacccgctccacccctcgccgctacccctcgccacgttgctcctgggccacctcctcttgtgccgccgcgcttgtgaggccacctccatcgtccgttggctctgccgcccggactcgccctggcggcccaacagtgccaccttcaccttcaccatcacggcgggcgggcttgacggcgacgatggtgaccggcgaggcggcgaccctaaatga

SEQ ID NO: 20043 - DNA, 811 bp, Oryza sativa
  unsure (1)..(811): unsure at all n locations
  Clone ID: PAT_MRT4530_25446C.1
ccggccgggcgcagcctcgcgcccgccgccgccgcatcctcgcctcctccagccaccgccgccgccatcgtcgcctcttccgcgatggacgtaagccgccgccgccacaggccacttcttctctccctcttctccccactcgatgcaggttcttgcacaggggccgccagatccggtagaagatggtggtcggagcagtggggtgtggggatggcggaggtcggggagaagaacgaaggagaaggagcacggcgccacaatcatggctgggtttttttatttgcgccctcctcgctcgctcaatttgaatctcctctccgttctcttctcaggaatggtcagttcgtcattgtttattttcttgatgttcctgtttcctaacactatgaagggatgagtgacaattttaactttcaaggatcaattatgcaactagaaatattgtgatcggaaggagttccaggccagggcactgtgatttgcttctaaacagacattatggctttcaagcatcaaaacaaaggctcattcattctctatgcatgaaaatgattggtccgtattttcaaccatactaagatgctctcagtgaccttaagaggttcaaatggcaacagtgaacaagctngaattacaganatgccggcttcccaattcttagtgaatgtaacaagccttttaacttcttcagttaatcaggaccaagtgcagctttggtagttttcttggattggccatcaagaatcacatgcacattcgcgtatgcatgtgggagtccaaaacaatgttgcatgattacgtaccgatctct

SEQ ID NO: 20044 - DNA, 342 bp, Oryza sativa
  Clone ID: PAT_MRT4530_25447C.1
atgggcaagggcaggagtggcggagtggtcgacgagaccagtggcgacgccatgtcgccccctctttcatccccctctgctcgactgattcgtagcggcggcgcaagtgagggctggagcggcgacggtaggacgggcaagggcaggagtggcggagtagtcgatgagaccggtggcgacgtcatgatgggcgaggacaggagcgtcgtcggagagagaggccacgaccgccgaccgcctgcccccggtttcgctgtgccccgatgccgccagccgccgccgctcccctcgtcctcccgccaccgctgccaacgaagaaaaacgaagaaagagagaatatag

SEQ ID NO: 20045 - DNA, 2501 bp, Oryza sativa
  Clone ID: PAT_MRT4530_25448C.1
atggcaactagccacctcacctctcgctccctcctcgtccaagcccagtaccccatctcacggctcccatccaacctccgcctctccctctcccaccacaagcaaccagccgccgtcgccaagcgccgccgagcccccgccccctcccacccggccttctcttcggtcatccgcggccgtcccaagaaagtccccatcccggaaaacggcgagccagccgccggtgtccgcgtcactgaacgtggcctggcctatcatcttgacggcgcgcccttcgagttccagtacagttacacagagacgccgcgcgcgcgccccgtcgcgctccgcgaggccccgttcctgccgttcgggcctgaggtaacgccgcgcccatggaccgggaggaagccgctccccaagagccgcaaggaactgcctgagttcgactccttcatgctcccgccgccgggcaagaagggggtgaagcccgtgcagtcgccggggccattccttgccggcacggagccgaggtaccaagcggcgtccagggaggaggtcctcggggagcctctcacaaaggaggaggtcgacgagctcgtcaaggcgaccctcaagaccaagcggcagcttaatatcggtagagatggtctaacacacaatatgttggagaacattcattcgcattggaagaggaagagagtgtgcaagataaaatgcaaaggtgtatgcacggttgatatggataatgtctgccagcagctagaggagaaagttggaggaaaagtaattcatcatcagggtggtgtgatatttctctttcgtggtagaaactacaattacagaactcgcccaatctatccacttatgctttggaaacctgctgcaccagtgtacccccgcttggttaaaaagatcccagacggcttaactccagatgaggcagaagatatgcgcaagagaggacgtcagttaccaccaatttgcaaactcgccaagagtaatgtccaaaataggaagtacctgagggaggttgatgtcgaacatgaaactactacttttatttgtcagaaacacttgaaatgtggaattacagttgaaccaatgctgcttcttttgctgagtgtgtttgttgtcattgtttacattccattttttttaaaaatttttaaaggaaaaaatggtgtttatcttaacctcgtgaagcaagttcgagaagcatttgaagcatgtgatcttgtccgggttgattgctcaggtcttaataaaagtgattgcagaaagataggagctaaacttaaggatctagttccctgtaccttactgtcttttgagtttgaacatatactgatgtggagaggaaatgattggaaatcatcccttcctccattagaagaaaatgattttaaagtggcgagcgaccaaattttgaatagcaaagaagcaggttctggaagtgctctgaccccaattgagctggtcaacaatgccacgtctctcaagaaatgcaacttgattgaaggtgcagaaaaattggaagattccatgaagtctagttttgaaaatggtatgattttgggttctgcatgtggaaaccctggagtatgcaactctgaaggtatagatggaactgagtcctcagctgatgctccaattgaattttctccttcaaattcagcaagggatttagatccatctcaaacatcaacattgtattgccaaagctccctattggacaagagtgaaaatggagagctcattgagatgtaccctgacagatgtggaaactcggaacaatctccagatgtaccagaagctttaacttgtctaatgggcagcagtgatgagattcatgaattggaaactatgaggagaaactgcaaacatttaaacggcagcgatggtgttaacagtgattccatagtcccttcctacatggaaggaattttactccttttcaaacaagccattgacagtggcatggcactcgtgctgaatgaaaatgagtttgctgatgccaattatgtgtatcaaaagtctgttgcttttacaaagacggctccacgatacctggtactccggcatacaccaaggaagtcccatggtacccagaagactgagccagccaagaatgtaaggataaataagcatcttgaagaacataaagtatctgatcatgtcaaaaagaaagaaattgtcatgggaggatcaagaatgcagagaaatgatcacgcacgagaatttctatcagatgttgttccacagggtaccttaagagtagatgaacttgctaaattactggcttaaaggtgatcggtcctttattaaccgaaggtgtgttgcgttatcaaccttgaattaacgtgcaaagtatatacatgtacattgatatgggacgtataaaacttttcgtcaatttggtcatgctgtgtaactgatcacgctttctgcattgaaatgttggaatgtaatccatatggaacggcgaagcattttcagaccaaaaaaaaaaaaaaaaaaaa

SEQ ID NO: 20046 - DNA, 238 bp, Oryza sativa
  Clone ID: PAT_MRT4530_25449C.1
gcggattttatgttgagcctgccgctgtcacacaggctgggaggattcggtccgacgaacttggtgaaatgaacctcaagatgcaataaatccggcgacttttgcctaagttcgggtggtagtacgccggtgagactattatggaataggcgtatcggcttcaatgccggacaccgaccgcatctcgccggtgtgctacctgagaagttggtagagtgctcagctatgatcgtactct

SEQ ID NO: 20047 - DNA, 327 bp, Oryza sativa
  Clone ID: PAT_MRT4530_2544C.1
atgggtcatacctacctccactccgccggaagcagatgcaacgtgggagcacggttgtctgccgatgacgtgaccggcgtcagactagtcacagaccggtcactcttgtccaccacgcgtcagtttagcatgccgcacgtctgcccttcttcatacaatgacttcctcgccatggttgcgatgaagcctggaatgaatctggccgggactgacataccaactctaggagttagcacgccggctccggctagggacgagtgcctggaggctctcattattccgacgggacggggcgaggcgtgtgacaggccgcctgttgccacctaa

SEQ ID NO: 20048 - DNA, 301 bp, Oryza sativa
  Clone ID: PAT_MRT4530_25450C.1
atgtcactctgtagatggatgccaagctgtctcgccagtgacctcgagcctccgccccgatatcaaagacgtcaccgctcgtggatgctgctattgctattcatgcggcccaaagcagagccaccccttgaggcccatgccgcagatgccatggacactaacttcctccttagggttgcggcagctttggcggcgacgaggaagagaagtagaggaaggaccagaaactcttcatccccgggctctcagccgtcacggaagatggcggagggttggccactggcacagcagagggaccgtg

SEQ ID NO: 20049 - DNA, 270 bp, Oryza sativa
  Clone ID: PAT_MRT4530_25451C.1
atgcggaggccgaatgggaggcgtacagcggtgacacgatctaggcaacaagtgtgcaaggcaatgttgtttgtgtatgcacgtaacaagagtgaaactaaggggagcagctctggtgcgaccgtgaagttggcagcacagacgcatttcattgagcacatctttagcgttctagatttcttgagtgttctatattgtggccagaccaacaagctcttttctgcttctaaaaggtgggttttccatgaggagatcactattagaagctaa

SEQ ID NO: 20050 - DNA, 817 bp, Oryza sativa
  Clone ID: PAT_MRT4530_25452C.1
tgaaattgcgatataaattctgccaaccttggtgtccaacttacttgttgttgagatcttgctttgagtactcacatctgcataaaggtatgcatatctttgtgagggctgattactaatatgagcaaccactgcccatcttgagttagttctgccgtgcaggagttgtacgcagattgtatcatgcggcttcaggtggagaccatgacgatgtcgaccggcggagggaaatcgtttgttcagattgaggattcctacgtacaagtcgctcttgtgaccttacaagtgccaaccgctccgtggtgccatatcgtctcaggttatgtgccagcgcttctggttgcggtcctcctaactgccggacctggacggatctgggggagaagacgtcgccagcgacacagcgtgggtcttgcccgacgggatgtttcccttggctgcactctatcccctcaacaaccacaccctaatgaggttaactccagccgactgtcgagcttcccctcccctcaacccccacagctgaatcaagatgaacttcacatcctattggatttaatcgatcatatcgggagtggtgagaggaaaaaaggaaggggatgggaaggggtggcgtcgggcgcgaccggaaggcacggcacggctcggagggatgaggatgggagagaacgtggaggagatcgggaaggcacggcgtggctcggcaggaggaggacgggagagaaggcggaggggatcgagacgcgctcggcagagtgtgggccgtggcgatggaagagaaggcgcgataggacgcgtgggtcgacccgggaatccg

SEQ ID NO: 20051 - DNA, 332 bp, Oryza sativa
  Clone ID: PAT_MRT4530_25453C.1
atatcacccaaagtctcacatgtcggatatgatgatatctgagcttatttttaacttccgaacgactaagcggggaaactcattacatgacaccgacacgggtgggaacggaactgggagcaccatagctcctagggtagataccatatctagatggcacgcaaaacgccaccagaacgagagcgcgagccaagaaacgatcagggagcagatcaccagactgggggagaaggcgccgaagcgctatggcctgaacagcgtgaacgtccggaccgcgagattggagagccaccagcgctcggacgcgcgcgtggacccgccaattaatgacc

SEQ ID NO: 20052 - DNA, 516 bp, Oryza sativa
  Clone ID: PAT_MRT4530_25454C.1
atggcctcgtccaatgggcaggatgaattggatcatcgtgacaccggcctcccttctcaacattgccatccttgttcgcacttcctccttccccaaaggcggctgacgtggagcataggagggtggtcgtgcaagggtggcgggggtcggagtggcctgactccatctccctcatctagtcaggatgtgtccttcgagatggttgtgttcaatgtccccgcctctcaccgtgactacatccgcgccggcatggtgtcccttgccaaccacaacaacttcgtcgcaggatcctacgaccacaacatcaaattgatgctagcaatcgttgggctcgtgcgaatcttggcccatcgtattgatacgagggagttaaattacaccacttttaataatttagaggtgaagatatccagtattacggttgagaggtaccttggatctttatatgagagagtcaaagtggacttactccaaaagattgtcaagatccacaagaaccagacaagagaccattga

SEQ ID NO: 20053 - DNA, 407 bp, Oryza sativa
  Clone ID: PAT_MRT4530_25455C.1
cgtgaaagaattgattatcctatgttctacccaggtaggatgagagtatgtttgcaatattatatcaggtgggtttctccattagattgctcgttgaatcctgtgtagattacaccactgttttttttaacaagtggctttgctataggatggcactaacaatgaataaacatcctgaaatctgatgctcgcaatgaataaaagatatgagatattcataacggaatggagtaggcttcaagcaacatgcttgcagacaatcgatgcccagtttacaggctatattgaacaccctggattttgttggagattactggatgcctaatttcgattttgattgccctgtgcatatgacttgatggtttgctctattcaactgatgcacagttgtaataattataacaaac

SEQ ID NO: 20054 - DNA, 240 bp, Oryza sativa
  Clone ID: PAT_MRT4530_25456C.1
gataaacgcgacaatcaaataaataatggtgagttcttataatcagggaaatgacaccattatcttaaagaagggattctacaaattgcatattgacctactcatcaatcgtcaaaaacagggacacatgtacatacagatattttaatccgggattctctgcaaaccgaatagaatgatattacacatagttgcatacaaacctaccagaattttatgatggcatttcatcgtatcctg

SEQ ID NO: 20055 - DNA, 939 bp, Oryza sativa
  Clone ID: PAT_MRT4530_25457C.1
atgtgcggcggtgcaatcctcgccgatttcaccccggcgagggtgccccggcggctgaccgccgccgagctcctgccggtgaccccgactccccccgccgccgagaggagaaccacccggaagcgcaagtccgacgtcgacttcgaggcggagttcgagcttttcgaggacgacgacgacgacgatgagttcgagctttccgacgatggcgacgagagtttggccgtgtcattttcgtcggatgtctcctcgagctccaggccgcggcggcgcgtggcggcggcggcggccggtcgtcggaaggcgagcaagaagagcaagtacaggggcgtccggcgccggccgtcggggaggttcgcggcggagatcagggaccccaagaaggggcggcgcgtgtggctcggcacgtacggcagcgccgaggaggccgccatggcctacgaccgcgaggcccgccgcatccgcggcaagggcgcgaggctcaacttcccccgcgacggcgatggctcccctcgccggagtaacgaccggccctgctggaccatcgacctcaacctccccgcggcggccgtctccggtgacgacgacgacgccatggccgtcgacgccgcagacgcagacgcaggcagtgctggccgtgcagcagcctatgcagatcaagaagcactgagcgcggcaaagtgcaagatcaagcagtgtcctcgcgacgaacagatggcgagcgccacacctgagctcatggaggaggacgcgagcagcagcagaaacatggtgcccctgtccatggcgctgcagctgcagtatgcggcgatgatcgccgaatgcgaccgcgagatggaggagatcgccgccgtggagagggacctcgagaggcgcaggaggcaggtgttcgagcgcagaggccacctggtcaggcaggcctctcttctgctcgactga

SEQ ID NO: 20056 - DNA, 267 bp, Oryza sativa
  Clone ID: PAT_MRT4530_25458C.1
ggtactgaatcatttttaggggcttattctttttattgattcctgccctttaaaccccaccaccctgttgtttaagatttgtaaggtacaaaaaaagctctccctggaatgcaggggaagtgctttgtgcaacacacttattatcatgccgggttcgtgccatcaacgtgaaaattttacattctaaaaacttggcgccatggaatggccaatcatgggggacctctctgccccttgaaatggccacctcgtcaaggggaccatttt

SEQ ID NO: 20057 - DNA, 1433 bp, Oryza sativa
  Clone ID: PAT_MRT4530_25459C.1
cgcgccatagcgacctctctcccggagaaagaagagcgcgccgcgccatgtgcggcggtgcgatcctcgccgatttcaccccggcgagggtgccccggcggctgaccgccgccgagctcctgccggtgaccccgactccccccgccgccgagaggagaaccacccggaagcgcaagtccgacgtcgacttcgaggcggagttcgagcttttcgaggacgacgacgacgacgatgagttcgagctttccgacgatggcgacgagagtttggccgtgtcatgtgtgtcgtcccccaagtcgaaggcagtaccttcgttttctttttcgtcggatgtctcctcgagctccaggccgcggcggcgcgtggcggcggcggcggccggtcgtcggaaggcgagcaagaagagcaagtacaggggcgtccggcgccggccgtcggggaggttcgcggcggagatcagggaccccaagaaggggcggcgcgtgtggctcggcacgtacggcagcgccgaggaggccgccatggcctacgaccgcgaggcccgccgcatccgcggcaagggcgcgaggctcaacttcccccgcgacggcgatggctcccctcgccggagtaacgaccggccctgctggaccatcgacctcaacctccccgcggcggccgtctccggtgacgacgacgacgccatggccgtcgacgccgcagacgcagacgcaggcagtgctggccgtgcagcagcctatgcagatcaagaagcactgagcgcggcaaagtgcaagatcaagcagtgtcctcgcgacgaacagatggcgagcgccacacctgagctcatggaggaggacgcgagcagcagcagaaacatggtgcccctgtccatggcgctgcagctgcagtatgcggcgatgatcgccgaatgcgaccgcgagatggaggagatcgccgccgtggagagggacctcgagaggcgcaggaggcaggtgttcgagcgcagaggccacctggtcaggcaggcctctcttctgctcgactgacgatcttgctgaactgaactctgaatgtttgagcttgtctgaagtctgaactctgcactatgccatatggtgtttcaccttcactgtgaggctgacatgtgggccagacgtccgtttgccttgcttgcttttgagctgcaactgggcgttgtgctgcaagcctgcaaagtgcctgtgtaaagtttgtgggattgtgtgtgtggatcttgtatccttgtgactttgcaagctttaattttgtgaggaacaatagtattttagattggtgtgtaaaatatagaaataaataatagtagcaactaaattttggttttcagctcttcatcagatggtttgtcatgggaacaaaatttcaaacatgagcaaattaaggtcaaaaaaaaaaaaaaaaaaaaaaaaaaaaac

SEQ ID NO: 20058 - DNA, 1065 bp, Oryza sativa
  Clone ID: PAT_MRT4530_2545C.1
tctcggcgggtacaccatctcttcattctgtattccttgtcgagatccaccaaccgttctcgagtgatcgagaaggcgcagagaatggtcttttgtctctacaggatccgacaaggccttatcggctctgggcatcctcagctgaagttcccttaggttcctcgcaggccttgacaagacggcgtaaagggacatgaggataggtttcaacgctaggagtcgtcgtggtaagggatctctgggtaaaacacttggcaatattgtctacctgataccaactttgttggagtagaggtagtgggaggatcgctacacctctggtagtagtcgtaactcgaccaaactggttgagaaccagtgagtaggtgtctctcgatcatttggagtcgtggtacgaggaccactacgctgccgatcgaaaaccagtcatagctgttcctcaaccatctgaagtcatggtgcgaggaccgctgcgttattgatgtagtcgtacctcgaccatttgaaattgcagtgcgagagatcgctacgtactggttcgagaaccagcaagcgagtaggctacgtgctggttcgagaaccagcgagcgagtagaattatctctcgaacaccaatggaagtttgcgatgcgagagattgctacgtgctggttcgagaaccaacgagcgagtagaattatctctcgaacaccaatggaagtttgcgatgcgagagattgctacgtacttttcttgagtagtccagccatggccggtgctatgagataggtcgtcggtcttcgttggtaggttgggcgcgacaactccgcatttgtcgagaatgttctcgatggtggggtgtactcgaccacaacctactcgagtgctcgattgttcctgaaattgaattgatgttctccgtggcggcagcgacatctttggagattggatgatctcagtagatcaaaaaccgttgacgatgatggtttcgatctcgtcgggagacatactttggtcaggttagatctctccatagccgaagtcatcgagtagcttgttatcggagaatccatctcttgaacccat

SEQ ID NO: 20059 - DNA, 1095 bp, Oryza sativa
  Clone ID: PAT_MRT4530_25460C.1
atgtgcggcggtgcaatcctcgccgatttcaccccggcgagggtgccccggcggctgaccgccgccgagctcctgccggtgaccccgactccccccgccgccgagaggagaaccacccggaagcgcaagtccgacgtcgacttcgaggcggagttcgagcttttcgaggacgacgacgacgacgatgagttcgagctttccgacgatggcgacgagagtttggccgtgtcatgtgtgtcgtcccccaagtcgaaggcagtaccttcgttttcttgtacgatgagatggagaaatcttgcctgctttcttgaaggattttcacctgacggcaacctgaactttacacgatttcttctcctgctgttgatttcatcgatcgccggcggcagtttcgtcggatgtctcctcgagctccaggccgcggcggcgcgtggcggcggcggcggccggtcgtcggaaggcgagcaagaagagcaagtacaggggcgtcggcgccggccgtcggggaggttcgcggcggagatcagggaccccaagaaggggcggcgcgtgtggctcggcacgtacggcagcgccgaggaggccgccatggcctacgaccgcgaggcccgccgcatccgcggcaagggcgcgaggctcaacttcccccgcgacggcgatggctcccctcgccggagtaacgaccggccctgctggaccatcgacctcaacctccccgcggcggccgtctccggtgacgacgacgacgccatggccgtcgacgccgcagacgcagacgcaggcagtgctggccgtgcagcagcctatgcagatcaagaagcactgagcgcggcaaagtgcaagatcaagcagtgtcctcgcgacgaacagatggcgagcgccacacctgagctcatggaggaggacgcgagcagcagcagaaacatggtgcccctgtccatggcgctgcagctgcagtatgcggcgatgatcgccgaatgcgaccgcgagatggaggagatcgccgccgtggagagggacctcgagaggcgcaggaggcaggtgttcgagcgcagaggccacctggtcaggcaggcctctcttctgctcgactga

SEQ ID NO: 20060 - DNA, 277 bp, Oryza sativa
  unsure (1)..(277): unsure at all n locations
  Clone ID: PAT_MRT4530_25461C.1
cttctgctcgactgacgancttgctgaactgaacnctgaatgtttgancttgtctgaagtctgaacnctgcactatgccanatggtgtttcaccttcactgtgaggctgacatgtgggccagacgtccgtttgccttgcttgcttttganctgcaactgggcgttgtgctgcaancctgcaaagtgcctgtgtaaagtttgtgggattgtgtgtgtggatcttgtanccttgtgactttgcaagctttaattttgtgnggaaaaaaaaaaaaaaaaa

SEQ ID NO: 20061 - DNA, 563 bp, Oryza sativa
  unsure (1)..(563): unsure at all n locations
  Clone ID: PAT_MRT4530_25462C.1
gtttgctttntccngnnttacntttggggncngggcgcattagtttnnnattcccctntggggccnnnncccccctatnngnggaaanaanaatccngtggggnggcccccgcnggggnccccccngcnnaatgagngnttcccgncgngggnggggggttttttttttnaancccggggggnatnnnncaaaagnannttncncctctgggnnacnttaanccgnggggnantttntnacccnccgcctnactgtntgtnacnnnagnggnnnantntggtttttncncgnnnntttnnganggagggnncccccanntttttttttnatncccccnattccancnngggtntnccattntggnnttnntanggtgccnccnnggggggnngnaanttnggcnggnnantttttcanaaaannggnntncnttttaaaaaaaanaaaagaaaaaaatnagaaaaatganattccttnnaaanaaaaaaaaaaaaaaanaaaaaaaaaaaaaaaaaaaaaaaaaaaaaaaaaaaaaaaaaaaaaaaaaaaaaaaaaaaaaaaa

SEQ ID NO: 20062 - DNA, 396 bp, Oryza sativa
  Clone ID: PAT_MRT4530_25463C.1
attttcccggcttgcgtaccttggaacaatggtgaattacccgaagacgcgcattcactattgcagagccaggggctgcaaacgacaccgcctgcataaggttgtgcagtacaaggtcggtaagcccaggttgatggcccagggtaagcgccgttacgacgccaagcagaaggggtttggtggtcagactaagcccgtcttccacaaaaaggcgaaaaccacgaagaagatcgtgctcaagctgcaatgcaccaagtgcaagaagatttcacaaactattctgaagcgttgcaagcattttgagctcgcggagcgcaaggctaagggcgggcggtcggagccgagctggtaaaactgccgtgggttgcgcacagaaaaccttccttgatgtctgct

SEQ ID NO: 20063 - DNA, 1272 bp, Oryza sativa
  Clone ID: PAT_MRT4530_25464C.1
atgtcttcgtcgttgattccccctccacttgccgattccgacggcgcctccccgccgccgcactgggttctcatcgacatatggtgctacatcggcgacctccccaacgccaccaccgccgagtccacaaccagcacaggcctccccatcaaggtcaccttccgcaccgcacgcccgccgctcctctcccacctctgcgtccactgcccgggcctcgacttcctccgcgccacgcccaaggtcatcgcctcccacgccgacctcctcctcctcgtcgtccccttcgatcccctcaccgccctctccagcgggacatgggattacttcgtctaccgcgcggccgaccctcctctgctccacctcatcccgcccccgccgcgctccatgcgcttcaacgactccgaggtcgccatcgtcagccacggcgacggcgagtacgccgtcgccgccctcgccttcgccggcactttcctctccgtaaacaaggatttccacctccacctctaccatggcggcaagcagcagcagggtgagtgggtctccaagctcttgacgctggaggatcagctgagagacaagcttgtgcctttgcccaaagcggctgcggagtacaggttttaccaggagacaaggaagacgatcgtgattggcggcgagcgcggtacggtcggctgggtagacctctggcgtggcatcatcttctgcgacgtgctcgacgaccaccccgtgctccgcgacatgcccctgcccctgccagcgagcggcaactgggatcgcctcctcaagcagactgaccccaactacatccgtgatgtcaccgtcagtctttgcagagactccatcaagtacatagagctggagatcgttgggacaggagagacccacaccactgtccagccaactgaatcttaccaggaatgggttcggcgaaagccaagcaaagctgcattgcggagcgtagcaatggtattccccaccataagcatggatgatgatcatgtctacttcttttccatagccggaagcacggacaaattggaggccgtggttactgttgatgtaaggaataagaagatacaaggagttgctgagcttgatgtccgaaaatactatttcggtatgcccacctacatcgccagtgagatgtccacatatctgaagaaagtcactacagagactgtcagtgttcaaaacagcatggttctgctgctcgacagagtagcacaggagaggtggcacatggacaaactgaaagtgcagcagttgaagtga

SEQ ID NO: 20064 - DNA, 1150 bp, Oryza sativa
  Clone ID: PAT_MRT4530_25465C.1
ctaccacaaatgcaccgttgctccaccgccatttaaacctacgtcgatgtgtgggcaccaccgcaccggtgcccccagccggccagtcttcacgtgcgccaccttactgggctcagcctccaccggcctcacctcccgctgcgcagccaccgcacaccaaccggcctcgtcgccctcctcgcaccccacagctgctggccactctgccgtgctagctgccatcgtcgtgccatccacagtcaccgcacttgccaccggccaggcacgcgccgccgtcgcgcctgctgtcgtggcctcccaagcctccgccgccgtcacggcctctatgcgtccgcgctgttgcgcttgccaccgccgaccgcagcctatcgtgcctctgcatctgacgccgccgcccgcaactcgccgccgcggccgaacccaaccaccacaggccatccaccgtccggccggatccggctgcccgccgccgccaccaccaggcgccgccgccgccgtcaatggacgccgtcgccggcccccaccccaccagatccaggcttggatttggcggtctcctcctccgccgccacacctccaaccgccgccaccagcaccgccagtcaccgccgccccaccattcggcctagctagcctccaccggccttacctcccgttgcgcagccaccgcgcgccgaccggcctcgtcgccctcctcgcaccacacagctactggccactccgccgtgctagctaccatcgtcgtgccagccacagtcactgcacttgccaccgtctaggcacgtgctgctgtcgcgcctgctatcgtggcctcccgagcctccgctgccgtcacggcctctatgcgtccgcgctagtgcgcttgccgccgccgatcgcagcctctcgcgcctctgccgctgacgccgtcacctgcaactcgtcgccgcggccgaacccaaccaccgcaggccatccaccgtccagccggatccggccgcccgccgccaccaccaccaggcaccgccgccgccgtcaatggacgccgtcgccggcccccaccccgccagatccaggctcggatttggtggtctcctccgccgccgccacacctctaaccaccgccgccagcaccgccagtcaccgccccaccattcggcctcgcctctag

SEQ ID NO: 20065 - DNA, 404 bp, Oryza sativa
  unsure (1)..(404): unsure at all n locations
  Clone ID: PAT_MRT4530_25466C.1
actgtaaatttgactgctaagatgttaatcaagagtacattaaaggatgttgataatgaaaatacgactggaagggcggccagggcaaggttcacatgcctgctacaacaaatttcgcttcggtgaagcagcatcgtcgtttttcttttctttgagaggccagcatcatcgttgagcctgcacgtatccactttatcttttgaacctaataatgcacagataaacaggttacgacctgcccagaaaagtatatacgtacaaacgaaggcgatgcgactaatattaggngtgcgacatttcagtaatcaacccttaacaaggtttgtttgcgtttgaaaccaggggtttggcaatttcctgggttttttccccccatntttggggntgtaacaaccctttaaagg

SEQ ID NO: 20066 - DNA, 1203 bp, Oryza sativa
  Clone ID: PAT_MRT4530_25467C.1
actagtggatccccgggctgaggaatcggacgaggggtgggtccccccgctgcaggaacaaactcctctcgattctcaaagccaccgccgatggccgtcggcgacgacgccgctccggcggcgaccaagatctccatctccggcgcggctctcgcggcgctcctccagcgctgcggtatggccgacggcgactgcgacggcctcctctccgggcgcgcctcaaccaccccggctccgcccccttccctctccgactacgacgaccacgcgccggcccagtccgcccccgccatctccctctccatctccggccattcctccctctcccgcccctcctccctctccgatcccctcggtcgcttccacccctccgcctccgccgccgccgccggccccgcctcgatcggcttcttctcctcccgccgccgcaccgccctccgcccctccatgcgcgagctctccctcgcccactccctctccaaatccctcgcgctcgcccaccccctcctcttcctcctcgtctccccttcctcccccaacctctctacccactcctacgaccaccgcgccttcctcctcatcggctcccgcctcgtcccgacctcgctccatgtcgtcaatgtcggccccgtcttccgggaccagtaccactccttcgctcccgactctccgatgccgtggctgccgcttgcacagcactcctcgtcgtcgtcggcggcagcaggcgacgcgcacaccattggggagcagaatgcggtggatggggtggtggatgggttcgggctagggaagctgcaggggatcctgggctccgtggcggggcaggcggcggagatggatggcatgtatgcaggaatgctcaggaggctggagaagcttgccagggaggtggagaagagcaatctccttgtgcttaagcaggttatctattgactgctgttaaggttcagatatgcagggttggaatagcgccaatgttttatcggtcttagcaaggtatatatatcctgaaattgggattctgttaaacttctttcattatctgatgcacacctatgattgctataaatgttagttaggttgttcccaatttaggttctagttcattatatttgagtttttcactaagacatttatttgtgactggctacttttgttacagtaactgaaccatgcttaagatatctatattttaggttgact

SEQ ID NO: 20067 - DNA, 580 bp, Oryza sativa
  Clone ID: PAT_MRT4530_25468C.1
atggactccccagcgacccccgtgggcttatctccgccacttctcagtctggtgctccgcaatgaatcatgctatacaaaaggaaaaggaggattattgcgtcagcggctagggtttgcggtggaccgggtgcacgacgacggttcacgggaacggacggccgagatcaaccctatccaaaacggacggccgagatcgatcgggtccacggcggctcacgggagacagcgacgatgacgtcagcgatgacgtcaccaccggcggcggcggctcgggcggctcggcagctcggacggcgcacgctcgccggcgaacgacggcgcgacggcgtgaacggaaggcaccgggacgaagcggacggcacgacgaactcaccggtgaccaaaggagcggcggaagaccaacggacggcgacggcgacgaggtcaaagcggcggagaagatcgggtcgacggcggcgacggtgctccagcggtctccggcggcggcaaaggggcggacgaggacggcgacgacttggcgatcccgacggcgaccacgatgacgaccttcccgagcgacggcgatagctgaaacggcg

SEQ ID NO: 20068 - DNA, 225 bp, Oryza sativa
  Clone ID: PAT_MRT4530_25469C.1
atggggctggaccgggcgtgcctgtgcgtggccgagcggagtacacaaacacacgaagagaaaactgaaaacaccgtgggcatgcgttcccatgcactgcatgccacccgccgcacccgatgccatcagttgttggaagaaaactgcgagcatatggtgggaccgtgggaggctgggagcatagcactacacaccaaccagacgggcacaagcacagggcagtga

SEQ ID NO: 20069 - DNA, 225 bp, Oryza sativa
  Clone ID: PAT_MRT4530_2546C.1
atgcaacgtgtcatcgttgcccagcttcgtcaccctacgaagcagctccgacttcacctagcaaacacaagcaaggagcgaagattgcccgccgcaaaacaaaaagtgggactagacagcgaaggcctcatcaaaaccaacggtgcctccaaggaggacacgacgtggatctccgtcaccgctcgtccggaagccggagccaggttttcactcggagaacggtag

SEQ ID NO: 20070 - DNA, 210 bp, Oryza sativa
  Clone ID: PAT_MRT4530_25470C.1
atggcgccaactgaacgtgctccactggccgcgtttgagcatgagaagctagtggttgttgggattgtgatccggttcggatctttggtgatgaaatcgtcatgctcgcccggccacctcggttgcctgtgcgaccaacgccgtgtcgcgtcaccggtcgcccacgacgtgttcggcgtaaggcgccaaagcgaccgggagaatatgtag

SEQ ID NO: 20071 - DNA, 716 bp, Oryza sativa
  Clone ID: PAT_MRT4530_25471C.1
agcaattcaggcggtggcgatgcatgaccatcagagttagtgtgcctccgtaagcctagctagctgtagcaacacagggggtctttggtcctgggcagtcaatcgggtactgccttctggagtgatctcttgattgttgtgtttttattagtcaggttccatgtgctactgcacattattcgagagactggaaaggtgagtaattgagaactaggttaggaataaacccaatcaaatctctttttgcccatttcttcctaaatcaatctatgttatattcacttaaaatccaagcctcttttgggtatgccttccattcctggttaacatgtaaatactggcatttaatgatcaatgtcattcagttggagattttgtagatgctccttttcgaacataatatcctgcatgtaggttaataaatgagtagcctaacaatgcataaccagtacttgattatatggtggtaattgagataaattgttcatagttaatgttcggatcagttgaaagatttcacttgtagaaatatatggaggaataattttatgataaaatggttaagggagagagggagggttttgtttcaacgttagccggccaaacaattccatatatggggaacatgggtatgttaggggcaagtgcaatcaccacagtccatagtggatggccgatgatggtcggaccataactctggagttgaacttcaatat

SEQ ID NO: 20072 - DNA, 7389 bp, Oryza sativa
  Clone ID: PAT_MRT4530_25472C.1
ttatataagccccctactcccactcttccctttcatcctcacctcctctcctctacccacgccaccacgccgccgcctccacgccgccgcgccgccgcctccacgccaccgcgccgtcgcatagagccgccgcgccgccgccacgaagccgccgcgccgcgccgcaccttgcgccgacgtcgccgccgccgcctccacgccgccgcctccacgccgccgcgccgtcgcatagagccgccgcgccaccgccacgaagccgccgcgccgcgccgcaccttgcgccgacgtcgccaccgtcgctgtcgccgccgtcgccgccaccgccgtcggtaagccgctgcctccaccacttgctcggccgccgtcgccgccccttgcaacagactcgaacagcttctcgatctcaggtgcacagcgagtaaatgatcgagcccaaaaactgtagcgtggattctttataagctcaatgaaagtaattagtagcccccacgggtgagggcggttaactattagccgttccagaagtaccctagttatttgctcctggactatttcctggtttgcctcagaaaacaagtaaagaattatgaaggaaaaatagtgtgtgtggttgtttggatagcgcagctggttggcaatcgcattgaggaggaggtagcgaccttctgtatccgaattcattacaagatttctgaagagctctgtagctgtctcaatctggacatccagttgactttggttcatttgctgcgccgacgctgatgcattcattttattaagctgcaactgttgcacagcctgcatgcccacatagagcacaagtgaattaacaagaggtacattgtaacgagtcccagcaatatttgcttcgttttgcggcagaagtaacttctgctttaaatcagttaaaaaggatccatctggcctcttgaggtactcatcaacctgtgtcttcatttgctttgactttaaggcaccatcaacatcagacatgattcttggaggaattgaaatctcagcaagaagatcaatctttaaatttggagtagagggatctggaagtctcatattgcgtggaaaagcactaagaataacattgcgcatttgaatgcagctggggggaatgacatcacagaaactgaagtggtaatcgcaaaggaactcagggaagtcatgcagtagcacaagtaacactctcaaagttcctttgtacaacaggtgtatgggttgtcccagttcagcatttcttaaatatggttccatgaatttgaacaaatcgacaagcaacctctggaagaatggccagcccttctgtgcattgcacagcaatagctttggcatgaagcttctgtggcttaccaattcaagccaagcaaaactccatgcaggaactctcaagggttgaagcacatggaatgcattggcaaatgctgtcaacacctgaaaattagcactatcatggtgaaggtcagaagtagtaagctcactaagcaaatttatgaacaaccgaaaatacggccgaggattgaaagaaactttcttttcttcagcatctctttgaataatcctaactataacagaaagaatcttattaaaaaggcttcctttactcggtccaatatccacagaagagtactttaccaccagtgccacaagctttgaatatgaatcaattgagaagtatgaaatctggagttgctgcgttggctgctgagaaatcccgccaggagcaactacttgctcagagactacagagtgtgccacagcaagttccgtgagaatatggtaaaagcggtcggtcaaatcatctccctttagcaagccatcctgttgcagcttcacaatgtaatgagtgtatgctgaatcacccatagtgggatgatcgcatatattacaccattcagagaatgatactgcgaccttctcctgaaaaccaacagcatcagtgaacgcaacatcattagcattattttcctctttattcaccaaaggacgaccggataaaacctttttatcccttgactgtctaatattttcatccttcacggaagcaaaacttctagcgatttcaatcaactgctgcagcgattcaggagaactgggcctgattgcaagttttgataaggcatcaacaacattataaacctctgcgatgctaatagattcttgggtaatcaatgtctggacaagtgatatagcaaactcggttgcagccttgtttcttccgccatcaataatcttcgccaaatgaacattgtaatccccaagattaatcagttcagaccgaattagtccaataattatgtcgatgttaaacttcttatcttcgtcagaatatattacccagctcgttaactccttgacgacaagtttgcaaacatcacgtattgcgaccaaagctgctaggagccatgtgacataattactgtttgatgcattgtcatacaaacttctgaaaaccttctgtgcaatagccaaggcagcttcatctcgactgacacatctgagtaagatgtcgggaacctccgcaatgacagactgaatttctgcatctttgccatcctttgcgatcaaagtatccagcttttgtgaaacttgttggtacatctccagcgcatcactagtattcaaaggttccacaaaaacagatcccatccgatcaacagcagttgtaggtgaaagtggtgccgaagtaacaagatctttattcgtggttgttggttcacccactggaaggtcattgggaaccataggcggaaaaacagatgcaacatttgtggttccaataacttgggtagatgtgtcactcgcgccaatttttgaagaaaggcttgaaaggtgtgcattgcgatctgattcttcatgtaccagttctgtagtctgacttgcagatgcaaaatgggaggaaaagctactggagtctgtcagtgctgaatttggactgtaaactcgaggtacactggaattgcttggagcgaccgccatcgctgtagcagtagctgaaccacccgcattttgactactctgactgtgccatacagtaatgaagtcctcatacactcgtcgttgggcagcagataaatggccagtaggcttaggacgaagagcatccggaacacgcttaagaccttgagtgtaaggaaaagcatcataatatgcagatccaagtagttctttttgtctccttagttgtgaaaagggctgcttgatttccccatcgatcatctcaacagccttgcgtgttgcaacggtctctattagggcacatccaagatccagattatcattgacaagaataagcataatctgctctgtggattcagtattattagttatgccctgaataagactacgaagatgagatgataaagcaacacgaagaggttccttggatgtaacatgggcaagacttccagctagtgtaccgaccatcaaatgtgcagaacgagatacggcactatcatccgcttccattgcataatcctttagaataagttccttagttgttcggctcgctattgtaacacttctttgaatgacaggacctataatctctttgatggccttatccaaagccatatccatgattttgctatactgcaacgagccaaaagagctaagcttttcattaattctgaaatatatatctgcacgtggaattgccgcaataagctggctaagagaaaatgaagacgatgatagtgatggtgtttgtgatggcgaaacctggctcaaaccaagagaggaaacctgttcaggcatgattaaagcggacttgtcatcttctaccatattgtttgtaggaaggcgaagaggtgctgcatactgactcaacatatttggaaggcttgtagcacgggaagtgctatttatctctggttgtggttccacatggtttattgtaggcatgacgccagaggaaacctcagcaactactggtgcttgagatgcactaacatctttatttgaaaaatctggatttccctctatttgccgaatacggtctttcagaagagaagatggtttcacatctttcatatcaacacttagattcttaaacaagacctttgatgtgaatggtataatagcaatcatcaaacccctttcatatgcctctataataagaattttgggatcaatttcctttgctcgtaatgtttgattccttcctatagtgaattttcctagccaactaccaagatttttaagcaatgaacgttcttccgaactagattttatgagatcggactgtaataagaccttgcagttctcatatgtagctttaaccatttccttattcaatgattttgagttgactttgtcgaaaaacttcaagtataaatcatgaaaatttggttcaatgcttgcccttttcatgaccatatattttttttttttttttttttttatactaaggcctccccgtgacatttcagccttttaatgcctgatcttatatcgtaaggttagagttagctttgtccactcaatcacctaaatggttttttgcctatgttcattccatagctttattctttatacacacagaatatgagaagttggtaaaaaccttttaactgcccaaaaaacggcaacaggttttttggctaccaattaacagagcacgaggctaccaattctaactaccgttaggcttatatacagctaccctataatcaacggactactatggtacattacataagcacaaggctagaatgtaggactacacggtaagtttcgccaacagataatacacagaaagacaagaagagaacacagagtctcccgcttttaatggccaccatcggggagaccaactccatcgtctcccccttttcctccacaagaccttgcaacagactcgaacagcttctcgatctcaggtgcacagcgagtaaatgatcgagcccaaaaactgtagcgtggattctttataagctcaatgaaagtaattagtagcccccacgggtgagggcggttaactattagccgttccagaagtaccctatttattggcacctggagtactacgaggtgttatctggaatatatggttagaatactgaggccactctattatacgtgccagttactgttctaccgctggtgttcagaacataaacatctttgaatcgatagatttacgcaaggcatcaagaacactacgtagagcaattccaagtcccaggtgagccacaagttgatgcttaatgagagatcccatgagcacagctgctaacttaagtttttattaagctgcaactgttgcacagcttgcatgcccacatagagcacaagtgaattaacaagaggtacattgtaacgagtcccagcaatatttgcttcgttttgcggcagaagtaacttctgctttaaatcagttaaaaaggatccatctggcctcttgaggtactcatcaacctgtgtcttcatttgctttgactttaaggcaccatcaacatcagacatgattcttggaggaattgaaatctcagcaagaagatcaatctttaaatttggagtagagggatctggaagtctcatattgcgtggaaaagcactaagaataacattgcgcatttgaatgcagctggggggaatgacatcacagaaactgaagtggtaatcgcaaaggaactcagggaagtcatgcagtagctcaagtaacactctcaaagttcctttctctccttgagcagtcagcttttcaaccaaccatttctcaagattgctatgactttgcctaaaagcaactgtagcaagcttgatgctaaatgcaaacggggtggaatcaaggactgcggataggatcgttaggtcttgacatatctcaacagttctgagaaggcaatttgcgtcggaatgtgaatcaacaaatccaaagcacatgaggtaaggggggacatgccatagagagttcataagactactgtatgtagtgtccttcagtatcatagggaaaacacaagacaatacttcatactggaggagattatatggagtattgatgtggctaacaccaatcagcatctctttgaataatcctaactataacagaaagaatcttattaaaaaggcttcctttactcggtccaatatccacagaagagtactttaccaccagtgccacaagctttgaatatgaatcccttgagaagtatgaaatctggagttgctgcgttggctgctgagaaatcccgccaggagcaactacttgctcagagactacagagtgtgccacagcaagttccgtgagaatatggtaaaagcggtcggtcaaatcatctccctttagcaagccatcctgttgcagcttcacaatgtaatgagtgtatgctgaatcacccatagtgggatgatcgcatatattacaccattcagagaatgatactgcgaccttctcctgaaaaccaacagcatcagtgaacgcaacatcattagcattattttcctctttattcaccaaaggacgaccggataaaacctttttatcccttgactgtctaatattttcatccttcacggaagcaaaacttctagcgatttcaatcaactgctgcagcgattcaggagaactgggcctgattgcaagttttgataaggcatcaacaacattataaacctctgcgatgctaatagattcttgggtaatcaatgtctggacaagtgatatagcaaactcggttgcagccttgtttcttccgccatcaataatcttcgccaaatgaacattgtaatccccaagattaatcagttcagaccgaattagtccaataattatgtcgatgttaaacttctggtaggaacatagaatggcatctctttgacatttaacatggaggtgatgtttgtgaaagaatccatatgctttgagaggcgatcagtctggtgaagaatcataacagtatcgtgaattggatcatttgctacaacaagggctggatgtgatcatctatcctcgattttagcgattgagaaattttgctcttttgtcagcaagccttgatttcgaaaatctgatggtgcaaccccaaccctaaccatctcttcagtgtatagattaagttcaatgcacaattttacatggaacatgtcactgacatgtactgagttcactgcttcacaaaaactggtgctgaagtatggtttatccagacaatacttgacaacagttgataggagctcatgtttcaatcgagatctctttgccacgtcggcattcagcagcacttcatcaaaaccaacttgaagcagcaaactgcaaccatcaggactggagtccgctagctggcagagctcgcgggggatggtttcgagggtggagtcgtcatcgccctgcaccagggagcggacatccttggctacggcggaattgaaggggatcat

SEQ ID NO: 20073 - DNA, 246 bp, Oryza sativa
  Clone ID: PAT_MRT4530_25473C.1
atggggtatgcttggtttatcgccaaaataaacccaaagtttgacaatgctaaattttttagacgtgtgtgtgctccccagagcacagccggcaaggcgtgcaaaaagttggtgcgccaccacggagagtacgccggcatccagtcggtcaacccacgatcccctctatggctctctctcctcttcccatcttttggtggtgtaaatggtctgctgtctgcaactgtgcgtcgctacctcacccat

SEQ ID NO: 20074 - DNA, 561 bp, Oryza sativa
  Clone ID: PAT_MRT4530_25474C.1
cgcattatgcaagagcctacggccccttcgacaaatccagtcagtcactaactcactatgcgatcttgatttccatcgcgtctatatctatgtcacgtatctaggatttttatatatagataatccacttgtatagtttttaaaaatattctaaatataacaaagttagaagtataaattgatcaaatgtgcatcttatattaataaagggggtttgtttttcttttttcaaaagtttttcttacgtatgtatatatatacatcgggttaagattatttgggtggtcccaggaggccaggaccacctcctagatccttatgactatgtaggaatgtttcgattcaattgtactgatattgattgatactccattatcaaattgattgcataatctagtgcattgtactggcctgtggaatttttgttcttcgtactgtatgaacaattaagtgcaatctttatattcatataaatactcaaattttgattttttacatgtatgtagcgtctatcccacctatgcgatatacggctgagcctgtgccattcgatgcatctga

SEQ ID NO: 20075 - DNA, 531 bp, Oryza sativa
  Clone ID: PAT_MRT4530_25475C.1
atgggaccggccgtcgaggctcggccagccatcgggaccacgagcgctccgctgcgccgtgccaagacgccagtgggcgcagccggtggccaccacttcctccgcgcacaagggcctcccgcaaccgccggtgggcgcacccgccccccgcctccgttgcagcaccaggcccccgcctccgtcacgtgcccgccacccggctcagtcctccgtcgccggcctcctgcagccttccctgcgctggcgagggcataccggcccccacctctcctaggcagctcgccgtcgtcagccggccaggagggcgacggatctggtcaaggggccaccgccatcaccggatccggccgccgccatcaccgggccgagggccaccaccgcctcgctgctgcatcgccgatcgagacccgcgtcctccatcgctgccgctcgctgcccctctctgcctccgtcgtgtcgcccaccgcgctggcccgcaggtggggggccagatcctgccacaggggcgccggatccgccgccccaagctga

SEQ ID NO: 20076 - DNA, 147 bp, Oryza sativa
  Clone ID: PAT_MRT4530_25476C.1
atggcgcgggtcggggctagtgcctggggagatccacgtgtcgagactggccaggccgggaacgtggtgaccgaggcctcgcagtacatggtggcccgaggggacctcagggtgagctcggatgggagaaccgcctccgcgccgtag

SEQ ID NO: 20077 - DNA, 293 bp, Oryza sativa
  unsure (1)..(293): unsure at all n locations
  Clone ID: PAT_MRT4530_25477C.1
caggctctcgctccccacacgttttcttctccccctccacatctcccctctcgccgccgccgccgccgcatnccgttcagggacttctccgccggcgccatggctgccgctgcaaggttcttggcggtcttgctcctcgttcttgctgtcgcggcggcgtcttccgcggcggcgtcgttngctggcggcggcgaccgcacctgcagctggggatgctgtccaccggcggcgagtntcgggggcacggtgggggactgccttgaagggggagacgtcgacggcgaagaagggga

SEQ ID NO: 20078 - DNA, 879 bp, Oryza sativa
  Clone ID: PAT_MRT4530_25478C.1
atgtcgtcgtcgggtgcggctgcggcggcggcggcgacggcggaggaggcggcggcgggcggggagcacgggccgttccccatcgagcagctccaggcatctggtatagctgcacttgatgtgaaaaagctcaaagatgctggtctctgcacggtggagtctgtggtctactcaccaaggaaagaccttctgcaaattaaagggattacttcgaagctggttccactgggatttacaagtgccagccaacttcatgcacagagacttgagattatccaagttacaactggatcaagggaacttgataaaatcttggatggtggaatagaaactgggtccattacagagatatatggtgaatttcgctcagggaagactcagttgtgccacactctgtgtgttacatgtcagctcccattggaccaaggtggtggtgagggaaaagctttgtatattgatgcagagggcacattcagaccacaaagactcctccagatagcagacaggtttgctattatgattgtagatagtgcaacagccttatacagaacagatttctctggtagaggggagctgtcagcaaggcaaatgcacctggccaagtttcttaggagccttcagaagttagcggatgagtttggcgtggcggtggtaatcacgaatcaagttgtggcgcaagtggatggtgctgcaatgtttgggccacagatcaaacctatcggcgggaacatcatggctcatgcttccacaacaaggctttttcttcgaaagggaagagcggaggagcggatatgtaaggtagtaagctctccctgtcttgctgaagctgaggcgaggtttcagatatcaccggaaggcgtcacagatgttaaggactga

SEQ ID NO: 20079 - DNA, 1517 bp, Oryza sativa
  Clone ID: PAT_MRT4530_25479C.1
atgtcgtcgtcgggtgcggctgcggcggcggcggcgacggcggaggaggcggcggcgggcggggagcacgggccgttccccatcgagcagctccaggcatctggtatagctgcacttgatgtgaaaaagctcaaagatgctggtctctgcacggtggagtctgtggtctactcaccaaggaaagaccttctgcaaattaaagggattagtgaagccaaagtcgataagataattgaaggagcttcgaagctggttccactgggatttacaagtgccagccaacttcatgcacagagacttgagattatccaagttacaactggatcaagggaacttgataaaatcttggatggtggaatagaaactgggtccattacagagatatatggtgaatttcgctcagggaagactcagttgtgccacactctgtgtgttacatgtcagctcccattggaccaaggtggtggtgagggaaaagctttgtatattgatgcagagggcacattcagaccacaaagactcctccagatagcagacaggtttgggttgaatggtgctgatgtacttgagaatgtagcttatgcaagagcatataatactgatcatcaatcaagacttttactggaagcagcttccatgatggtggagacaaggtttgctattatgattgtagatagtgcaacagccttatacagaacagatttctctggtagaggggagctgtcagcaaggcaaatgcacctggccaagtttcttaggagccttcagaagttagcggatgagtttggcgtggcggtggtaatcacgaatcaagttgtggcgcaagtggatggtgctgcaatgtttgggccacagatcaaacctatcggcgggaacatcatggctcatgcttccacaacaaggctttttcttcgaaagggaagagcggaggagcggatatgtaaggtagtaagctctccctgtcttgctgaagctgaggcgaggtttcagatatcaccggaaggcgtcacagatgttaaggactgaaaatcccaaaaatcgccttcaggatacagcatgagtttgcagtctatctacagcctgctgtttgcaatcccagtgtggtggacgcttggattgatgtaggccatcctgttcaaccaccacctgcgatagcgccctggaatcctggatggaagtacccatggtttcttcattgacattgctcttgtgtttcagcgggggtgtacagcaagtcgccacaattttggcttggcaccagcgatgttgttgttcactgttgatgttagacgagccagaattagtgtagatagttttatttagctggtccttgttttcttaccgtttgtaaatgtagtttaacgcatgctaggatgttctaacgtcacattgtatcggttagcaaaagttgtattcagagtttcaaacagttttcgtttacatatatacgctaacaggtttgaatttgcaaaaaaaaaaaaaaaaaaaactcgagactagttctctccctcgtgccg

SEQ ID NO: 20080 - DNA, 327 bp, Oryza sativa
  Clone ID: PAT_MRT4530_2547C.1
atgggtcatacctacctccactccgccggaagcagatgcaacgtgggagcacggttgtctgccgatgacgtgaccggcgtgagaccagtcacagaccggtcattcttgtccaccacgcgtcagtttagcatgctgcacgtatgcccttcttcatacaatgacttccttgtaatggttgcgatgaagcctggtatgaatctagccgggactgacgtgctaactccaggagttagcacaccggctccggctagggacgagtgcctagaggctctcatcattccgacgggacggggcgaggcgtgtgacaggccgcctgttgccacctaa

SEQ ID NO: 20081 - DNA, 1170 bp, Oryza sativa
  Clone ID: PAT_MRT4530_25480C.1
atggtgaagaataaagggttcttgcctgcaactccatcagaaatccctatccagcggaaggagattaaagagattatattctccttgcttcctgcttgcaaagatcccgatactgatactggtgctcctttcaatgtaaatgctataatagctaatcctgcagcgtacgggcatgtgcatgtggctgaggctctgaaggtaccaatccacataattttcacaatgccatggacgcctacttgtgaattccctcatcccttctcccgtgtaaaacaacctgcaggatatagactatcataccagattgttgactcctttgtttggcttggtattcgggatattataaatgatcttcggaaaaggaagttgaagttaagaccagttacgtacctaagtagcgcacatgcttattcaaatgatattcctcatgcatatatctggagtccttaccttgtacccaaaccaaaggactggggacccaaaattgacgttgttgggttttgcttcctcgatcttgcttcaaattataaacctcctgaaccccttctcaaatggcttgagagtggtgaaaagcctatttacataggttttggcagccttccaattccagaaccagataagttgacaagaatcatagtggaagcacttgaaattactggacagagaggtatcattaacaagggttggggtggccttggaaatttagaggaacctaaggaatttgtatatgtaatagataacattccacatgactggctttttttgcagtgcaaggctgtggtacaccatggtggtgctgggacaacagctgccagtcttaaggctgcgtgccccactaccatcgtaccattctttggagatcaattcttttggggcaacatggtgcatgctagaggattgggagccccacctgtccctgtggagcaattacaattgcatctactggttgatgcaattaaatttatgatggatccaaaggtgaaggagagagctgttgagctagcaaaagcaattgaatcggaagatggcgttgacggggcagtgaaagcatttttgaaacatctcccacagcccaggagccttgagaagccgcagcctgcaccgccatcgtcaaccttcatgcagccctttctcctccccgtaaagagatgttttggcatcgccacatag

SEQ ID NO: 20082 - DNA, 373 bp, Oryza sativa
  Clone ID: PAT_MRT4530_25481C.1
acttcacgtactacatatgtttacatcagagtactgtagttacatgcaggggaaatgctatacgcaatgcaatattcatactgggagaacggaaaaatcaagtgtggctgatggacaatgatgatgaagtaacaccagaattctactcttgagaatgatcaactgaatcagcgtcggctacatgaggattgccgcaacaatgtgaattttctgcatagtattggtactatcaagaactgatacaatgcatggcgcacactaatgatcctgtacctgcaagcacagaaaagttattgatactgatcaagtgacaggtggcttgataaactgatgatgagtgatgaaatgaagaaatcattgtcatgtagccgga

SEQ ID NO: 20083 - DNA, 583 bp, Oryza sativa
  Clone ID: PAT_MRT4530_25482C.1
ccggccgggatcccctactccaatccttcccccgaacccccaatcccggcggcggcggcggcgaagatgatcataccagtgcgctgcttcacctgcggcaaggtgatcggcaacaagtgggatctctacctcgacctcctccaggcagactacaccgagggggatgctctggatgctttgggcttagtccgttactgctgtaggcgaatgctgatgacccatgttgacctcattgagaagctgctcaactacaacactctggagaagactgagaccactgctggcaattagatgaaccttgcatactccaccgcttcattgcacctagtaccctttagtctagtgtttatgctgtgtttgacacatctaaacaaactcagtgctgctatgcttatgcaaaaagctgttctttgcacattagtgaatatggatggacttgaccatttccaatgtacccaggaattctccagctgtgtttcttctatgtaactgttgctaatgtgttgacagcttgaaagccaactttattctgaatgtcatctcgtcatttcacggcaaaaaaaaaaaaaaaaaatttgcggcc

SEQ ID NO: 20084 - DNA, 1282 bp, Oryza sativa
  Clone ID: PAT_MRT4530_25483C.1
gcaatggaccgtctccctgacgatgtgttcataaaagtgctccgctgcctccctgcaaggatgtgtccaaggaatggtgcactatcatcgacaccaatcggctgctgctcccacatgttctgccacacactcagtgcacggcatcttttccaactaccttgaccatgacatgacgcacttcttctcccgccctagctactccgcgggctgtgggattgatgggtgtttcaagtttttacccattgacgctataggatttaacaaggtactggaccactgcaatggcctcatcctgtaccacggcaaaatctcagaacaatataagctatttgtctgcaaccccgcgacgcatcgatgggtccagcttccaccgttcacagaatatgatagtctatgcattagtgctgagtacctcgtcttcgaccctgcagagtctctgcactatgaggtgttcctgatccctgatttgcctgaaattcctaccaagaagaagtgccacaaaggtccactcgtgggtaaggacgctacagcggaatggccaccgtctgtgcacacattgtgggtattctcgtcgaggactgggaggtgggaggataaggcttttctccatgaaggccacgccaccaacatggcagggacatcattagaggtgctgttggattcaccagacatgatgtcttggggaccgcgatttatacgtgcggagtactggaatggtgcactctacgtgcacttccaaggttcttttgttatgctgtcaattttgggtgctaagtaccgtgtaatcaaaacaccaagatttgatggacctggcggatacacataagatgttcttggaagatcagaaaccgggatatactatgcaaaacgtcagaattttcaacttcgggtgtgggcactcgacgaatcacatgagctgacaaagtgggtggtcaagtatgaatctgatgacgatgacgatgaggaggaagaccaagacagtgctgaatggaactctgatgatgataacatcaacattatcggagaccttagcaagaacaaagaagaggagatgagcatgtggacatttggtagcgttgacttgctggggtttcatccatacaaggaggtcatctacttgatggatttagatgaggtggtagcttaccatctgaggagctccaaggttcagtacttaggttgtaatcgcttaaatgagtacaataggggcatggagaagtcattcttttacaccccttgcttcgtcgatttgattccagaaggtgctcaccaaaaaagttca

SEQ ID NO: 20085 - DNA, 1182 bp, Oryza sativa
  Clone ID: PAT_MRT4530_25484C.1
atgcaggacgacggcgacggcgacgacaacggctgggacatgccctcggataccctcggcgagatcctgcgccacctcccgccgctcgaccggcggcgctcccgcctcgtctgcaggcagtggcgcgacgccgtggactcgcgcgcgccggcgaggccgggccccgccaagacgctcgtcgtcgcgcacggcgcagggtacgtgttcgacgacgtgccgggagggagcagcagggagatcccgtccccctgccctctcgccaacatcgtcggcacgtgcaacggcctgctctgcgtcgtcggcaccggcgccgggttcaccaccggcggcttcgtcttgtccaaccccgtcaccggcgaggcgctgcacgtcccgctgccgaccagaatcggcgcgccgtggagaagatgggagcacaacgagtactacagcttcgcgcaccacccgacgacggggctgtacaagatcgtgcccttccccgtcgacgaccggtggacggggtcgttcgacgcggtgcaggtgtacacgctcggggaggccgcgtcgtggcgggacgtgccggcgcccgccggatcgagccgccgcaagagctgcgggctcgtcagcgtcgacggcttcacctactgggtcgccatggacaccgagaaggtcatgtcgctggacctcaaggacgagcgcatcaccgtcgtgatcacgctgccggcgcccgcgtcggagcctggccgccagtgccgcctgaccgaggcacacgggaggctcgccgtcgccgccatcgtcacccagccgacgaacaccaagacagagtccctccaagtgtgggtgctggagggcggcgcgggcggccggaggtggatccggcggtacagcgtgcagctgcacgggccggaccggcagatggtgtggccgcacttcgcccacggcgaccacgccatgacggcgtcgacgtggcagtattccagaagccacgagttgctgtacgtgcacaggctgagcggcgggaagggcctgcagtgccgggaggcccggatcaacggcaagtcgcccgggaaggccgtcggcaagtacgaccgccgcacctaccgcgatctccggacgttcgccttcgtcgaaaccaccgagccgctgaacgtgtacagtggccatggctgcagacacatcgggaaagaaatttcggccggttga

SEQ ID NO: 20086 - DNA, 772 bp, Oryza sativa
  Clone ID: PAT_MRT4530_25485C.1
ccacgcgtccggaaaactgaaaacagaaaaaggcatgggttgatttttccatttctattcatctgtctgggtttaattgattctgatcgattatgctcgaaagtaaaacgaaaactgaaaacaagaaaaaggcatgggttgattttccaagtctatattcatctgtctaggtttaattgattctgactgatagctcgaaagtaaaaccaaaactgaaaacaagaaaatggagcatggcacatatgcacctaaattccccccaaatctggtgttaatgtctttaagtttacgataccatctgatatcattataccatacatggaagatggagcacacaaatctacaacaaagtaatacagtttattgtttcaggctttgctactgctgtcaaagtgtttgtcagatggtgcagattatcaaatggaaacctactgctactttgacgcggtgaatgtattactctcgttacaggtgattattctgcagcgcagacagtaccacatactatagcatatgatttggacagagttcaccttaaaaaaaaatctactgcccaaataattctctagttccctagaacattaatcatttattttgctatcctatctgttactccctctgtcccaaaaaaaaagtagctatttttggttatgaagccagaaatagctacatttttaggcacagggagtagctaggaaagtaagggccctattcttgaggtcaagtactattcatgtcatcacgtgaacggtgaacagcacccatgggtact

SEQ ID NO: 20087 - DNA, 219 bp, Oryza sativa
  unsure (1)..(219): unsure at all n locations
  Clone ID: PAT_MRT4530_25486C.1
aacaaccccccttttttttttttttttcnaaaaaaaaacaattataactattnacaacccaatntatcttctccgtaaatgatatcaacatggtaatgtcctctcctcntaacatccacaaacatatancataanttcaaggcaccaattcttattccacttacagcaattattcaacccacaaccagtgtgacatccttcccatcaaaacaattcaac

SEQ ID NO: 20088 - DNA, 229 bp, Oryza sativa
  Clone ID: PAT_MRT4530_25487C.1
ggacggccttttttttttttttttttttttccagtaggcttctttaattgatccatactactaaacatccacacgcattcaagcaggaagtagtaccattacatcagggcgattgatattaatttataaaatccaaaaacaattattggctactatatagagagcctacagcgttcgaatacgaagaaagctcctgggacccaaaatcccatagaataactctccatgc

SEQ ID NO: 20089 - DNA, 407 bp, Oryza sativa
  unsure (1)..(407): unsure at all n locations
  Clone ID: PAT_MRT4530_25488C.1
ggggtggggttaattattttgaggagtttttttnncaagggaaaaaaaaagttattttggaaatgcccttttttttttccacaaatttgaattgagaaatggggggataaaagtccatttaataatacatgcttgcttgatttaccagttttttggcccttaaaattaaatcctcttattaagtccttccttttggggatacagatcaattttatttccgaaaaaacccataatccatttggttaaaaaaaattaattcaggctggttgttccccacgtccaataattgggccggccttttttatacaggggttaaggtttttacccacacttccccttttacaaatcctttctggcaatgacggggcgcgccaacaaacgcaccggggaaataagggaattttggg

SEQ ID NO: 20090 - DNA, 195 bp, Oryza sativa
  Clone ID: PAT_MRT4530_25489C.1
atgaatgcatccagcttcgaggtgtcgcactacttccagctcatcttcaagctcatcctgctcgcctacgccgtgctgtgcctcagccagctcctgcacagatggtccaatggcagcagcctcctctccctgtggtccggcagaggcccctgcctgcaaagtctgcagctgcaagatcttcatactgctatttaa

SEQ ID NO: 20091 - DNA, 821 bp, Oryza sativa
  Clone ID: PAT_MRT4530_2548C.1
aggcgccattcgccattcagcaatcagtcctaggccatcacccacagctctggcagatcgccagaccagccgcagcactcgccctcctgccgcggacacccacgcctcctgctgccctctgaccgctgcccttgtcgcgtcgtccacagctgaggagccaccggaggggatccggcctccctcgccagagaggccaaatccggactgggggagccggtgtcgaaatagggggagccatagccggaggcgctcgccgcctccgccgtctcgtcgtcatcgccgccgccgccgccccggagccggcctccttcgtggcccagctgcgggcgttggatccggcctgggagagccagatccagcggcgcccaggctcgctgcctcgtccccgccggcagcgacgtcgcctccgcccgcgccgcgactgccccatccagcggccttctccgccggcgccacgactgccccagccagcgcctcgtcctgatgcagcgcggccggcgccacttcgtcccgatctggctgcgagggggccagatccgctaacagcgacgctggctctgctgcctctggccgtcggcgtcgccggagccgcctcgacgcgtcgccgcccctccgcctgtttcccgtcggggccccaaccgcagggtgttggagggggtagaaggccccgccgccgccgtccttgccgccgtccggctttgccggcggctgctcaggcggcggcgagaaaaggaaaaggaaaagtttgatatacgagtgaacttattttcagtgaaaaaaaactaattaataggtgctaggccttgttaagttcagcgtgt

SEQ ID NO: 20092 - DNA, 1107 bp, Oryza sativa
  Clone ID: PAT_MRT4530_25490C.1
atgtctacggatttccgggatttccagcagttggtggacaaggcgattcgtcaggaagacaagtataaccggatggagcagaagaagcgcagggctgcccaattcaaggcacaacagggcagtaaccagaggccgcgtctcgttacgggacctcaagctccatcgtaccctcaaggaggatcttcatcagttgtccgcccccaacgccagttctacaacaacaatactggtaatcgtggtaatgacaaccgcaacatggttgctcgtcctgcagcaactccagctcagaaccagcccgtcaggaaggaacagggaagcaagccaggggtgtgcttcaattgtggtgatccaggacattatgctgataagtgtcctaagcctcggcgcgtgaagaacgctccagccccgaataactccaatgctccagcaccaaaggcacgtgttaatcatgttgcagcagcagaagctcagaatgcaccagatgtggttttggggtattaccgcaggtttattgagaacttttcaaagatcgccagaccaatgactcgtctgcttcagaaggaagtgaagtacaagcaattacgtcctcatgagaataactacccaacgcatgacctagaattggcagctgtggtgcatgcattgaagatttggctttcgaagaaggagattatgtataccttcgggttacgccgttacgaggcgggtgatcaggtttttgaggagtgcttccgcatgactgctcctcgtcttctgttcgtcgtcgtcgtctgctacaccatgtctggtgcctccgcagctgccgcgcctagagatggaggcgcactaggagccggagccgctgcgaacgaaaacatcaacggaggcagttctgcctcacaatccagcggagggacattcacagggttaataaaaggtgcaccctgctgtgacgagcccagggtggcctcagccctgaagtccggtggaggcagcggtggcggcggccacgacctcccctccaccaaatctggccacaggggaggcggcgagatgggaggcagcgatggcgcctgcgtcctcccctccgccagatccggtggtgttttcccaatcggggctcattag

SEQ ID NO: 20093 - DNA, 4411 bp, Oryza sativa
  Clone ID: PAT_MRT4530_25491C.1
gtcgccctcttttgtttgccccctttcccgagctctctagtgccccgtggagtcgccgccgcgccgccctagtcgccgccatcgccggccgccgctcagccgcgccgcgccgccgcttgcgtcgtcgccgccgccttttctcgccgccgttaggtgcgcgtgagggagagctagctcggccgccccctctccgctgtcgtcggtcgccgtgaagccgccgccaccgttgaccgatccgccgccgccacataacctggtcgccggccaccatccgtcgtcgttcgtcgcgttggtgagtaccgttgagatcgcgtcttcgccctctacgcgtaggtgccctccaatagtccggccgagcctccgtagcgccggcgaggtcgtgccggctttatcttttgtatagcatgattcattatagtgtgctagactgtgaagcggcgagaagtccgtgggggtcgctggggagtccattgcctctggttttgagggggagattatgatccaggaacggtgcactgtgatgccgccccattcaccgagaaatttgatcaaggtgttaggattcgtcagggagctgaggttgatggcttttgagtatcatcctcacaagcctcatggtcaagattatggaacttacacctatcctgatggtgaggagagtgccactctgatgcaggcggtgcatatgcttagttctatgtatgcagtaagtgtggagcgagacaaagccgctcatgacagggaaaactggaatcgaggcaagatttgcaagttggagagtaaggtgtaccgtctacagaaggaattagctgagcttaaaggagagacgccgccgccaacacccaagcttcacctcaccgcaaggaagagaacctgtccaccacctcgtctccagttagcttcgaagcttcgcgtgatgggagatgctgtgccagatcgtgctgaacctgtcatccacgtcttaagtgatgaggaagaagaggaatacccagaagaaagaatggtgaacacgcgcactggaagtggaagtggagctgctaacaatggaggagattccacgctagctcagattttggcccaacaaacacaactgatcaatctgttagtgcagcaggcacagaatcagcaggcaaacaaccagaaccagaatcaacccccacctccccaaaacaagttggcagatttcttacgtctgcatggtcccgctgctgaatggtgggatcactttcgccaagccagggctgaaggagaacctatcacttggcaggaattcacggccgctttcaagaacacgcacataatgacaggtgttgtagctctgaagaagagagaatttagagcgctcaaccagggatctcgttcggtcactgagtacctccatgatttcaatcgtttagctcgctatgctccaaaatatgttcgcaccgatgaagaacgtcaggagaagtttttggagggactgaatgatgagttgtcttatgctttgatgtctacggatttccgggatttccagcagttagtggacaaggctattcgtcaggaagacaagtacaatcgaatagagcagaagaagcgcagggctgcccaatttaaggctcaacagggcagtaaccagaggtcgcgtctcgttacgggacctcaagctacatcataccctcaaggaggatcttcgtcagttgctcgccctcaacgccagttctacaacaacaatactggtaatcgtggcaatgacaaccgcaacgtggtcgctcgtcctgcagcaactccagctaagaaccagcctgtcaggaaggaacagggaagcaagccaggggtgtgcttcaattgtggtgatccagggcactatgctgataagtgtcctaagcctcggcgtgtgaagaacgctccagccccgaacaactctaatactccagcaccgaaggcacgtgttaatcatgttgtagcggcagaagctcagaatgcaccagatgtggttttgggtatgccacctaagagagacatagagttccggatagacttggtccctggaaccaaccctatccataagagaccttacagaatggcagctaatgagttagctgagataaagaggcaggtggatgatttgcttcagaaaggatatatcaggcccagtacttcgccgtggggagcaccagtcatctttgtggagaagaaagatcatactcagagagtgtttatggaatatctggataagtttgtcgtggtgtttattgatgacattcttatttactccaagacaaaagaagaacatgaagagcatcttcgtctagctttagagaaactacgtgagcatcagctctatgccaagttcagtaaatgtgaattttggttgtctgaagtgaagtttcttggtcatgtcatctcatccggaggagtggcagtagatccaagcaatgtggagtcagtgttaaattggaagcaacccaagacggtttcagaaattcgtagtttccttggacttgcggggtactaccgcaggtttattgagaacttctcaaagatcgccagaccaatgactcgtctgcttcagaaggatgtgaagtataagtggacagaagattgcgagcaaagtttccaagaactgaagaaaaggctagtgactgcgcctgtgttaattctgcctgattcaaggaaaggttttcatgtgtattgtgatgcatcccgactcggtttgggttgtgttttgatgcaagaaggaatggtggttgcctatgcatctaagcaattacgtcctcatgagaataactacccgacgcatgacctagagttggcagctgtagtgcatgcattgaagatttggcgtcattatcttttcggtaaccgtacagagatgtatacggatcataaaagtttgaaatggttagagttgattaaagattatgatatggaaatccattatcacccgggtaaagcaaatgttgtagccgatgccctcagcaggaaaagctattgtaatatgtcagaaggtcgacatctaccttgggagttatgccaagaatttgaaaagctgaatttggggatagtcagcaaaggttttgtggctgctttagaagctcaacctaccttgtttgatcaagttagagaagctcaagggaatgatcctgacatccaagaaatcaaaaagaacatgagaagaggaaaagccatcggttatgtagaagatgagcaaggaactgtgtggttaggagaaagaatttgggtacctgataacaaggagttgaaggataccatcgtgaaagaagctcatgaaactttgtattccattcaccctagaagcactaagatgtaccaagacctaaagcaacaattctggtgggctagtatgcgacgtgagatagcagaatatgtggctctatgtgatgtatgtcagcgagtcaaggctgaacatcagaagccagccggtctgttgcaaccattgaagattccagagtggaagtgggaagaaatagagctatacatggccagagtggtatgtttgcatggagttcccaagaagatagtgtcagatagaggtagtcagtttacctcgaagttttggcagaagctacaagtagagatgggtacccgtttgaatttcagtaccgcttatcaccctcaaacagacggtcagacagaaagagtaaaccaaattttagaagacatgttgagaccatgtgttctagattttggtagaagttgggataagaatttgccgtacgcggaattctcatataacaacagttatcaagctagtttgcaaatggctccgtatgaagcattatatggccgaaagtgtcgtacgccgctcttgtgggatcaaaccggtgagcgtcaagtttttgggacagacatattgcgagaggcagaagaaaaagtgaagattatccaagaaaggttgcgcgttgctcagtcacgtcagaagagctatgccgacaatcgtcgcagagatttgactttcgaaggagattatgtgtaccttcgggttacgccgttacgaggtgttcatcgtttccagaccaaagggaaattggcaccgcgtttcgtgggaccttttaagatcgtaagtcgaagaggtgaagtagcttatcagctagagttgcctccgtcaatggcgggaatacacgacgtgttccacgtgtcacagttgaagaaatgtttgcgtgtacctacggaggaagcagatccggaacatatagagcttcaagaagatttaacctatgttgagaagccagtcagaatcttggaagtaagtgagaggaataccaggaatcgcgttatacggttctgtaaggttcagtggagcaatcattcagaagaagaagccacttgggagcgagaagatgaattaaagtcagctcaccctcatctcttcgccggttcttctgaatctcgaggacgagattccgtttaa

SEQ ID NO: 20094 - DNA, 310 bp, Oryza sativa
  Clone ID: PAT_MRT4530_25492C.1
tatcattaactccaatgtaagatccgcaagagaatagtctaatgggaggtaaaggtaccactaaaattaaagtatttatgtggttccttaaaaaaataatcttaacgaaagataaccttataaagagaaaatggaggggaaacaagcaatgttgttttttaatacacaagagaccatccaacatctctttctttgactgtcatgaacaacagaatactatgcgcaatggtgctgcacgcttggaattggtaaccaaagaacttttatttcagtttggattccacgtttctgtgtaaaccgggctgagtcg

SEQ ID NO: 20095 - DNA, 797 bp, Oryza sativa
  unsure (1)..(797): unsure at all n locations
  Clone ID: PAT_MRT4530_25493C.1
aatcggcacgagggagagaactagtctcgagttttttttttttttttttttttttttttttttttttttttttttgaatccgaaatatggaaatgagattcaatattgttccagtaaagaatgatggttaggtacaaaaaggggtttttctcctgcaatctaattgtcagttccgacgaatttgtcagaatgtgatatacacaggggccctgccagagggcttcttcaagcttgctgattaagatgactgaccttttatgttgaacaacaatacaattgattgggccttacacattaatactcaacctttgggaaccaaagaaatgacaaggaagaaaaaaaaatgtacagtagttttgcacaaattttccttttccctcctttaccttttcttttgcttgatgggttggctgcttttctaagctcggcatttctttgcctgtggaaaatttacagtgtattcggacgggtggacaaaaatagaacttcacctttttcaccttagccatgcatttgatgttgctatacaaaataatggtatagttacaggtgggcagttactggaaggcatgaaagaccaaggcaccttgttttaacgttgtcgcctggtgttgacctccattttcttagccatctgctcgttgcactcgctgcctttggggttgattggcaagcgtgtttttcaataatggttcgaacgacggcatgatctctgaaaatgatggattcatccttgggtctggtcgccagcatctccttattatctctgctatggngggatccacatgagctggaat

SEQ ID NO: 20096 - DNA, 3960 bp, Oryza sativa
  Clone ID: PAT_MRT4530_25495C.1
atggcttttgaagtaggcaatgaagttgctcccgagtatcgccggatttcccatgaccccaacgaggagaagtgtcgtgttcgtgtgacgttggctagtgatcgtgaagaccttccgtccattaagttcgaagctggaggaagaacgtatagccatgcttgtcaagaagctgctttggtggccattggagatttgcgtcaacgctttgaagaggagttggattcatcagctttccagtatcatccccacaagccccatgtgcatatgcttagtgctatggatgcagttagtgtggagcgagacaaagcagctcatgacagggaaaactggaatcgaggcaagatttgcaagttggagagcaaggtgtaccgtctacagaaggaattagctgagcttaaaggagaaacaccgccgccaacacccaagcttcgcctcactgcaaggaagagaacctgtccaccaccctgtctccagttagcttcgaagattcgcgtgatgggagatgccgtgcctgactgtgctgaacctatcatccacatcttaagtgatgaggaagaagaggaagatccagaggaaagaaaagcacagaatcaggaggcaaacaaccagaaccagaatcaaccccctaccttttcaagcaccactaaccccgtagaagcaggagattggttgcatgcagtggagaagaagttggatttgatccagtgtacgaagcaggaaaaagtttctttcgcttcgcatcagctgcatggtcccgctgctgaatggtgggatcactttcgccaaggcagggctgagggagagcctattacttggcaggaatttacggctgctttcaacaagacgcacataccgacgggtgttgtagctctgaggaagagagaatttagagcgctcaaccagggatcccgttcggtcatcgagtaccttcatgatttcaatcgtttagcccgttatgctccggaagatgttcgcaccgatgaagaacgtcaggagaagtttttggagggactgaatgatgagttgtcttatgctttgatgtctatggatttcagggatttccagcagttggtggacaaagcgattcgtcaggaagacaagtataatcgaatggagcagaagaagcgcagggctgcccaatttaaggctcaacagggcagtaaccagaggccgcgtctcgttacgggacctcaagctccatcgtaccctcaaggaggatcttcattagttgtccgccctcaacgccagttctaccacaacaatactggtaaccgcaccaatgacaaccgcaatatggtcgctcgtcctgcagcaactccagctcagaaccagcccgttaggaaggaacagggaagcaagccaggggtgtgcttcaattgtggtgatccaggacattatgctgataagtgtcctaagcctcgacgtgtgaagaatgctcccgccctgaagaactgcaatactccagcaccgaaggctcgtgttaatcatgttgcagcggcagaagcccagaatgcaccagatgcggttttagatgttatcttagggatggattggttatctcgtcatagaggagttatagattgtgccaatcgtaaggtgactttaaccagtagcgatggggaaaccgtttctttctttgcgtcctctcctaaatctcatggtgtgaccttaaaccaagttgttctacaagagatcccagtagtacaagactacccagatgtgtttcccgaggatttgccaggtgctacagttttctccaagatagatctccgttcgggatatcatcaacttcgaatccgtgaggaagatataccaaagaccgcctttacaactcggtatggtttgttcgaatgcacagttatgtcgtttggactcactaatgccccggccttgttcatgaatctgatgaacaaggtgtttatggaatatctggataagtttgtcgtggtgttcattgatgacattcttatttactccaagacaaaagaagaacatgaagagcatattcgtctagctttagagaaactacgtgagcatcagctctatgccaagttcagtaaatgtgaattttggttgtcggaagtgaagtttcttggtcatgtcatctcatctggaggagtggcagtagatccaagcaatgtggagtcagtgttaaattggaagcaacccaagacggtttcagaaattcgtagtttccttggacttgcggggtactaccgtaggtttattgagaacttctcaaagatcgctagaccgatgactcgtctgcttcagaaggaagtgaagtacaagtggacagaagattgtgaacaaagtttccaagaactgaagaaaaggctagtgactgcgcctgtgttaattctgcctgattcaaggaaagaaggaaaggtggttgcctatgcatctaggcaattacgtcctcatgagaataactacccaacgcatgacctagagttggcagctgtagtacatgcattgaagatttggcgtcattatcttttcggtaaccgtacagggatgtatacggatcataaaagtttgaagtacattttcactcaacctgatttgaacatgcgtcagcgaagattgttagagttgattaaagattatgatatggaaatccattatcacccgggtaaagcaaatgttgtagccgatgccctcagcaggaaaagctactgtaatatgtcagaaggtcgacatctaccttgggagttatgtcaggagtttgaaaagttaaacttgggtatagtcagcaaaggttttgtggctgctttagaagctcaacctactttgtttgatcaagttagagaagttcaagtgaatgatcctgatatccaagaaatcaaaaagaacatgagaagaggaaaagccatcggttatgtagaagatgagcaaggaactattccagagtggaagtgggaagaaataggtatggacttcataaccggtctacccagaacgtcggcaggacatgattctatttgggtagtggttgacagattgactaaagtcgctcatttcatacctgtcaaaacaacctacacggcgaacaagcttgcagagctatacatggccagagtggtatgtttgcatggagttcccaagaagatagtgtcagatagaggtagtcagtttacctcaaaattttggcagaaactacaagtagagatgggtacccgtttgaatttcagtaccgcttatcaccctcaaacagatggtcagaccgagagagtaaatcaaattttagaagacatgttgagagcctgtgttctagattttggtggaagttgggataagaatttgccatacgcggaattcccatataacaacagttatcaagctagtttgcaaatggctccgtatgaagcattatatggccgaaagtgtcgtacgccgctcctgtgggatcaaaccggtgagcatcaagtttttgggacagacatattgcgagagccagaagaaaaagtgaagattatccaagaaaggttgcgcgttgctcagtcacgtcagaagagctatgccaacaatcgtcgcagagatttggcttttgaagaaggggattatgtataccttcgggttacgccgttacgaggtgttcatcgtttccagaccaaagggaaattggcatcgcatttcgtgggaccttttaagatcgtgagtcgaagaggtgaagtagcttatcagctagaattgcctccgtcaatggcgggaatacatgacgtgttccacgtgtcacaattgaagaaatgtttacgtgtacctacggaagaagcagatcctgaacatatagagcttcaagaagatttaacttatgttgagaagccagtcagaatcttggaatttccgacgttccggaggagagcgtttctgttgaggaaggttccgaagcgtttgtggaagcccaaggcaagtcacacagatcccaaacaaccctttgagcatgttgaacccgtgtaa

SEQ ID NO: 20097 - DNA, 3426 bp, Oryza sativa
  Clone ID: PAT_MRT4530_25497C.1
atggtgaacacgcgcaccggaagtggaagtggaagtggaagtggagctgctaacaatggaggagatcccacgctagctcagattctggcccaacaaacacaactgatcaatctgttagtgcagcaggcacagaatcagcaggcaaacaatcagaaccagaatccatccccacctccccaaaacaagctggcagatttcttacgtgtgagaccccctaccttttcaagcaccaccaatccagtagaagcaggagattggctgcatgcggtggagaagaagttggatttgatccagtgtactgagcaggagaaagtttcttttgcttcgcatcaattgcatggtcctgctgctgaatggtgggatcattttcgccaaggcagggctgaaggagagcctataacttggcaggaattcacggccgctttcaagaagacacacataccaacgggtgttgtagctctaaagaagagagaatttagagcactcaaccagggatctcgttcagtcaccgagtacctccatgatttcaaccgtttagctcgttatgctccggaagatgttcgcaccgatgaagagcgtcaggagaagttcttggagggactgaatgatgagttgtcttatgccttgatgtctacggatttccgggatttccagcagttggtggacaaggcgattcgtcaggaaaacaagtataaccggatggagcagaagaagcgcagggctgcccaattcaaggcacaacaaggcagtaaccagagaccgcgtctcgttacgggacctcaagctccatcgtaccctcaaggaggatcttcatcagttgtccgcccccaacgccagttctacaacaacaatactggtaatcgtggtaatgacaaccgtgacatggttgctcgtcctgcagcaactccagctcagaaccagcccgtcaggaaggaacagggaagcaagccaggggtgtgcttcaattgtggtgatccaggacattatgctgataagtgtcctaagcctcggcgcgtgaagaacgctccagccccaaacaactccaatgctccagtgccgaaggctcgtgttaatcatgttgcagcagcagaagctcaaaatgcaccagatgtggttttggacgtgtttcccgaggatttgccagctaatgagttagctgaggtgaagagacaggtggatgatttgcttcagaaaggatacatcagacccagtacttcgccatggggagcaccagtcatctttgtggagaagaaaaatcatactcagagaatgtgcgtggattatcgagcgttgaatgaggttactaccaagaataagtatcctctacccagaattgatgacctgtttgatcaactggaaggtgctacagttttctccaagatagatctccgttctggatatcatcaacttcgaatccgtgaggaagatataccaaagaccgccttcacaactcggtatggtttgttcgaatgtaccgttatgtcatttggactcactaatgccccagcctttttcatgaatctgatgaacaaggtgtttatggaatatctggataagtttgtcgtggtgtttattgatgacattcttatttactccaagacgaaggaagaacatgaagagcatcttcgtctagctttagagaaactacgtgagcatcagctttatgccaagttcagtaaatgtgaattttggttgtccgaagtgaagtttcttggtcatgtcatctcatctggaggagtggcagtagatccaagcaatgtggagtcagtgttaagttggaagcaacccaagacggtttcagaaattcgtagtttccttggacttgcggggtattaccgcaggtttattaagaacttttcaaagatcgccagaccaatgactcgtctgcttcagaaggaagtgaagtacaacaaaggttttgtggctactttggaagctcaacctactctgtttgatcaagttagagaagctcaagtgaatgatcctgatatccaagaaataaaaaagaacatgagaagaggaaaagccatcggttatgtagaagatgagcaaggaaccgtgtggttaggagaaagaatttgcgtcccagataataaggagttgaaggatactatcatgaaagaagctcatgaaactttgtattccattcaccctggaagcactaagatgtaccaagacctaaagcaacaattctggtgggccagtatgcgacgtgagatagcagaatatgtggctctatgtgatgtatatcagcgggtcaaggcaaaacatcagaagccagccgtgaagaaatgtttacgtgcacctacggaggaagcagatcctgatcgtatagagcttcaagaagatttaacttatgttgagaagccagtcagaatcttggaactcatcctcatctcttcgccagttcttctgaatctcgaggacgagattccgtttaagggggcctcgccgccgtcgccgcctagtccacgccgccgccggccgagctccatccggcgccgcgccgccgcctccaccatcaccgtcgcttgccgtcgccgccattgttttcgccaaggggtggggaagcccggtcgcacctccgccctcgccgccggccgtcggagccccgtcgccgccgccgaccatccaatctccggcgaggtcgccaacccgggccggccattgatgatactgagaagcggcgagaagtccgtgtgggtcgctggggagtccatgcctctagttgtagagggggtgattatgatccagatagaaattttgggcgtgacagcttctgagccatacacgaggaagaagggtctctccttgttggacgttgtcggtgtgcactatgccgtttgccctttcgacttgtccattgctctgagggtgagaaaccgaggcgaagcaaatcttgactcccaatccaatacagtaatcctggaagtcagcgctgatgaactgagagccgttgtctgttatgatgcggtgaggcaatccatatctgcagaatatccctttgacaaacttgatggcattatcggccttgatttctcctgtgggcgttgcctcaatccacttggtgaatttgtcgatggacacaaacaggaacttgtggccgccttgtcctcgtgggaatggtctgagtatgtcgagccccagcacgagaacggccaagaggagatgtttgccgtcgtcggacgagatgcatttgagaagtactccgtttggagcctttttgtacagatctttgccgatcatacagtagattttggcttgtcgggttatcttctcagcttctctgtcgtcttcgggcaactcatcactactcagcaacttaatgagcggggtccgccagtcttccgtggtcttgatatcggcaacgacgtgttccgcctctgtagcccccgaaatacatcctcgaaattgtgccgagaataa

SEQ ID NO: 20098 - DNA, 2841 bp, Oryza sativa
  Clone ID: PAT_MRT4530_25498C.1
atgtgcgtggattatcgagcgttgaataaggttactatcaagaataagtatccgttacccagaattgatgacctgtttgatcaattggaaggtgctacagttttctctaagatagacctccgttctggatatcatcaacttcgaatccgtgaggaagacataccaaagactgccttcacaactcggtatggtttgtttgaatgtaccgttatgtcatttggactcactaatgccccagcctttttcatgaatctgatgaacaaggtgtttatggaatatctggataagtttgtcgtggtgtttattgatgacattcttatttactccaagacgaaggaagaacatgaagagcatcttcgtctagctttagagaaactacgtaagcatcagctttatgccaagttcagtaaatgtgaattttggttgtccgaagtgaagtttcttggtcatgtcatctcgtctggaggagtggcagtagatccaagcaatgtggagtcagtgttaagttggaagcaacccaagacggtttcagaaattcgtagtttccttggacttgcagggtattaccgcaggtttattgagaacttttcaaagatcgccagaccaatgactcgtcttcttcagaaggaagtgaagtacaagtggacagagagttgcgaacaaagtttccaagaactgaagaaaaggctagtgactgcgcctgtgttaattttgcctgattcgagaaaaggtttccaagtgtattgtgatgcatcccgacacggtttgggttgtgtgttgatgcaagaaggaaaggtggttgcctatgcatctaggcaattacgtcctcatgagaataactacccaacgcatgacctagagttggcagctgtggtgcatgcattgaagatttggcgtcattatcttttcggtaaccgtacagagatatatacggatcataaaagtttgaagtacattttcactcaacctgatttgaacatgcgtcagcgaagatggttagagttgattaaagattatgatatggaaatccactatcacccggggaaagcaaatgttgtagccgatgcccttagtaggaaaagagctaaacctactctgcttgatcaagtgagagaagctcaagtgaatgatcctgatatccaggaaataaagaagaacatgagaagaggtaaaagccatcgttttgtagaagatgagcaaggaactgtgtggttaggagaacgaatttgtgtcccagataataaggagttgaaggatactatcatgaaagaagctcatgaaactttgtattccattcaccctggaagcactaagatgtaccaagacttaaagcaacaattctggtgggctagtatgcgacgtgagatagcagaatacatggctctatgtgatgtatgtcagcgggtcaaggcagaacatcagaagccagctggtctgttacaaccgttgaagattccagagtggaagtgggaagaaataggaatggattttataactggtctacccagaacatcggcaggacatgattctatttgggtagtggttgataggttgacaaaagtcgctcacttcataccggtcaaaacaacctatacggggaataagcttgcagagttatacatggtcagagtggtatgtttgcatggtgttcctaagaagatagtgtcagatagaggtagccagtttacttcgaagttctggcagaaattacaatcagaattgggtacccgtttgaatttcagtactgcttatcaccctcaaacagatggacagacggaaagagtaaaccaaattttagaagatatgttgagagcttgtgttctagattttggtggaagttgggataagaatttgccgtacgaggaattctcatataacaatagttatcaagctagtttgcaaatgtctccgaatgaagcattatatggtcgtaagtgccgtacgccgcttctttgggatcaaaccggtgaacgtcaagtttttgggaccgacatattgcgagaggcagaagaaaaagtaaagattatccaagaaaggttgcgtgttgctcagtcgcgtcagaagagctatgccgacaatcgtcgtagagatttagtttttgaagaaggagattatgtgtatcttcgggttacgccgttacgaggagttcatcgtttccaaaccaaagggaaattggcaccgcgttttgtaggaccttttaagatcgtgagtcgaagaggtgaagtagcttaccagttagaattgcctccgtcaatggcaggaatacatgatgtgttccacgtgtctcagttgaagaagtgtttacgtgtacctacggaggaagcagatcctgatcgtatagaacttcaggaagatgtaacttatgttgagaagccagtcagaattttggaatttccgacgttctggaggagagcgtttccgttgaggaaggttccgaagcgtttgtggaagcccaaggcaattgcttctgaatttgaggggattgttgagcatgagaaaatggttgcattagatgctttaactcaaactagaactgtggctaagtataaacatcaatttgattcactggtttatcggattagagtatttgatccatcaggcatgatgttggtgactcgctttcttggtggtttgaaggatgagattcgttttgcagtagtggttcaacttgatacacttcagcaggcagttgctattgcacttaagcaagaaactgtgttggcagagaaggctactaaaactaagggcaagtttgttaagtatacttgtcctaaacctgattttggtgctgagacaacccctgctcgatctgacaaaggagatctttggaaatctagatag

SEQ ID NO: 20099 - DNA, 713 bp, Oryza sativa
  Clone ID: PAT_MRT4530_25499C.1
gattctgcttggggccggaacatcaccaactcgtcaccctctcccttctcaccgagttatttatgagctccgagtttactctcttgaggaggcaacgtttggcaaagttcttacatcaagagcgataagggcagctcattgcttaacttccatccagttctcacccacttcagagcacatactattggcatatggtcgtcgtcataactctatgcttaggagcattgtgatggatggggaaactggaattcctgtatatactatcttggaggtctatagagtatcggacatggagctggtaagagttcttcctagtgctgaagatgaagtaaacgttgcatgctttcatccttcccctggaggtggtcttgtttatgggaccaaggaaggaaagctcaggatcttgcagcacaatggtgcagatatcacaagcacagggttgaattgctttatcgaggaaaatatgcttgagattcagagatatgcgctggaaggctgaacgattggttgccatgtgttatgtgtacttctccaggtctgtgcagagggagttggaagatgtaaatcaacacaaccatgttgctgctgtcaagtcatcacgatgctgtaattacagaattgtacatgtaatctttaatcaacttaacttgtattttagaaagcacacaatgctaacccttttcttttcaatggcagaggtatttattggttcc

SEQ ID NO: 20100 - DNA, 1120 bp, Oryza sativa
  Clone ID: PAT_MRT4530_2549C.1
gcgcccccccggggggcgcctcgatcgccgcgtgcggtgctgtgcgagcgccccaacccgcacccccccggggcgggaccccccgcacggcgcgacgcaccagcccctgccggcacgggtctggccacttctcactagctcgtagacagtgctgcacgtgggttagctacttagctctttctctgcattgctggcttaattttgcagctgcaggtgtgctcgatccccatggctgatcagcacagaggagtgatcggcggcggcggctacggtgaccgtggtggccaggagcagcaggagaagcagcccttcatgatgacggctctgaagacggtgaccgcggcgacggccgggggctcgatgctggtgctgtccgggctgatcctggccggcaccgtcatcgcgctcacggtggccaccccggtgctggtcatcttcagccccgtgctggtgccggcggccatcgcgctggcgctcatggcggccgggttcgtcacctcgggcgggctcggcgtggccgcgctctccgtgttctcgtggatgtacaagtacctcaccgggaagcacccgccgggcgccgaccagctggaccacgccaaggcgaggctcgcgtccaaggcccgcgacatcaaggaggcggcgcagcaccgcatcgaccaggcgcaggcgtcttagggcggcctgccgcggcgaggcgccgcttctgctagctagctcgatcgggcggcgcacgggacggcgccggccggcgcgcgtgcgttcgccgtggccacgcccacgctggctactcctcttatctgctgagctctgtaaatgcatgcgtacatgtttaattaagcttggtcgcgtagtactctcctatgtaatatgtcccctagattatctaagaggcgatcgtgcatgtcgggcgcctggtacgtgtggtctggtggatgtcgtgtttatggtcatgatgaataaaatgcagtgttccttcgataaaaaaaaaaaaaaaaaaaaaaaacaaaaacgccctctctgagtctctcaatctctctcacgctctctctctctctctctctctctctctctctctctctctctctctctctctctctctctctctctctctctctctctc

SEQ ID NO: 20101 - DNA, 221 bp, Oryza sativa
  Clone ID: PAT_MRT4530_254C.1
ggtatattgtaattaaaatacaaacaagtagaaaagtttacatatcgagtcaaaggcttaatttccattggttacaacaaactaaaaaaaacagcaggaaaaatagacaaaatgaccaatttttaccaatcaaaataaatagattctaacttgttcaggggggcggccttttaagaatggcctcgatcctccaaagtatattacttaaaagcttactcaac

SEQ ID NO: 20102 - DNA, 3453 bp, Oryza sativa
  Clone ID: PAT_MRT4530_25500C.1
atgatgccgccccgttcaccaagaaatttgatcgaggtgttaggactcgtcagggagctgaggttgatggcttttgaagtaggctatgaagttgctcccgagtatcgccagattccccatgaccccgacgaggagaaatgtcgtgttcgtgtgacattggctagtgatagtgaagatcttccatcttttaagtttgaagctggaggaagatcgtactgccatgcttgtcaagaagtagctttggtggccattggagagttgcgtcaacactttgaagaagaattggattcatcagctttccagtatcatcctcacaagcctcatggtcaagactatggatcttatacctgtcctgatggcgaagagagtgctactctgatgcatgtggtgcatatgcttagtgctatggatacagtaagtgtggagcgagacaaagcagctcatgacagggaaaattggaatcgaggcaagatttgcaagttgaagagcaaggtgcaccgtctacagaaggaattagctgaacttaagggagagatgccgccgccaacatccaagcttcgcctcactgcaagaaagagaacctgtccgccccctcgtctccagttagcttcgaagattcgcgtgatgggtgaagctgtgcccgatcgtgctgaacctgtcatcgacatcataagtgatgaggaagaggaggaagatcctgaagaaagagagccagctactccagaggaagaagattcatcgcttcgttccgacgcaagagtgatggtgaacacgcgcactggaagtggaagtggaagtggagctaataacaatgagggagaacctacgctagcccagattttggcccaacaaacacaactgatcaatctgttagtgcagcaggcacagaatcagcagggaaataatcagaaccagaatccaccccctcctccccaaaataagttggcagatttcttacgtgtcagaccccctaccttttccagcacaaccaatccagtagaagcaggagattggctgcatgcggtggagaagaagttggatttgatccagtgtactgagcaggagaaagtttcatttgcttcgcatcaattgcatggacctgctgctgaatggtgggatcattttcgccaaggcagggctggaggagaacctatcacttggcaggagttcacagctgcttttaagaagacgcatataccgtcaggtgttgtagctctaaagaagagagaatttagagcactcaatcagggatctcgttcggtcacagaatacctccatgatttcaaccgtttagcacgctatgctccagaagatgttcgcactgatgaagagcgtcaggagaagtttttggagggactgaatgatgagttgtcttatactttgatgtctacggaatttcgggatttccagcagttggtggacaaggcgattcgtcaggaagacaagtataaccggatggagcagaagaagcgcagggctgctcaatttaaggcacaacagggcagtaatcagaggccgcgactcgttactggacctcaagttccatcgtaccctcaaggaggatcttcatcagttgtccgtccccagcgccagttctacaacaacaatactggtaatcgtggcaatgacaaccgcaatgtggttgctcgtcctgcagcaacttcagttcagaaccagcccgtcaggaaggaacagggaagcaagcccgtgatatgcttcaattgtggtgatcctggacattatgctgataagtgtccgaagcctcggcaatccaaagatctagatgttatcctagggatggattggttatctcgtcacagaggagttatagattgtgccaaccgtaaggtgactgtaaccaatagcaatggggaaattgtttctttctttgcatcctctcctaaatctcatggtgtggtcttaaaccaagttactttacaagagattcctatagtgcaagactacccagatgtgtttccggaggatttgccaggtatgccacctaagagagatatagagtttcggatagacttggtacctggaactaacccaatccataagagaccgtacagaatggcagctaatgagttagctgaggtgaagaagcaggtggatgatttgcttcagaaaggatacataagacccagtacttcgccatggggagcgccagtcatctttgtggagaagaaagatcatactcagagaatgtgcgtggattatcgagcgctgaatgaggttactattaagaataagtatccgctacccagaatcgatgatctgtttgatcaattgaaaggtgctacagttttctccaagatagatctccgttctggatatcatcaacttcgaatccgtgaggaagatataccaaagactgccttcacaactcggtatggtttgttcgagtgtactgttatgtcatttggactcactaatgccccagcctttttcatgaatctaatgaataaggtgtttatggaatatctggataagtttgtcgtggtgtttattgatgacattcttatttactccaagacgaaggaagaacatgaagagcatcttcgtctagctttagagaaattacgtgagcatcacttttatgccaagttcagtaaatgtgaattttggttgtccgaagtgaagtttcttggtcatgtcatctcatctggaggagtggcagtagatccaagcaatgtggagtcagtgttaagttggaagcaacccaagacggtttcagaagttcgtagtttccttggacttgcagggtattaccgcaggtttattgagaacttttcaaagatcgccagaccaatgactcgtctgcttcagaaggaagtgaagtataagtggacagaagattgcgagcgaagtttccaagaactgaagaaaaggctagtgtctgcgcccgtattaattttgcctgattcgaggaaaggtttccaagtgtattgtgatgcatctcgactcggtttgggttgtgtgttgatgcaagaaggaaaggtggttgcttatgcatctaggcaattacgtcctcatgagaataactacccaacgcatgacctagaattggccgctgtggtgcatgcattgaagatttggcgtcattatctttatggtaaccgtacggagatatatacggatcataaaagtttgaagtacattttcactcaacctgatttgaacatgcgtcagcgaagatggttagagttgattaaggactatgatatggaaatccattatcatccggggaaagcaaatgttgtagccgatgcccttagcaggaaaagctactgtaatatgtcagaaggtagatgtttaccttgggagttatgccaagaatttgaaaagttaaacttgggaatagtcagcaaaggttttgtggccgctttggaagctaaacctactctgtttgatcaaattagagaagctcaagtgaatgatcctgatatctag

SEQ ID NO: 20103 - DNA, 2450 bp, Oryza sativa
  Clone ID: PAT_MRT4530_25501C.1
atggcgctcggggttcggtgggatctactacgccagatctgagaaagaaactcgattgagacgaaggttgggtcgtcgccgcactattgtgtgactatggcagaaaccaataagaggtgtatatttgctcccaaagttctcctcagaacttccccccgaacaaatgaagaagcttaaatatgtggactcaaccttaaacgtcggaacgttggtgcgcatgtacaaagataccttggtcaagatgattgtaatgatgaattctaggaacttgcatcagaattaggcaaatacatgatcgccaagcttgctgctgattttctacctcctgggtcaccgatgttaatggcggataggctaaaagttccttcatttctattcgaacatgtatcatacacttttaccattacccatgactacattggcagctgaatgaaagcccgttgtgcacatcgtcgcatatccctggttggataggttccatccattcctgcttgaactgcttgcgaccgtttgagtcaattagttggtcagtctgaggctagatggggccacaacattggatatgagtccctccctaccatctcacagaagtatctatggcatccgagtttagtctctagaggatgccatgttaggcggagttcttacgtaaatagcgaaaagcacaaatcatagataaacttccatccagttctcacccacttcagagcacatactattggcatatggtcgtcgtcataactctatgcttaggagcattgtgatggatggggaaactggaattcctgtatagaggttaataatcttgattctgcggactcaccattgacccttgcaacctcttcgggctattcaaactatccctcggctgtgttttttgcaaatattaattccagaaactgtccacatcatgaggctaattcatcatcaccttgcttgctttggcctgcatacctcagggatgatggaagtttatgtctgattcgcaatgacttggttagtagttcaaccaatgtgcatcagagaccatcatctttagctcaaaatccattggcatcagatgttgaaaatcaacagcctgaccaacttgtcacgcctatggatgtgtgccctggagaaccatctacttctcatgcttctgcatctggtttaagtggagttgaaatgcagattgacagggggcaacctagctccagattactgggcagtagctccactagtaatcatgagagttctactgctagagatgatgtgcaaatgccctccctgagcaacagcgtgccgattccagcaacatctcagccttcagaacatgatggccgtcatggtatgccaatgaattcgtttaccacttctagtggattagatgttcacatgatcctaagaaattcagagggtggaaatcatcatcatgatctcttcagtgactcgcgtagctgggagcttccctttttgcagggctggttcatggcccaaaatcatacaggtgcttctccatctattccgattgatgtcggcagttctagaggatcaaatcgacatcatgcttctcgtcgtcatgttgtgggctcattacgtggggttgggagttcacttctaggcccccaaattgatgaagctgaggttcatgctgcatcattaggtgttggatctgaacttactacctcactgcttgctgctggagctgctgaattaccttgcacagtgaagcttagaatatggcggcatgatatcaaggatccatgtgttacattggaacccgaggcatgccggttgacaatttctcatgccgttctctgcaggtttggcaaagttcttacatcaagagcgataagggcagctcattgcttaacttccatccagttctcacccacttcagagcacatactattggcatatggtcgtcgtcataactctatgcttaggagcattgtgatggatggggaaactggaattcctgtatatactatcttggaggtctatagagtatcggacatggagctggtaagagttcttcctagtgctgaagatgaagtaaacgttgcatgctttcatccttcccctggaggtggtcttgtttatgggaccaaggaaggaaagctcaggatcttgcagcacaatggtgcagatatcacaagcacagggttgaattgctttatcgaggaaaatatgcttgagatacctgctagccagcagatcctgaacggttaccagctggttactgttgggattccgatctatgatggcagattcagagatatgttccctggaaggctgaacgattggttgccatgtgttatgtgtacttctccaggaattttcctctgcaaagtttatcattgtacaacgaggtgaaaagcttgtcaaagcttgtcagtgcagaggtccttgatcttggtgttgccagtgaagactgtgttggatacgtgtcctcatctcttccctcttaa

SEQ ID NO: 20104 - DNA, 433 bp, Oryza sativa
  Clone ID: PAT_MRT4530_25502C.1
attgtttgcacaggcccctggcgggttgcctggctccggggttcctgcggccccgtggggtgctctgctccccggcccccccgccactccatccgtggaccatctgccccaaccccttaccctgatcgtcccagccgttctgctgattccggactccctgcccccgcgggacttatacgaacttgctccctccatactcatatacttgccatcttgtatcatcaagtagtctttcaaagttatgtataattctgaaaatttcaacattaagttttactcccattttttttcctcatgaggattagttttaatgattgttgtattccagtaccctgtccccttcacctcttgattttcagttgtaaataaacttttcttccatcttaatacaagatccactccttgcgtattccaaaaaaaaaaaaaaaaaaaa

SEQ ID NO: 20105 - DNA, 1444 bp, Oryza sativa
  Clone ID: PAT_MRT4530_25503C.1
atggtcgccgccggcgaccaacggcgcggcggagcggcacccgagagagaggagggaagggggaaacgaacggagcggtccacggctcaccccaagacggcgaaggcggtggaaacggcggacagagcggaggaagacggcggcgcggctcgggatgacgatgacgacggtgctccggcggtcgacgggcgaagcggagcggcggacggggtcggcgaccactcggcgaagcggacggaggtgtcgccgagtaaggaggaaggagtccatgccttgtttataagggggtgattatgatccaggtacggtgcactgtggtgaattgtgttatgcgaggggtattgtcacgactcctttccgaggtatcgtggtggtactgaggcacatggtgacatgatgtggggttgtgtcttgtgggtacagtgttgcatatttgctgtgtggcttgttgagtatgttatatgctcattcttgcaatattcattcatcagaagaggagtacttcagtgaagaaattctgggcgtgacaagttggtatcagagccaccttgactttaggataagctaaatgatgcctcgccattcaccaagaaatttgatcgaggtgttaggattcgtcagggagctgaggttgatggcttttgaagtaggttatgaagttgctcccgagtatcgccagatttcccatgaccccgacgaggagaaatgtcgtgttcgtgtgacgttggctagtgatagtgaagaccttccgtcttttaagttcgaagctggaggaagatcgtactgccatgcttgtcaagaagcagctttggtggccattggagagttgcgtcaacactttgaagaagaattggattcatcagctttccagtatcatccccacaagcctcatggtcaagactatggaacctatacctgtcctgatggtgaagagagtgccactctgatgcatgcggtgcatatgcttagtgctatggatgcagtaagtgtggagcgagacaaagcagctcatgacagggaaaactggaatcgaggcaagatttgcaagttgaagagcaaggtgtaccgcctacagaaggaattagctgaacttaaaggagaaacgccgccgccaacatcctagcttcgcctcactgcaagaaagagaacctgtccgccccctcgtctccagttagcttcgaagattcgcgtgatgggtgaagctgtgcccgatcgtgttgagcctgtcatcgacatcattagaagtggaagtggaagtggagccaataacaatgaagagaacccaacgctagctcagattttggctcaacaaacacaactgatcaatctgttagtgcagcaggcacagaatcagcaggcaaataatcaaaaccagaatccacccccacctccccaaaacaagttggcaagatttcttgcgtgtgagtccccctactttttcgag
